United States Patent Application Publication US 2007/0214517 A1 - sequence listing, part 13

SEQ ID NO: 16732 - protein, 105 aa, Zea mays subsp. mays
  peptide (1)..(105): Ceres Seq. ID no. 13499160
  misc_feature (1)..(28): Homolog of NCBI NO: 34897268 NR Description: unknown protein [Oryza sativa (japonica
  misc_feature (1)..(75): Homolog of NCBI NO: 15229653 NR Description: hypothetical protein [Arabidopsis thaliana]
  misc_feature (1)..(105): Homolog of NCBI NO: 34897272 NR Description: hypothetical protein [Oryza sativa (japonica
  misc_feature (1)..(28): Homolog of NCBI NO: 15217930 NR Description: hypothetical protein [Arabidopsis thaliana]
  misc_feature (1)..(28): Homolog of NCBI NO: 15223920 NR Description: expressed protein [Arabidopsis thaliana]
  misc_feature (1)..(28): Homolog of NCBI NO: 27414003 NR Description: fw2.2 [Lycopersicon cheesmanii]
  misc_feature (1)..(28): Homolog of NCBI NO: 27414017 NR Description: fw2.2 [Lycopersicon pennellii]
  misc_feature (1)..(28): Homolog of NCBI NO: 8272628 NR Description: ORFX [Lycopersicon pennellii]
  misc_feature (1)..(28): Homolog of NCBI NO: 27414005 NR Description: fw2.2 [Lycopersicon pimpinellifolium]
  misc_feature (1)..(28): Homolog of NCBI NO: 8272626 NR Description: ORFX [Lycopersicon esculentum]
MDDPGNCLITCLCPCVTFGQVADIVDKGHLPMYRERTGVRAHLRVDGDGVPVLVPLPVQAEGRVRPGRRGVPGHPGALLLRAPGSVPRVPRAQEPRLRPGDRLGG

SEQ ID NO: 16733 - DNA, 1745 bp, Zea mays subsp. mays
  misc_feature (1)..(1745): Ceres Seq. ID no. 12362494
  misc_feature: MA Experiment ID: 108522 Result: Down-regulated in Transcription
  misc_feature: MA Experiment 108522 PARAMETER Experiment Name: Zm_42deg_Heat_P Parameter: Age (day) Value: 8
  misc_feature: MA Experiment 108522 PARAMETER Experiment Name: Zm_42deg_Heat_P Parameter: Organism Value: Zea mays
  misc_feature: MA Experiment 108522 PARAMETER Experiment Name: Zm_42deg_Heat_P Parameter: Plant Line Value: 35A19
  misc_feature: MA Experiment 108522 PARAMETER Experiment Name: Zm_42deg_Heat_P Parameter: Temperature (deg C) Value: 42 vs. 22
  misc_feature: MA Experiment 108522 PARAMETER Experiment Name: Zm_42deg_Heat_P Parameter: Timepoint (hr) Value: 1
  misc_feature: MA Experiment 108522 PARAMETER Experiment Name: Zm_42deg_Heat_P Parameter: Tissue Value: Aerial
  misc_feature: MA Experiment ID: 108523 Result: Down-regulated in Transcription
  misc_feature: MA Experiment 108523 PARAMETER Experiment Name: Zm_42deg_Heat_P Parameter: Age (day) Value: 8
  misc_feature: MA Experiment 108523 PARAMETER Experiment Name: Zm_42deg_Heat_P Parameter: Organism Value: Zea mays
  misc_feature: MA Experiment 108523 PARAMETER Experiment Name: Zm_42deg_Heat_P Parameter: Plant Line Value: 35A19
  misc_feature: MA Experiment 108523 PARAMETER Experiment Name: Zm_42deg_Heat_P Parameter: Temperature (deg C) Value: 42 vs. 22
  misc_feature: MA Experiment 108523 PARAMETER Experiment Name: Zm_42deg_Heat_P Parameter: Timepoint (hr) Value: 6
  misc_feature: MA Experiment 108523 PARAMETER Experiment Name: Zm_42deg_Heat_P Parameter: Tissue Value: Aerial
  misc_feature: MA Experiment ID: 108526 Result: Up-regulated in Transcription
  misc_feature: MA Experiment 108526 PARAMETER Experiment Name: Zm_5mM_NO_P Parameter: Age (day) Value: 8
  misc_feature: MA Experiment 108526 PARAMETER Experiment Name: Zm_5mM_NO_P Parameter: Organism Value: Zea mays
  misc_feature: MA Experiment 108526 PARAMETER Experiment Name: Zm_5mM_NO_P Parameter: Plant Line Value: 35A19
  misc_feature: MA Experiment 108526 PARAMETER Experiment Name: Zm_5mM_NO_P Parameter: Timepoint (hr) Value: 1
  misc_feature: MA Experiment 108526 PARAMETER Experiment Name: Zm_5mM_NO_P Parameter: Tissue Value: Aerial
  misc_feature: MA Experiment 108526 PARAMETER Experiment Name: Zm_5mM_NO_P Parameter: Treatment Value: 5mM NO vs. No Treatment
  misc_feature: MA Experiment ID: 108529 Result: Up-regulated in Transcription
  misc_feature: MA Experiment 108529 PARAMETER Experiment Name: Zm_Imbibed_Seeds_P Parameter: Age (day) Value: 5 vs. 2
  misc_feature: MA Experiment 108529 PARAMETER Experiment Name: Zm_Imbibed_Seeds_P Parameter: Organism Value: Zea mays
  misc_feature: MA Experiment 108529 PARAMETER Experiment Name: Zm_Imbibed_Seeds_P Parameter: Plant Line Value: 35A19
  misc_feature: MA Experiment 108529 PARAMETER Experiment Name: Zm_Imbibed_Seeds_P Parameter: Tissue Value: Roots vs. Embryo
  misc_feature: MA Experiment ID: 108535 Result: Down-regulated in Transcription
  misc_feature: MA Experiment 108535 PARAMETER Experiment Name: Zm_Meristem_P Parameter: Age (day) Value: 8
  misc_feature: MA Experiment 108535 PARAMETER Experiment Name: Zm_Meristem_P Parameter: Organism Value: Zea mays
  misc_feature: MA Experiment 108535 PARAMETER Experiment Name: Zm_Meristem_P Parameter: Plant Line Value: 35A19
  misc_feature: MA Experiment 108535 PARAMETER Experiment Name: Zm_Meristem_P Parameter: Tissue Value: Root Meristem vs. Above Root Meristem
  misc_feature: MA Experiment ID: 20000487 Result: Up-regulated in Transcription
  misc_feature: MA Experiment 20000487 PARAMETER Experiment Name: Zm_50mM_NH4NO3_L_to_H_P Parameter: Organism Value: Zea mays
  misc_feature: MA Experiment 20000487 PARAMETER Experiment Name: Zm_50mM_NH4NO3_L_to_H_P Parameter: Timepoint (hr) Value: 4
  misc_feature: MA Experiment 20000487 PARAMETER Experiment Name: Zm_50mM_NH4NO3_L_to_H_P Parameter: Tissue Value: Leaves
  misc_feature: MA Experiment 20000487 PARAMETER Experiment Name: Zm_50mM_NH4NO3_L_to_H_P Parameter: Treatment Value: 50mM NH4NO3 vs. 100mM Mannitol
  misc_feature: MA Experiment ID: 20000535 Result: Down-regulated in Transcription
  misc_feature: MA Experiment 20000535 PARAMETER Experiment Name: Zm_Hybrid_Seed_Dev_P Parameter: DAP Value: 30 vs. 12
  misc_feature: MA Experiment 20000535 PARAMETER Experiment Name: Zm_Hybrid_Seed_Dev_P Parameter: Organism Value: Zea mays
  misc_feature: MA Experiment 20000535 PARAMETER Experiment Name: Zm_Hybrid_Seed_Dev_P Parameter: Plant Line Value: 35A19
  misc_feature: MA Experiment 20000535 PARAMETER Experiment Name: Zm_Hybrid_Seed_Dev_P Parameter: Tissue Value: Embryo vs. Unfert Floret
  misc_feature: MA Experiment ID: 20001610 Result: Up-regulated in Transcription
  misc_feature: MA Experiment 20001610 PARAMETER Experiment Name: Zm_50ppm_KNO3_L-to-H_P Parameter: Age (day) Value: 19
  misc_feature: MA Experiment 20001610 PARAMETER Experiment Name: Zm_50ppm_KNO3_L-to-H_P Parameter: Organism Value: Zea mays
  misc_feature: MA Experiment 20001610 PARAMETER Experiment Name: Zm_50ppm_KNO3_L-to-H_P Parameter: Plant Line Value: 35A19
  misc_feature: MA Experiment 20001610 PARAMETER Experiment Name: Zm_50ppm_KNO3_L-to-H_P Parameter: Timepoint (hr) Value: 2
  misc_feature: MA Experiment 20001610 PARAMETER Experiment Name: Zm_50ppm_KNO3_L-to-H_P Parameter: Tissue Value: Roots
  misc_feature: MA Experiment 20001610 PARAMETER Experiment Name: Zm_50ppm_KNO3_L-to-H_P Parameter: Treatment Value: 50ppm KNO3 vs. 50ppm KCl
gcacgagaccattacctagaacatcctaatcgaaaaagccttctcgtctgtccccttaatttttcaacctgctctggtggctggtttggccaccaatttcctctcaaagatacagcgaaatgcgcattattatatgtactgccgccgtcgtttaatcggtgtgttcatctcagctgtcgtgcagggcagcaggtggcgaggaggtcgtctcgtcgcggacagccgaggccgttgacctctccagctgctggacgcaacacggcaacgcgcaaacgcctctcctctgtgcgtaccggactaccggtaccgcgcgttcagtttccacttccacccgcgtcgtccgtctctctccgctcagcttgaggtgtccggatcacggcggttgcaacctgcagccgcaccagcaagccgctgctccctctcctaaccggccgctgcagctgccataccagccggaggagatgccggcggcgccggccatccgcctggggcctccgcacccgtacctgaagacccacgggggcaaggtcgcgaggctgcaccggctggactgggccgtgctgctgctcatcgccgccgccgacgtcgggctcaacctcgtcgagccgttccaccgcttcgtcggcgaggacatgctcgcggacctccggtacccgctgaagagcaacaccgtgcccgtctgggccgtgccggtgtacgcggtgatcggcccgatcgtcgtgttcgtcgggttatacctgaagcggaggaacgtgtacgacatgcaccacgccattctaggccttctcttctccgtgctcatcaccggcgtcctcaccgacgccatcaaggacggcgttggccggccgcgccccaacttcttctggcgctgcttccctgacggagtgccgaagtacgacaacatcacaagaggagtcctgtgcgacggcgtcgcgagcgtgatcaaagaagggcacaagagcttcccaagcggccattcttcgtggtccttcgctggcctaggcttcctgtcgtggtacctggcgggcaaggtcaaggcgttcgaccggcgcggccacgtggccaagctgtgcgtcgtgctcctgccgctgctgctcgcggccatggtggcggtgtcgcgggtggacgactactggcaccactggcaggacgtgtttgccggtgggattcttgggttggtggttgcgtctttctgctaccttcagtttttcccaccgccatctggtgaacaaggattctggccccatgcgtactccgagcacattctcaacaaccctgagcgcgagggccgagcgcagtccacagcgagctcgaaccaccaccgacgcctgtccagccgaggccacgtggcagtggagatgagcaccgcgaccgcgagcgcgagccaggacgcatcgtcgttaggtcccatggaggagatggagatggaggaaggacgcggcggagcccggtacgaacagcgctagctgcagcttcagtcttcaaagtcgcttcgtttccttccttcattcctttctttttttcttcttcttcttctttttgctcgtttggttgatagatgtgtgtgtctatctagtagtaaggtgctgtttgttgtgtcggtcctgctgtaaattagatgtaggtaggtaggtaggtagccaggtaggtaggtgaaccatgcatgtttcatatgtttgatgcagtacgatgatgattagcacgtactgtacaacggaagcatgcgtgcgtgcgtgccccggttc

SEQ ID NO: 16734 - protein, 334 aa, Zea mays subsp. mays
  peptide (1)..(334): Ceres Seq. ID no. 12362495
  misc_feature (78)..(253): Pfam Name: PAP2 superfamily Pfam Description: PAP2 superfamily
  misc_feature (16)..(316): Homolog of NCBI NO: 21554001 NR Description: putative phosphatidic acid phosphatase
  misc_feature (16)..(278): Homolog of NCBI NO: 18396250 NR Description: putative phosphatidate phosphohydrolase
  misc_feature (16)..(278): Homolog of NCBI NO: 6957723 NR Description: putative phosphatidate phosphohydrolase
  misc_feature (5)..(298): Homolog of NCBI NO: 10673973 NR Description: phosphatidic acid phosphatase beta [Vigna
  misc_feature (18)..(280): Homolog of NCBI NO: 38637527 NR Description: putative phosphatidic acid phosphatase beta
  misc_feature (1)..(286): Homolog of NCBI NO: 9621903 NR Description: phosphatidic acid phosphatase alpha [Vigna
  misc_feature (5)..(286): Homolog of NCBI NO: 15218051 NR Description: putative phosphatidic acid phosphatase
  misc_feature (1)..(286): Homolog of NCBI NO: 20161571 NR Description: putative phosphatidic acid phosphatase beta
  misc_feature (5)..(300): Homolog of NCBI NO: 38637528 NR Description: unknown protein [Oryza sativa (japonica
  misc_feature (1)..(315): Homolog of NCBI NO: 34910912 NR Description: putative phosphatidic acid phosphatase beta
MPAAPAIRLGPPHPYLKTHGGKVARLHRLDWAVLLLIAAADVGLNLVEPFHRFVGEDMLADLRYPLKSNTVPVWAVPVYAVIGPIVVFVGLYLKRRNVYDMHHAILGLLFSVLITGVLTDAIKDGVGRPRPNFFWRCFPDGVPKYDNITRGVLCDGVASVIKEGHKSFPSGHSSWSFAGLGFLSWYLAGKVKAFDRRGHVAKLCVVLLPLLLAAMVAVSRVDDYWHHWQDVFAGGILGLVVASFCYLQFFPPPSGEQGFWPHAYSEHILNNPEREGRAQSTASSNHHRRLSSRGHVAVEMSTATASASQDASSLGPMEEMEMEEGRGGARYEQR

SEQ ID NO: 16735 - protein, 277 aa, Zea mays subsp. mays
  peptide (1)..(277): Ceres Seq. ID no. 12362496
  misc_feature (21)..(196): Pfam Name: PAP2 superfamily Pfam Description: PAP2 superfamily
  misc_feature (1)..(221): Homolog of NCBI NO: 18396250 NR Description: putative phosphatidate phosphohydrolase
  misc_feature (1)..(221): Homolog of NCBI NO: 6957723 NR Description: putative phosphatidate phosphohydrolase
  misc_feature (1)..(241): Homolog of NCBI NO: 10673973 NR Description: phosphatidic acid phosphatase beta [Vigna
  misc_feature (1)..(223): Homolog of NCBI NO: 38637527 NR Description: putative phosphatidic acid phosphatase beta
  misc_feature (1)..(229): Homolog of NCBI NO: 9621903 NR Description: phosphatidic acid phosphatase alpha [Vigna
  misc_feature (1)..(259): Homolog of NCBI NO: 21554001 NR Description: putative phosphatidic acid phosphatase
  misc_feature (1)..(229): Homolog of NCBI NO: 15218051 NR Description: putative phosphatidic acid phosphatase
  misc_feature (1)..(229): Homolog of NCBI NO: 20161571 NR Description: putative phosphatidic acid phosphatase beta
  misc_feature (1)..(243): Homolog of NCBI NO: 38637528 NR Description: unknown protein [Oryza sativa (japonica
  misc_feature (1)..(258): Homolog of NCBI NO: 34910912 NR Description: putative phosphatidic acid phosphatase beta
MLADLRYPLKSNTVPVWAVPVYAVIGPIVVFVGLYLKRRNVYDMHHAILGLLFSVLITGVLTDAIKDGVGRPRPNFFWRCFPDGVPKYDNITRGVLCDGVASVIKEGHKSFPSGHSSWSFAGLGFLSWYLAGKVKAFDRRGHVAKLCVVLLPLLLAAMVAVSRVDDYWHHWQDVFAGGILGLVVASFCYLQFFPPPSGEQGFWPHAYSEHILNNPEREGRAQSTASSNHHRRLSSRGHVAVEMSTATASASQDASSLGPMEEMEMEEGRGGARYEQR

SEQ ID NO: 16736 - protein, 234 aa, Zea mays subsp. mays
  peptide (1)..(234): Ceres Seq. ID no. 12362497
  misc_feature (1)..(153): Pfam Name: PAP2 superfamily Pfam Description: PAP2 superfamily
  misc_feature (1)..(216): Homolog of NCBI NO: 21554001 NR Description: putative phosphatidic acid phosphatase
  misc_feature (1)..(178): Homolog of NCBI NO: 18396250 NR Description: putative phosphatidate phosphohydrolase
  misc_feature (1)..(178): Homolog of NCBI NO: 6957723 NR Description: putative phosphatidate phosphohydrolase
  misc_feature (1)..(198): Homolog of NCBI NO: 10673973 NR Description: phosphatidic acid phosphatase beta [Vigna
  misc_feature (1)..(180): Homolog of NCBI NO: 38637527 NR Description: putative phosphatidic acid phosphatase beta
  misc_feature (1)..(186): Homolog of NCBI NO: 9621903 NR Description: phosphatidic acid phosphatase alpha [Vigna
  misc_feature (1)..(186): Homolog of NCBI NO: 15218051 NR Description: putative phosphatidic acid phosphatase
  misc_feature (1)..(186): Homolog of NCBI NO: 20161571 NR Description: putative phosphatidic acid phosphatase beta
  misc_feature (1)..(200): Homolog of NCBI NO: 38637528 NR Description: unknown protein [Oryza sativa (japonica
  misc_feature (1)..(215): Homolog of NCBI NO: 34910912 NR Description: putative phosphatidic acid phosphatase beta
MHHAILGLLFSVLITGVLTDAIKDGVGRPRPNFFWRCFPDGVPKYDNITRGVLCDGVASVIKEGHKSFPSGHSSWSFAGLGFLSWYLAGKVKAFDRRGHVAKLCVVLLPLLLAAMVAVSRVDDYWHHWQDVFAGGILGLVVASFCYLQFFPPPSGEQGFWPHAYSEHILNNPEREGRAQSTASSNHHRRLSSRGHVAVEMSTATASASQDASSLGPMEEMEMEEGRGGARYEQR

SEQ ID NO: 16737 - DNA, 1826 bp, Zea mays subsp. mays
  misc_feature (1)..(1826): Ceres Seq. ID no. 12415154
  misc_feature: MA Experiment ID: 108535 Result: Down-regulated in Transcription
  misc_feature: MA Experiment 108535 PARAMETER Experiment Name: Zm_Meristem_P Parameter: Age (day) Value: 8
  misc_feature: MA Experiment 108535 PARAMETER Experiment Name: Zm_Meristem_P Parameter: Organism Value: Zea mays
  misc_feature: MA Experiment 108535 PARAMETER Experiment Name: Zm_Meristem_P Parameter: Plant Line Value: 35A19
  misc_feature: MA Experiment 108535 PARAMETER Experiment Name: Zm_Meristem_P Parameter: Tissue Value: Root Meristem vs. Above Root Meristem
gactcagtcaatctcgccttgctctcctcttcgacccatcgtcggttcctgggatcagcatcgacgagcaggatttttccggctgtggaggattactgctgcttgacaaatccgagcgcaaaggttgcttcctgacgcgttcccccatggcacgagcaggagcacgagcacgagcacgagcaggagaaggcggctagaaggttcctgctcccgggcgtgacctctcacacggcatggtcgttgcttcgccggggaggcgcagcggggatggtcgataggagcagggccgtgctcatcggggtcaccgccggcgtcgcggccgcgctggtcgcggcggcgggcgtgcttctggccgtctggctctaccgccggcgggccagcgtcgccgcacggacgcgctccccggagtcgccctcggcgacgctgcgggccggcggcgccggtcgcgccagcctcgactccagcgtctccgtctcggtggtctccgagagcgccgccgactggggccacccgccaccgcacaaacgcgccgcgttctgggcctggagaggcggcgccggccacaacggcagggaggcgccaccgctgtccgtctccgggatcccaaaataccattacaaggatctgcagaaggctaccagcaactttaccacaattcttgggcaaggatcgttcggccctgtgtacaaagctgtaatggccactggtgaagtggtagctgtaaaggtgctcgcgagtgattcaaggcaaggggaaagaaagttccagactgaggtagcattgcttagcaggttgcatcataggaatcttgttaatttggttgggtattgtgtagaaaaaggtcagcgcattctgatttatgagtacatgagcaatgggagtttggcaagacttttatatggcgacaataaacgaagtttgagctggcaagaaaggctgcaaattgctcacgatgtttctcatgggattgagtacctgcatgaaggggctgttccttctgttattcacagggacctaaagtctgataatatacttttggaccattcaatgagagccaaggttgcagactttggtctatcaaaggaggaagtgtatgatggaaggaagtctggccttaagggcacctatggctatatggatcctgattacatgtccacaaataagctaacaaagaagagcgacgtgtatagctttggcataatactttttgaactgataactgccataaatccacaacaaggtctgatggagtacattaatctggcagcgattggaggggaggggagggttgattgggacgagatactggacaaggacctcctagtagggaacatccctgaagaggttcggatgcttgctgatgttgcctaccgatgcgttaacaagaatccgaggaagcgcccctggatatcagaggtcacacaggccatctcaagactcagacagcaccagctgataaagcatgatgcgataactctgccgaggagtgagaccaggaccgtccttaggaggatagactaccagcacgtggagcttagtgacctcactagcatcaaagaacttacgccgataagggcatcatgaactcgtgagcttgttctagtatgtaggttgctttatagagttagatttggacttggttcggcgatgttgtagctgtttgatgaaagcatcaggtagctagatcgttgaaagatgtcttggctgcaatgagagctctccttaattggagttctgtactgacctgaggtttgaaatcgttgtaaaaaaatcaacagtagtagctgtagcatttgataaaaaaagactttataaactgcattttt

SEQ ID NO: 16738 - protein, 438 aa, Zea mays subsp. mays
  peptide (1)..(438): Ceres Seq. ID no. 12415155
  misc_feature (115)..(396): Homolog of NCBI NO: 15221470 NR Description: protein kinase, putative
  misc_feature (120)..(388): Homolog of NCBI NO: 18408845 NR Description: F12A21.14; protein id: At1g67720.1 [Arabidopsis
  misc_feature (92)..(394): Homolog of NCBI NO: 7715608 NR Description: F20B17.5 [Arabidopsis thaliana]
  misc_feature (90)..(394): Homolog of NCBI NO: 30699436 NR Description: leucine-rich repeat transmembrane protein kinase,
  misc_feature (115)..(388): Homolog of NCBI NO: 15230108 NR Description: protein kinase, putative; protein id: At3g24400.1
  misc_feature (1)..(391): Homolog of NCBI NO: 30696480 NR Description: protein kinase family [Arabidopsis thaliana]
  misc_feature (5)..(399): Homolog of NCBI NO: 38636770 NR Description: putative serine/threonine-specific protein kinase
  misc_feature (1)..(431): Homolog of NCBI NO: 18417765 NR Description: serine/threonine-specific protein kinase-like
  misc_feature (1)..(431): Homolog of NCBI NO: 11358843 NR Description: serine/threonine-specific protein kinase-like
  misc_feature (1)..(431): Homolog of NCBI NO: 1076634 NR Description: serine/threonine-specific protein kinase NPK15
MVDRSRAVLIGVTAGVAAALVAAAGVLLAVWLYRRRASVAARTRSPESPSATLRAGGAGRASLDSSVSVSVVSESAADWGHPPPHKRAAFWAWRGGAGHNGREAPPLSVSGIPKYHYKDLQKATSNFTTILGQGSFGPVYKAVMATGEVVAVKVLASDSRQGERKFQTEVALLSRLHHRNLVNLVGYCVEKGQRILIYEYMSNGSLARLLYGDNKRSLSWQERLQIAHDVSHGIEYLHEGAVPSVIHRDLKSDNILLDHSMRAKVADFGLSKEEVYDGRKSGLKGTYGYMDPDYMSTNKLTKKSDVYSFGIILFELITAINPQQGLMEYINLAAIGGEGRVDWDEILDKDLLVGNIPEEVRMLADVAYRCVNKNPRKRPWISEVTQAISRLRQHQLIKHDAITLPRSETRTVLRRIDYQHVELSDLTSIKELTPIRAS

SEQ ID NO: 16739 - protein, 295 aa, Zea mays subsp. mays
  peptide (1)..(295): Ceres Seq. ID no. 12415156
  misc_feature (1)..(253): Homolog of NCBI NO: 15221470 NR Description: protein kinase, putative
  misc_feature (1)..(245): Homolog of NCBI NO: 18408845 NR Description: F12A21.14; protein id: At1g67720.1 [Arabidopsis
  misc_feature (1)..(251): Homolog of NCBI NO: 7715608 NR Description: F20B17.5 [Arabidopsis thaliana]
  misc_feature (1)..(251): Homolog of NCBI NO: 30699436 NR Description: leucine-rich repeat transmembrane protein kinase,
  misc_feature (1)..(245): Homolog of NCBI NO: 15230108 NR Description: protein kinase, putative; protein id: At3g24400.1
  misc_feature (1)..(248): Homolog of NCBI NO: 30696480 NR Description: protein kinase family [Arabidopsis thaliana]
  misc_feature (1)..(256): Homolog of NCBI NO: 38636770 NR Description: putative serine/threonine-specific protein kinase
  misc_feature (1)..(288): Homolog of NCBI NO: 18417765 NR Description: serine/threonine-specific protein kinase-like
  misc_feature (1)..(288): Homolog of NCBI NO: 11358843 NR Description: serine/threonine-specific protein kinase-like
  misc_feature (1)..(288): Homolog of NCBI NO: 1076634 NR Description: serine/threonine-specific protein kinase NPK15
MATGEVVAVKVLASDSRQGERKFQTEVALLSRLHHRNLVNLVGYCVEKGQRILIYEYMSNGSLARLLYGDNKRSLSWQERLQIAHDVSHGIEYLHEGAVPSVIHRDLKSDNILLDHSMRAKVADFGLSKEEVYDGRKSGLKGTYGYMDPDYMSTNKLTKKSDVYSFGIILFELITAINPQQGLMEYINLAAIGGEGRVDWDEILDKDLLVGNIPEEVRMLADVAYRCVNKNPRKRPWISEVTQAISRLRQHQLIKHDAITLPRSETRTVLRRIDYQHVELSDLTSIKELTPIRAS

SEQ ID NO: 16740 - protein, 238 aa, Zea mays subsp. mays
  peptide (1)..(238): Ceres Seq. ID no. 12415157
  misc_feature (1)..(196): Homolog of NCBI NO: 15221470 NR Description: protein kinase, putative
  misc_feature (1)..(188): Homolog of NCBI NO: 18408845 NR Description: F12A21.14; protein id: At1g67720.1 [Arabidopsis
  misc_feature (1)..(194): Homolog of NCBI NO: 7715608 NR Description: F20B17.5 [Arabidopsis thaliana]
  misc_feature (1)..(194): Homolog of NCBI NO: 30699436 NR Description: leucine-rich repeat transmembrane protein kinase,
  misc_feature (1)..(188): Homolog of NCBI NO: 15230108 NR Description: protein kinase, putative; protein id: At3g24400.1
  misc_feature (1)..(191): Homolog of NCBI NO: 30696480 NR Description: protein kinase family [Arabidopsis thaliana]
  misc_feature (1)..(199): Homolog of NCBI NO: 38636770 NR Description: putative serine/threonine-specific protein kinase
  misc_feature (1)..(231): Homolog of NCBI NO: 18417765 NR Description: serine/threonine-specific protein kinase-like
  misc_feature (1)..(231): Homolog of NCBI NO: 11358843 NR Description: serine/threonine-specific protein kinase-like
  misc_feature (1)..(231): Homolog of NCBI NO: 1076634 NR Description: serine/threonine-specific protein kinase NPK15
MSNGSLARLLYGDNKRSLSWQERLQIAHDVSHGIEYLHEGAVPSVIHRDLKSDNILLDHSMRAKVADFGLSKEEVYDGRKSGLKGTYGYMDPDYMSTNKLTKKSDVYSFGIILFELITAINPQQGLMEYINLAAIGGEGRVDWDEILDKDLLVGNIPEEVRMLADVAYRCVNKNPRKRPWISEVTQAISRLRQHQLIKHDAITLPRSETRTVLRRIDYQHVELSDLTSIKELTPIRAS

SEQ ID NO: 16741 - DNA, 1386 bp, Zea mays subsp. mays; identical to SEQ ID NO: 6848
  misc_feature (1)..(1386): Ceres Seq. ID no. 13492826
  misc_feature: MA Experiment ID: 108515 Result: Up-regulated in Transcription
  misc_feature: MA Experiment 108515 PARAMETER Experiment Name: Zm_2mM_SA_P Parameter: Age (day) Value: 8
  misc_feature: MA Experiment 108515 PARAMETER Experiment Name: Zm_2mM_SA_P Parameter: Organism Value: Zea mays
  misc_feature: MA Experiment 108515 PARAMETER Experiment Name: Zm_2mM_SA_P Parameter: Plant Line Value: 35A19
  misc_feature: MA Experiment 108515 PARAMETER Experiment Name: Zm_2mM_SA_P Parameter: Timepoint (hr) Value: 12
  misc_feature: MA Experiment 108515 PARAMETER Experiment Name: Zm_2mM_SA_P Parameter: Tissue Value: Aerial
  misc_feature: MA Experiment 108515 PARAMETER Experiment Name: Zm_2mM_SA_P Parameter: Treatment Value: 2mM SA vs. No Treatment
  misc_feature: MA Experiment ID: 108522 Result: Down-regulated in Transcription
  misc_feature: MA Experiment 108522 PARAMETER Experiment Name: Zm_42deg_Heat_P Parameter: Age (day) Value: 8
  misc_feature: MA Experiment 108522 PARAMETER Experiment Name: Zm_42deg_Heat_P Parameter: Organism Value: Zea mays
  misc_feature: MA Experiment 108522 PARAMETER Experiment Name: Zm_42deg_Heat_P Parameter: Plant Line Value: 35A19
  misc_feature: MA Experiment 108522 PARAMETER Experiment Name: Zm_42deg_Heat_P Parameter: Temperature (deg C) Value: 42 vs. 22
  misc_feature: MA Experiment 108522 PARAMETER Experiment Name: Zm_42deg_Heat_P Parameter: Timepoint (hr) Value: 1
  misc_feature: MA Experiment 108522 PARAMETER Experiment Name: Zm_42deg_Heat_P Parameter: Tissue Value: Aerial
  misc_feature: MA Experiment ID: 108535 Result: Up-regulated in Transcription
  misc_feature: MA Experiment 108535 PARAMETER Experiment Name: Zm_Meristem_P Parameter: Age (day) Value: 8
  misc_feature: MA Experiment 108535 PARAMETER Experiment Name: Zm_Meristem_P Parameter: Organism Value: Zea mays
  misc_feature: MA Experiment 108535 PARAMETER Experiment Name: Zm_Meristem_P Parameter: Plant Line Value: 35A19
  misc_feature: MA Experiment 108535 PARAMETER Experiment Name: Zm_Meristem_P Parameter: Tissue Value: Root Meristem vs. Above Root Meristem
  misc_feature: MA Experiment ID: 108543 Result: Down-regulated in Transcription
  misc_feature: MA Experiment ID: 20000108 Result: Up-regulated in Transcription
  misc_feature: MA Experiment 20000108 PARAMETER Experiment Name: Zm_Root-Tips_P Parameter: Age (day) Value: 12
  misc_feature: MA Experiment 20000108 PARAMETER Experiment Name: Zm_Root-Tips_P Parameter: Organism Value: Zea mays
  misc_feature: MA Experiment 20000108 PARAMETER Experiment Name: Zm_Root-Tips_P Parameter: Tissue Value: Root tips vs. Root mid region    35
  misc_feature: MA Experiment 20000108 PARAMETER Experiment Name: Zm_Root-Tips_P Parameter: Tissue Value: Root tips vs. Root mid region   Sequence Listing-Misc Features (4)
  misc_feature: MA Experiment ID: 20000492 Result: Up-regulated in Transcription
  misc_feature: MA Experiment 20000492 PARAMETER Experiment Name: Zm_Hybrid_Seed_Dev_P Parameter: DAP Value: 12
  misc_feature: MA Experiment 20000492 PARAMETER Experiment Name: Zm_Hybrid_Seed_Dev_P Parameter: Organism Value: Zea mays
  misc_feature: MA Experiment 20000492 PARAMETER Experiment Name: Zm_Hybrid_Seed_Dev_P Parameter: Plant Line Value: 35A19
  misc_feature: MA Experiment 20000492 PARAMETER Experiment Name: Zm_Hybrid_Seed_Dev_P Parameter: Tissue Value: Fert Kernel vs. Unfert Floret
  misc_feature: MA Experiment ID: 20000535 Result: Up-regulated in Transcription
  misc_feature: MA Experiment 20000535 PARAMETER Experiment Name: Zm_Hybrid_Seed_Dev_P Parameter: DAP Value: 30 vs. 12
  misc_feature: MA Experiment 20000535 PARAMETER Experiment Name: Zm_Hybrid_Seed_Dev_P Parameter: Organism Value: Zea mays
  misc_feature: MA Experiment 20000535 PARAMETER Experiment Name: Zm_Hybrid_Seed_Dev_P Parameter: Plant Line Value: 35A19
  misc_feature: MA Experiment 20000535 PARAMETER Experiment Name: Zm_Hybrid_Seed_Dev_P Parameter: Tissue Value: Embryo vs. Unfert Floret

SEQ ID NO: 16742 - protein, 342 aa, Zea mays subsp. mays; identical to SEQ ID NO: 6849
  peptide (1)..(342): Ceres Seq. ID no. 13492827
  misc_feature (1)..(342): Homolog of NCBI NO: 34909204 NR Description: P0425G02.25 [Oryza sativa (japonica
  misc_feature (20)..(320): Homolog of NCBI NO: 15231951 NR Description: glycine-rich protein [Arabidopsis thaliana]
  misc_feature (20)..(321): Homolog of NCBI NO: 15231950 NR Description: expressed protein [Arabidopsis thaliana]
  misc_feature (100)..(307): Homolog of NCBI NO: 6934300 NR Description: unknown [Euphorbia esula]
  misc_feature (88)..(307): Homolog of NCBI NO: 30687286 NR Description: expressed protein [Arabidopsis thaliana]
  misc_feature (90)..(307): Homolog of NCBI NO: 15242979 NR Description: expressed protein [Arabidopsis thaliana] gb|AAF31706.1~gene_id:K8E10.2~similar to unknown protein
  misc_feature (100)..(307): Homolog of NCBI NO: 34395170 NR Description: chloroplast lumen common protein family-like
  misc_feature (100)..(307): Homolog of NCBI NO: 34900644 NR Description: hypothetical protein~similar to Arabidopsis
  misc_feature (96)..(309): Homolog of NCBI NO: 18416870 NR Description: expressed protein [Arabidopsis thaliana] putative protein [Arabidopsis thaliana] unknown protein [Arabidopsis thaliana]

SEQ ID NO: 16743 - protein, 230 aa, Zea mays subsp. mays; identical to SEQ ID NO: 6850
  peptide (1)..(230): Ceres Seq. ID no. 13492828
  misc_feature (1)..(230): Homolog of NCBI NO: 34909204 NR Description: P0425G02.25 [Oryza sativa (japonica
  misc_feature (1)..(208): Homolog of NCBI NO: 15231951 NR Description: glycine-rich protein [Arabidopsis thaliana]
  misc_feature (1)..(209): Homolog of NCBI NO: 15231950 NR Description: expressed protein [Arabidopsis thaliana]
  misc_feature (1)..(195): Homolog of NCBI NO: 6934300 NR Description: unknown [Euphorbia esula]
  misc_feature (1)..(195): Homolog of NCBI NO: 30687286 NR Description: expressed protein [Arabidopsis thaliana]
  misc_feature (1)..(195): Homolog of NCBI NO: 15242979 NR Description: expressed protein [Arabidopsis thaliana] gb|AAF31706.1~gene_id:K8E10.2~similar to unknown protein
  misc_feature (1)..(195): Homolog of NCBI NO: 34395170 NR Description: chloroplast lumen common protein family-like
  misc_feature (1)..(195): Homolog of NCBI NO: 34900644 NR Description: hypothetical protein~similar to Arabidopsis
  misc_feature (1)..(197): Homolog of NCBI NO: 18416870 NR Description: expressed protein [Arabidopsis thaliana] putative protein [Arabidopsis thaliana] unknown protein [Arabidopsis thaliana]

SEQ ID NO: 16744 - protein, 216 aa, Zea mays subsp. mays; identical to SEQ ID NO: 6851
  peptide (1)..(216): Ceres Seq. ID no. 13492829
  misc_feature (1)..(183): Homolog of NCBI NO: 18416870 NR Description: expressed protein [Arabidopsis thaliana] putative protein [Arabidopsis thaliana] unknown protein [Arabidopsis thaliana]
  misc_feature (1)..(216): Homolog of NCBI NO: 34909204 NR Description: P0425G02.25 [Oryza sativa (japonica
  misc_feature (1)..(194): Homolog of NCBI NO: 15231951 NR Description: glycine-rich protein [Arabidopsis thaliana]
  misc_feature (1)..(195): Homolog of NCBI NO: 15231950 NR Description: expressed protein [Arabidopsis thaliana]
  misc_feature (1)..(181): Homolog of NCBI NO: 6934300 NR Description: unknown [Euphorbia esula]
  misc_feature (1)..(181): Homolog of NCBI NO: 30687286 NR Description: expressed protein [Arabidopsis thaliana]
  misc_feature (1)..(181): Homolog of NCBI NO: 15242979 NR Description: expressed protein [Arabidopsis thaliana] gb|AAF31706.1~gene_id:K8E10.2~similar to unknown protein
  misc_feature (1)..(181): Homolog of NCBI NO: 34395170 NR Description: chloroplast lumen common protein family-like
  misc_feature (1)..(181): Homolog of NCBI NO: 34900644 NR Description: hypothetical protein~similar to Arabidopsis

SEQ ID NO: 16745 - DNA, 1638 bp, Zea mays subsp. mays
  misc_feature (1)..(1638): Ceres Seq. ID no. 12369305
  misc_feature: MA Experiment ID: 108528 Result: Down-regulated in Transcription
  misc_feature: MA Experiment 108528 PARAMETER Experiment Name: Zm_Imbibed_Seeds_P Parameter: Age (day) Value: 5 vs. 2
  misc_feature: MA Experiment 108528 PARAMETER Experiment Name: Zm_Imbibed_Seeds_P Parameter: Organism Value: Zea mays
  misc_feature: MA Experiment 108528 PARAMETER Experiment Name: Zm_Imbibed_Seeds_P Parameter: Plant Line Value: 35A19
  misc_feature: MA Experiment 108528 PARAMETER Experiment Name: Zm_Imbibed_Seeds_P Parameter: Tissue Value: Aerial vs. Embryo
  misc_feature: MA Experiment ID: 108530 Result: Down-regulated in Transcription
  misc_feature: MA Experiment 108530 PARAMETER Experiment Name: Zm_Imbibed_Seeds_P Parameter: Age (day) Value: 6 vs. 2
  misc_feature: MA Experiment 108530 PARAMETER Experiment Name: Zm_Imbibed_Seeds_P Parameter: Organism Value: Zea mays
  misc_feature: MA Experiment 108530 PARAMETER Experiment Name: Zm_Imbibed_Seeds_P Parameter: Plant Line Value: 35A19
  misc_feature: MA Experiment 108530 PARAMETER Experiment Name: Zm_Imbibed_Seeds_P Parameter: Tissue Value: Aerial vs. Embryo
  misc_feature: MA Experiment ID: 108535 Result: Up-regulated in Transcription
  misc_feature: MA Experiment 108535 PARAMETER Experiment Name: Zm_Meristem_P Parameter: Age (day) Value: 8
  misc_feature: MA Experiment 108535 PARAMETER Experiment Name: Zm_Meristem_P Parameter: Organism Value: Zea mays
  misc_feature: MA Experiment 108535 PARAMETER Experiment Name: Zm_Meristem_P Parameter: Plant Line Value: 35A19
  misc_feature: MA Experiment 108535 PARAMETER Experiment Name: Zm_Meristem_P Parameter: Tissue Value: Root Meristem vs. Above Root Meristem
  misc_feature: MA Experiment ID: 108544 Result: Down-regulated in Transcription
  misc_feature: MA Experiment ID: 20000108 Result: Up-regulated in Transcription
  misc_feature: MA Experiment 20000108 PARAMETER Experiment Name: Zm_Root-Tips_P Parameter: Age (day) Value: 12
  misc_feature: MA Experiment 20000108 PARAMETER Experiment Name: Zm_Root-Tips_P Parameter: Organism Value: Zea mays
  misc_feature: MA Experiment 20000108 PARAMETER Experiment Name: Zm_Root-Tips_P Parameter: Tissue Value: Root tips vs. Root mid region    35
  misc_feature: MA Experiment 20000108 PARAMETER Experiment Name: Zm_Root-Tips_P Parameter: Tissue Value: Root tips vs. Root mid region   Sequence Listing-Misc Features (4)
  misc_feature: MA Experiment ID: 20000477 Result: Down-regulated in Transcription
  misc_feature: MA Experiment 20000477 PARAMETER Experiment Name: Zm_5mM_SA_P Parameter: Age (day) Value: 10
  misc_feature: MA Experiment 20000477 PARAMETER Experiment Name: Zm_5mM_SA_P Parameter: Organism Value: Zea mays
  misc_feature: MA Experiment 20000477 PARAMETER Experiment Name: Zm_5mM_SA_P Parameter: Plant Line Value: 35A19
  misc_feature: MA Experiment 20000477 PARAMETER Experiment Name: Zm_5mM_SA_P Parameter: Timepoint (hr) Value: 48
  misc_feature: MA Experiment 20000477 PARAMETER Experiment Name: Zm_5mM_SA_P Parameter: Tissue Value: Aerial
  misc_feature: MA Experiment 20000477 PARAMETER Experiment Name: Zm_5mM_SA_P Parameter: Treatment Value: 5mM SA vs. No Treatment
  misc_feature: MA Experiment ID: 20000478 Result: Down-regulated in Transcription
  misc_feature: MA Experiment 20000478 PARAMETER Experiment Name: Zm_5mM_SA_P Parameter: Age (day) Value: 11
  misc_feature: MA Experiment 20000478 PARAMETER Experiment Name: Zm_5mM_SA_P Parameter: Organism Value: Zea mays
  misc_feature: MA Experiment 20000478 PARAMETER Experiment Name: Zm_5mM_SA_P Parameter: Plant Line Value: 35A19
  misc_feature: MA Experiment 20000478 PARAMETER Experiment Name: Zm_5mM_SA_P Parameter: Timepoint (hr) Value: 72
  misc_feature: MA Experiment 20000478 PARAMETER Experiment Name: Zm_5mM_SA_P Parameter: Tissue Value: Aerial
  misc_feature: MA Experiment 20000478 PARAMETER Experiment Name: Zm_5mM_SA_P Parameter: Treatment Value: 5mM SA vs. No Treatment
  misc_feature: MA Experiment ID: 20000479 Result: Down-regulated in Transcription
  misc_feature: MA Experiment 20000479 PARAMETER Experiment Name: Zm_Drought_P Parameter: Age (day) Value: 10
  misc_feature: MA Experiment 20000479 PARAMETER Experiment Name: Zm_Drought_P Parameter: Organism Value: Zea mays
  misc_feature: MA Experiment 20000479 PARAMETER Experiment Name: Zm_Drought_P Parameter: Plant Line Value: 35A19
  misc_feature: MA Experiment 20000479 PARAMETER Experiment Name: Zm_Drought_P Parameter: Timepoint (hr) Value: 48
  misc_feature: MA Experiment 20000479 PARAMETER Experiment Name: Zm_Drought_P Parameter: Tissue Value: Aerial
  misc_feature: MA Experiment 20000479 PARAMETER Experiment Name: Zm_Drought_P Parameter: Treatment Value: Drought vs. No Drought
  misc_feature: MA Experiment ID: 20000480 Result: Down-regulated in Transcription
  misc_feature: MA Experiment 20000480 PARAMETER Experiment Name: Zm_Drought_P Parameter: Age (day) Value: 11
  misc_feature: MA Experiment 20000480 PARAMETER Experiment Name: Zm_Drought_P Parameter: Organism Value: Zea mays
  misc_feature: MA Experiment 20000480 PARAMETER Experiment Name: Zm_Drought_P Parameter: Plant Line Value: 35A19
  misc_feature: MA Experiment 20000480 PARAMETER Experiment Name: Zm_Drought_P Parameter: Timepoint (hr) Value: 72
  misc_feature: MA Experiment 20000480 PARAMETER Experiment Name: Zm_Drought_P Parameter: Tissue Value: Aerial
  misc_feature: MA Experiment 20000480 PARAMETER Experiment Name: Zm_Drought_P Parameter: Treatment Value: Drought vs. No Drought
  misc_feature: MA Experiment ID: 20000488 Result: Down-regulated in Transcription
  misc_feature: MA Experiment 20000488 PARAMETER Experiment Name: Zm_50mM_NH4NO3_L_to_H_P Parameter: Organism Value: Zea mays
  misc_feature: MA Experiment 20000488 PARAMETER Experiment Name: Zm_50mM_NH4NO3_L_to_H_P Parameter: Timepoint (hr) Value: 8
  misc_feature: MA Experiment 20000488 PARAMETER Experiment Name: Zm_50mM_NH4NO3_L_to_H_P Parameter: Tissue Value: Leaves
  misc_feature: MA Experiment 20000488 PARAMETER Experiment Name: Zm_50mM_NH4NO3_L_to_H_P Parameter: Treatment Value: 50mM NH4NO3 vs. 100mM Mannitol
gggcgtccatgtcctgctgctgccgccgcgggacctgagaggagaaggacgaggacgaggtggtggttggcggcgtcgcgccgacggcggacatgggttggaggcggggaggaggcgcggatggcgtggccaggagatgggtgctgctgctatgcgtcgggagcttctgcctcggcctgctcttcaccgacaggatgtggagcttgccagaagcagatgaggtagcagtactcccaaatttaagaagagaggaagaggctgagcgcaagactggagactgtaatgtaggcaaagttcaaggaaaacacgattacaatgacatgttacgtgtctcagatgctcaccataattcacagactttggataaggcaatagcgaacttggagacagagctctctgcggcaagaactctacaagattctttcctcaatggatctccagtgcaagaagattacaaggcttcagagtctaccggtaggcgcaagtaccttatggtaataggtatcaacactgcttttagcagtcgcaagagaagggattctatccgcaacacctggatgcctacaggggaaataaggaaaaagctggaggaagaaagagggatcatagtttttgtaattggtcacagtgctatttcaggtggaattgtcgatagagcaattcaggcagaggataagaaacatggagacttcatgaggctggatcatgttgaaggataccttgagctgtcagggaaaaccaggacatactttgcaacagctgttgctttatgggatgctaacttctatgtgaaggttgacgacgatgtacatgttaatatagcaacacttggaaatatcttatccaaacatatttcaaagcccagggtatacattggatgcatgaagtctggccctgtcctctctgacaaggatgtgaggtactatgaaccagagcactggaaatttggggaagtgggtaataaatattttcggcatgccaccggtcaactgtacgctatttcaaaagatttggcagcctacatatcgctaaacaagcatgttttgcacaaatatatcaacgaggacgtgtctttgggagcttggttgatagggttagatgttgagcatattgatgaccgcagactatgctgcggcactccaccagattgcgaatggaaagctcaggctggtaacacctgcgctgcctcgttcgattggaaatgcagcggtatctgcaactctgtgcagaacatctggggggttcataagaagtgttcagaagatgaaaaggcgctgctgactgtttctttctaatcaaagtgcagtgctgtgtatctgtacattgtgcaaagaatgtgtccggttcataggtggctaaatggcttacaattagacaacaccactggagcaggccgcaattttactcagcgtccgctggtggcactctgaggatttaaggggtgtagagctgaccgattcttttagcaagttggccagttgggtggtcatacatgtattgacctgataaaacaaacactatccgacgagttcagccagggctgtctgagctaagacaggatgaataacggctggttgagctcatgcaagacatttatttggttgattgtacaaattaatgcagaccggtgtagatgct

SEQ ID NO: 16746 - protein, 400 aa, Zea mays subsp. mays
  peptide (1)..(400): Ceres Seq. ID no. 12369306
  misc_feature (146)..(343): Pfam Name: Galactosyltransferase Pfam Description: Galactosyltransferase
  misc_feature (12)..(395): Homolog of NCBI NO: 12323294 NR Description: putative (Avr9) elicitor response protein;
  misc_feature (12)..(395): Homolog of NCBI NO: 30699558 NR Description: Avr9 elicitor response protein -related
  misc_feature (1)..(400): Homolog of NCBI NO: 15223337 NR Description: Avr9 elicitor response protein, putative; protein
  misc_feature (12)..(400): Homolog of NCBI NO: 4138265 NR Description: Avr9 elicitor response protein [Nicotiana tabacum]
  misc_feature (12)..(110): Homolog of NCBI NO: 15221085 NR Description: Avr9 elicitor response-like protein; protein id:
  misc_feature (76)..(397): Homolog of NCBI NO: 15221085 NR Description: Avr9 elicitor response-like protein; protein id:
  misc_feature (12)..(400): Homolog of NCBI NO: 7485336 NR Description: hypothetical protein F10M23.280 - Arabidopsis
  misc_feature (12)..(400): Homolog of NCBI NO: 18416895 NR Description: Avr9 elicitor response like protein
  misc_feature (12)..(400): Homolog of NCBI NO: 15225684 NR Description: unknown protein; protein id: At2g32430.1
  misc_feature (12)..(400): Homolog of NCBI NO: 15220440 NR Description: putative AVR9 elicitor response protein
MGWRRGGGADGVARRWVLLLCVGSFCLGLLFTDRMWSLPEADEVAVLPNLRREEEAERKTGDCNVGKVQGKHDYNDMLRVSDAHHNSQTLDKAIANLETELSAARTLQDSFLNGSPVQEDYKASESTGRRKYLMVIGINTAFSSRKRRDSIRNTWMPTGEIRKKLEEERGIIVFVIGHSAISGGIVDRAIQAEDKKHGDFMRLDHVEGYLELSGKTRTYFATAVALWDANFYVKVDDDVHVNIATLGNILSKHISKPRVYIGCMKSGPVLSDKDVRYYEPEHWKFGEVGNKYFRHATGQLYAISKDLAAYISLNKHVLHKYINEDVSLGAWLIGLDVEHIDDRRLCCGTPPDCEWKAQAGNTCAASFDWKCSGICNSVQNIWGVHKKCSEDEKALLTVSF

SEQ ID NO: 16747 - protein, 366 aa, Zea mays subsp. mays
  peptide (1)..(366): Ceres Seq. ID no. 12369307
  misc_feature (112)..(309): Pfam Name: Galactosyltransferase Pfam Description: Galactosyltransferase
  misc_feature (1)..(366): Homolog of NCBI NO: 15225684 NR Description: unknown protein; protein id: At2g32430.1
  misc_feature (1)..(361): Homolog of NCBI NO: 12323294 NR Description: putative (Avr9) elicitor response protein;
  misc_feature (1)..(366): Homolog of NCBI NO: 15223337 NR Description: Avr9 elicitor response protein, putative; protein
  misc_feature (1)..(76): Homolog of NCBI NO: 15221085 NR Description: Avr9 elicitor response-like protein; protein id:
  misc_feature (1)..(366): Homolog of NCBI NO: 7485336 NR Description: hypothetical protein F10M23.280 - Arabidopsis
  misc_feature (1)..(366): Homolog of NCBI NO: 18416895 NR Description: Avr9 elicitor response like protein
  misc_feature (42)..(363): Homolog of NCBI NO: 15221085 NR Description: Avr9 elicitor response-like protein; protein id:
  misc_feature (1)..(366): Homolog of NCBI NO: 4138265 NR Description: Avr9 elicitor response protein [Nicotiana tabacum]
  misc_feature (1)..(361): Homolog of NCBI NO: 30699558 NR Description: Avr9 elicitor response protein -related
  misc_feature (1)..(366): Homolog of NCBI NO: 15220440 NR Description: putative AVR9 elicitor response protein
MWSLPEADEVAVLPNLRREEEAERKTGDCNVGKVQGKHDYNDMLRVSDAHHNSQTLDKAIANLETELSAARTLQDSFLNGSPVQEDYKASESTGRRKYLMVIGINTAFSSRKRRDSIRNTWMPTGEIRKKLEEERGIIVFVIGHSAISGGIVDRAIQAEDKKHGDFMRLDHVEGYLELSGKTRTYFATAVALWDANFYVKVDDDVHVNIATLGNILSKHISKPRVYIGCMKSGPVLSDKDVRYYEPEHWKFGEVGNKYFRHATGQLYAISKDLAAYISLNKHVLHKYINEDVSLGAWLIGLDVEHIDDRRLCCGTPPDCEWKAQAGNTCAASFDWKCSGICNSVQNIWGVHKKCSEDEKALLTVSF

SEQ ID NO: 16748 - protein, 324 aa, Zea mays subsp. mays
  peptide (1)..(324): Ceres Seq. ID no. 12369308
  misc_feature (70)..(267): Pfam Name: Galactosyltransferase Pfam Description: Galactosyltransferase
  misc_feature (1)..(319): Homolog of NCBI NO: 12323294 NR Description: putative (Avr9) elicitor response protein;
  misc_feature (1)..(319): Homolog of NCBI NO: 30699558 NR Description: Avr9 elicitor response protein -related
  misc_feature (1)..(324): Homolog of NCBI NO: 15223337 NR Description: Avr9 elicitor response protein, putative; protein
  misc_feature (1)..(324): Homolog of NCBI NO: 4138265 NR Description: Avr9 elicitor response protein [Nicotiana tabacum]
  misc_feature (1)..(34): Homolog of NCBI NO: 15221085 NR Description: Avr9 elicitor response-like protein; protein id:
  misc_feature (1)..(321): Homolog of NCBI NO: 15221085 NR Description: Avr9 elicitor response-like protein; protein id:
  misc_feature (1)..(324): Homolog of NCBI NO: 7485336 NR Description: hypothetical protein F10M23.280 - Arabidopsis
  misc_feature (1)..(324): Homolog of NCBI NO: 18416895 NR Description: Avr9 elicitor response like protein
  misc_feature (1)..(324): Homolog of NCBI NO: 15225684 NR Description: unknown protein; protein id: At2g32430.1
  misc_feature (1)..(324): Homolog of NCBI NO: 15220440 NR Description: putative AVR9 elicitor response protein
MLRVSDAHHNSQTLDKAIANLETELSAARTLQDSFLNGSPVQEDYKASESTGRRKYLMVIGINTAFSSRKRRDSIRNTWMPTGEIRKKLEEERGIIVFVIGHSAISGGIVDRAIQAEDKKHGDFMRLDHVEGYLELSGKTRTYFATAVALWDANFYVKVDDDVHVNIATLGNILSKHISKPRVYIGCMKSGPVLSDKDVRYYEPEHWKFGEVGNKYFRHATGQLYAISKDLAAYISLNKHVLHKYINEDVSLGAWLIGLDVEHIDDRRLCCGTPPDCEWKAQAGNTCAASFDWKCSGICNSVQNIWGVHKKCSEDEKALLTVSF

SEQ ID NO: 16749 - DNA, 1480 bp, Zea mays subsp. mays
  misc_feature (1)..(1480): Ceres Seq. ID no. 12368002
  misc_feature: MA Experiment ID: 108526 Result: Up-regulated in Transcription
  misc_feature: MA Experiment 108526 PARAMETER Experiment Name: Zm_5mM_NO_P Parameter: Age (day) Value: 8
  misc_feature: MA Experiment 108526 PARAMETER Experiment Name: Zm_5mM_NO_P Parameter: Organism Value: Zea mays
  misc_feature: MA Experiment 108526 PARAMETER Experiment Name: Zm_5mM_NO_P Parameter: Plant Line Value: 35A19
  misc_feature: MA Experiment 108526 PARAMETER Experiment Name: Zm_5mM_NO_P Parameter: Timepoint (hr) Value: 1
  misc_feature: MA Experiment 108526 PARAMETER Experiment Name: Zm_5mM_NO_P Parameter: Tissue Value: Aerial
  misc_feature: MA Experiment 108526 PARAMETER Experiment Name: Zm_5mM_NO_P Parameter: Treatment Value: 5mM NO vs. No Treatment
  misc_feature: MA Experiment ID: 108527 Result: Up-regulated in Transcription
  misc_feature: MA Experiment 108527 PARAMETER Experiment Name: Zm_5mM_NO_P Parameter: Age (day) Value: 8
  misc_feature: MA Experiment 108527 PARAMETER Experiment Name: Zm_5mM_NO_P Parameter: Organism Value: Zea mays
  misc_feature: MA Experiment 108527 PARAMETER Experiment Name: Zm_5mM_NO_P Parameter: Plant Line Value: 35A19
  misc_feature: MA Experiment 108527 PARAMETER Experiment Name: Zm_5mM_NO_P Parameter: Timepoint (hr) Value: 6
  misc_feature: MA Experiment 108527 PARAMETER Experiment Name: Zm_5mM_NO_P Parameter: Tissue Value: Aerial
  misc_feature: MA Experiment 108527 PARAMETER Experiment Name: Zm_5mM_NO_P Parameter: Treatment Value: 5mM NO vs. No Treatment
  misc_feature: MA Experiment ID: 108536 Result: Up-regulated in Transcription
  misc_feature: MA Experiment 108536 PARAMETER Experiment Name: Zm_Meristem_P Parameter: Age (day) Value: 8
  misc_feature: MA Experiment 108536 PARAMETER Experiment Name: Zm_Meristem_P Parameter: Organism Value: Zea mays
  misc_feature: MA Experiment 108536 PARAMETER Experiment Name: Zm_Meristem_P Parameter: Plant Line Value: 35A19
  misc_feature: MA Experiment 108536 PARAMETER Experiment Name: Zm_Meristem_P Parameter: Tissue Value: Shoot Meristem vs. Above Shoot Meristem
  misc_feature: MA Experiment ID: 108545 Result: Down-regulated in Transcription
  misc_feature: MA Experiment 108545 PARAMETER Experiment Name: Zm_Imbibed_Seeds_P Parameter: Age (day) Value: 3 vs. 2
  misc_feature: MA Experiment 108545 PARAMETER Experiment Name: Zm_Imbibed_Seeds_P Parameter: Organism Value: Zea mays
  misc_feature: MA Experiment 108545 PARAMETER Experiment Name: Zm_Imbibed_Seeds_P Parameter: Plant Line Value: 35A19
  misc_feature: MA Experiment 108545 PARAMETER Experiment Name: Zm_Imbibed_Seeds_P Parameter: Tissue Value: Aerial vs. Embryo
  misc_feature: MA Experiment ID: 20000479 Result: Up-regulated in Transcription
  misc_feature: MA Experiment 20000479 PARAMETER Experiment Name: Zm_Drought_P Parameter: Age (day) Value: 10
  misc_feature: MA Experiment 20000479 PARAMETER Experiment Name: Zm_Drought_P Parameter: Organism Value: Zea mays
  misc_feature: MA Experiment 20000479 PARAMETER Experiment Name: Zm_Drought_P Parameter: Plant Line Value: 35A19
  misc_feature: MA Experiment 20000479 PARAMETER Experiment Name: Zm_Drought_P Parameter: Timepoint (hr) Value: 48
  misc_feature: MA Experiment 20000479 PARAMETER Experiment Name: Zm_Drought_P Parameter: Tissue Value: Aerial
  misc_feature: MA Experiment 20000479 PARAMETER Experiment Name: Zm_Drought_P Parameter: Treatment Value: Drought vs. No Drought
  misc_feature: MA Experiment ID: 20000535 Result: Down-regulated in Transcription
  misc_feature: MA Experiment 20000535 PARAMETER Experiment Name: Zm_Hybrid_Seed_Dev_P Parameter: DAP Value: 30 vs. 12
  misc_feature: MA Experiment 20000535 PARAMETER Experiment Name: Zm_Hybrid_Seed_Dev_P Parameter: Organism Value: Zea mays
  misc_feature: MA Experiment 20000535 PARAMETER Experiment Name: Zm_Hybrid_Seed_Dev_P Parameter: Plant Line Value: 35A19
  misc_feature: MA Experiment 20000535 PARAMETER Experiment Name: Zm_Hybrid_Seed_Dev_P Parameter: Tissue Value: Embryo vs. Unfert Floret
  misc_feature: MA Experiment ID: 20000626 Result: Up-regulated in Transcription
  misc_feature: MA Experiment 20000626 PARAMETER Experiment Name: Zm_Herbicide-Treatments_P Parameter: Timepoint (hr) Value: 12
  misc_feature: MA Experiment 20000626 PARAMETER Experiment Name: Zm_Herbicide-Treatments_P Parameter: Tissue Value: Aerial
  misc_feature: MA Experiment 20000626 PARAMETER Experiment Name: Zm_Herbicide-Treatments_P Parameter: Treatment Value: Roundup vs. No Treatment
  misc_feature: MA Experiment ID: 20000627 Result: Up-regulated in Transcription
  misc_feature: MA Experiment 20000627 PARAMETER Experiment Name: Zm_Herbicide-Treatments_P Parameter: Timepoint (hr) Value: 12
  misc_feature: MA Experiment 20000627 PARAMETER Experiment Name: Zm_Herbicide-Treatments_P Parameter: Tissue Value: Aerial
  misc_feature: MA Experiment 20000627 PARAMETER Experiment Name: Zm_Herbicide-Treatments_P Parameter: Treatment Value: Finale vs. No Treatment
  misc_feature: MA Experiment ID: 20000630 Result: Up-regulated in Transcription
  misc_feature: MA Experiment 20000630 PARAMETER Experiment Name: Zm_Herbicide-Treatments_P Parameter: Timepoint (hr) Value: 4
  misc_feature: MA Experiment 20000630 PARAMETER Experiment Name: Zm_Herbicide-Treatments_P Parameter: Tissue Value: Aerial
  misc_feature: MA Experiment 20000630 PARAMETER Experiment Name: Zm_Herbicide-Treatments_P Parameter: Treatment Value: Roundup vs. No Treatment
  misc_feature: MA Experiment ID: 20001608 Result: Down-regulated in Transcription
  misc_feature: MA Experiment 20001608 PARAMETER Experiment Name: Zm_50ppm_KNO3_L-to-H_P Parameter: Age (day) Value: 21
  misc_feature: MA Experiment 20001608 PARAMETER Experiment Name: Zm_50ppm_KNO3_L-to-H_P Parameter: Organism Value: Zea mays
  misc_feature: MA Experiment 20001608 PARAMETER Experiment Name: Zm_50ppm_KNO3_L-to-H_P Parameter: Plant Line Value: 35A19
  misc_feature: MA Experiment 20001608 PARAMETER Experiment Name: Zm_50ppm_KNO3_L-to-H_P Parameter: Timepoint (hr) Value: 48
  misc_feature: MA Experiment 20001608 PARAMETER Experiment Name: Zm_50ppm_KNO3_L-to-H_P Parameter: Tissue Value: Shoots
  misc_feature: MA Experiment 20001608 PARAMETER Experiment Name: Zm_50ppm_KNO3_L-to-H_P Parameter: Treatment Value: 50ppm KNO3 vs. 50ppm KCl
tgggccttgcagtttttggttgtgtatcggggaaatggcaatcgacgacgaatcgccgatcagagtcaacagcagaggcggcggcggcatggtaacctggatagcacaccttcttttgtactctcttcttgccttgttttttttcccctttcgatgccctgtttctttgctctctgttgggctttctttgctctctgttgggctggcgctaacatggcggcgccgcgccggatcgaatgcggcagggaggaggggagcgcgacggggcggagaaccagcggtggccgccgtggctcaagccgctgctggggacgagcttcttcggccaatgcaagctgcacgcggacgcgcacaagagcgagtgcaacatgtactgcctcgcctgcatgaacggcgcgctctgctcccagtgcctcgcctaccaccgcgaccaccacgccatccagatacggaggtcctcctaccacgacgtgatccgggtgtcggagatccagaaggtgctggacatctccggcgtgcagacgtacatcatcaacagcgcgcgcgtggtgttcctgaacgagcgcccgcagccgaggcccggcaagggcgtcaccaacacctgcgaggtctgccagcgcagcctcctcgacaccttccgcttctgctccctcgggtgcaagatcgtggggacctccggtgacttgcgcgtccggaagaagcaggccgtcgtcaagaagaacaagaagaagaagcaggcgcagcagcagcagcagcacaggggcgccgcgttggactcggaggacgactcttcgtccaccagcaccagccgcggcagcgacaggagcagcgtggtgcagagcttcaccccgtcgaccccgccggcgacgcccaacagcttccgaaccgggaagcggcgcaagggcgtgccgcaccggtcgccgttcggcagcctcgtgctggagttctagaaagcagcggttctataccatctataggtgttgccggatcggcctcggccggtctacatagttcatagccacccaagaaaaaaaaaacggagctagtagtagcaactatagcaagcaataaccaaggccccactgcacgcccgcgcttctggacgacgaggccggtgcaatgtggcacgtacgtcgtacggtacggttacctctacttccattccatagtactgtactactactgtagtttacatgcagtcgcagagctgtgctggtagtgacaacggtttgggttttggtgcctgtaaaaggaaacgaggtagttgtagcagttacccttgtcgtcaccactcatcagcagccagccactactgaattacatagtatataggtgtttcctagttttaccagcgcttgatatagatgtggatgtacatatatacatatactgtcacagatggggaacggtaggagtgttgttgttggtactggtgtttgcgtttgttgcctgtaataataaagaggataagaatgctgcg

SEQ ID NO: 16750 - protein, 237 aa, Zea mays subsp. mays
  peptide (1)..(237): Ceres Seq. ID no. 12368003
  misc_feature (16)..(147): Pfam Name: Protein of unknown function, DUF597 Pfam Description: Protein of unknown function, DUF597
  misc_feature (17)..(230): Homolog of NCBI NO: 18411153 NR Description: expressed protein
  misc_feature (1)..(237): Homolog of NCBI NO: 37537092 NR Description: unknown protein [Oryza sativa (japonica
  misc_feature (1)..(231): Homolog of NCBI NO: 15236696 NR Description: putative protein; protein id: At4g17900.1
  misc_feature (180)..(237): Homolog of NCBI NO: 21554139 NR Description: unknown [Arabidopsis thaliana]
  misc_feature (10)..(147): Homolog of NCBI NO: 21554139 NR Description: unknown [Arabidopsis thaliana]
  misc_feature (180)..(237): Homolog of NCBI NO: 6714272 NR Description: F6N18.8 [Arabidopsis thaliana]
  misc_feature (13)..(147): Homolog of NCBI NO: 6714272 NR Description: F6N18.8 [Arabidopsis thaliana]
  misc_feature (180)..(237): Homolog of NCBI NO: 18398555 NR Description: expressed protein
  misc_feature (10)..(147): Homolog of NCBI NO: 18398555 NR Description: expressed protein
  misc_feature (1)..(237): Homolog of NCBI NO: 38346725 NR Description: OSJNBa0086O06.23 [Oryza sativa (japonica
MRQGGGERDGAENQRWPPWLKPLLGTSFFGQCKLHADAHKSECNMYCLACMNGALCSQCLAYHRDHHAIQIRRSSYHDVIRVSEIQKVLDISGVQTYIINSARVVFLNERPQPRPGKGVTNTCEVCQRSLLDTFRFCSLGCKIVGTSGDLRVRKKQAVVKKNKKKKQAQQQQQHRGAALDSEDDSSSTSTSRGSDRSSVVQSFTPSTPPATPNSFRTGKRRKGVPHRSPFGSLVLEF

SEQ ID NO: 16751 - protein, 226 aa, Zea mays subsp. mays
  peptide (1)..(226): Ceres Seq. ID no. 12368004
GPCSFWLCIGEMAIDDESPIRVNSRGGGGMVTWIAHLLLYSLLALFFFPFRCPVSLLSVGLSLLSVGLALTWRRRAGSNAAGRRGARRGGEPAVAAVAQAAAGDELLRPMQAARGRAQERVQHVLPRLHERRALLPVPRLPPRPPRHPDTEVLLPRRDPGVGDPEGAGHLRRADVHHQQRARGVPERAPAAEARQGRHQHLRGLPAQPPRHLPLLLPRVQDRGDLR

SEQ ID NO: 16752 - protein, 215 aa, Zea mays subsp. mays
  peptide (1)..(215): Ceres Seq. ID no. 12368005
MAIDDESPIRVNSRGGGGMVTWIAHLLLYSLLALFFFPFRCPVSLLSVGLSLLSVGLALTWRRRAGSNAAGRRGARRGGEPAVAAVAQAAAGDELLRPMQAARGRAQERVQHVLPRLHERRALLPVPRLPPRPPRHPDTEVLLPRRDPGVGDPEGAGHLRRADVHHQQRARGVPERAPAAEARQGRHQHLRGLPAQPPRHLPLLLPRVQDRGDLR

SEQ ID NO: 16753 - DNA, 1363 bp, Zea mays subsp. mays
  misc_feature (1)..(1363): Ceres Seq. ID no. 12374769
  misc_feature: MA Experiment ID: 108522 Result: Down-regulated in Transcription
  misc_feature: MA Experiment 108522 PARAMETER Experiment Name: Zm_42deg_Heat_P Parameter: Age (day) Value: 8
  misc_feature: MA Experiment 108522 PARAMETER Experiment Name: Zm_42deg_Heat_P Parameter: Organism Value: Zea mays
  misc_feature: MA Experiment 108522 PARAMETER Experiment Name: Zm_42deg_Heat_P Parameter: Plant Line Value: 35A19
  misc_feature: MA Experiment 108522 PARAMETER Experiment Name: Zm_42deg_Heat_P Parameter: Temperature (deg C) Value: 42 vs. 22
  misc_feature: MA Experiment 108522 PARAMETER Experiment Name: Zm_42deg_Heat_P Parameter: Timepoint (hr) Value: 1
  misc_feature: MA Experiment 108522 PARAMETER Experiment Name: Zm_42deg_Heat_P Parameter: Tissue Value: Aerial
  misc_feature: MA Experiment ID: 108527 Result: Down-regulated in Transcription
  misc_feature: MA Experiment 108527 PARAMETER Experiment Name: Zm_5mM_NO_P Parameter: Age (day) Value: 8
  misc_feature: MA Experiment 108527 PARAMETER Experiment Name: Zm_5mM_NO_P Parameter: Organism Value: Zea mays
  misc_feature: MA Experiment 108527 PARAMETER Experiment Name: Zm_5mM_NO_P Parameter: Plant Line Value: 35A19
  misc_feature: MA Experiment 108527 PARAMETER Experiment Name: Zm_5mM_NO_P Parameter: Timepoint (hr) Value: 6
  misc_feature: MA Experiment 108527 PARAMETER Experiment Name: Zm_5mM_NO_P Parameter: Tissue Value: Aerial
  misc_feature: MA Experiment 108527 PARAMETER Experiment Name: Zm_5mM_NO_P Parameter: Treatment Value: 5mM NO vs. No Treatment
  misc_feature: MA Experiment ID: 108530 Result: Up-regulated in Transcription
  misc_feature: MA Experiment 108530 PARAMETER Experiment Name: Zm_Imbibed_Seeds_P Parameter: Age (day) Value: 6 vs. 2
  misc_feature: MA Experiment 108530 PARAMETER Experiment Name: Zm_Imbibed_Seeds_P Parameter: Organism Value: Zea mays
  misc_feature: MA Experiment 108530 PARAMETER Experiment Name: Zm_Imbibed_Seeds_P Parameter: Plant Line Value: 35A19
  misc_feature: MA Experiment 108530 PARAMETER Experiment Name: Zm_Imbibed_Seeds_P Parameter: Tissue Value: Aerial vs. Embryo
  misc_feature: MA Experiment ID: 108534 Result: Up-regulated in Transcription
  misc_feature: MA Experiment 108534 PARAMETER Experiment Name: Zm_4deg_Cold_P Parameter: Age (hr) Value: 8
  misc_feature: MA Experiment 108534 PARAMETER Experiment Name: Zm_4deg_Cold_P Parameter: Organism Value: Zea mays
  misc_feature: MA Experiment 108534 PARAMETER Experiment Name: Zm_4deg_Cold_P Parameter: Plant Line Value: 35A19
  misc_feature: MA Experiment 108534 PARAMETER Experiment Name: Zm_4deg_Cold_P Parameter: Temperature (deg C) Value: 4 vs. 22
  misc_feature: MA Experiment 108534 PARAMETER Experiment Name: Zm_4deg_Cold_P Parameter: Timepoint (hr) Value: 6
  misc_feature: MA Experiment 108534 PARAMETER Experiment Name: Zm_4deg_Cold_P Parameter: Tissue Value: Aerial
  misc_feature: MA Experiment ID: 20000487 Result: Down-regulated in Transcription
  misc_feature: MA Experiment 20000487 PARAMETER Experiment Name: Zm_50mM_NH4NO3_L_to_H_P Parameter: Organism Value: Zea mays
  misc_feature: MA Experiment 20000487 PARAMETER Experiment Name: Zm_50mM_NH4NO3_L_to_H_P Parameter: Timepoint (hr) Value: 4
  misc_feature: MA Experiment 20000487 PARAMETER Experiment Name: Zm_50mM_NH4NO3_L_to_H_P Parameter: Tissue Value: Leaves
  misc_feature: MA Experiment 20000487 PARAMETER Experiment Name: Zm_50mM_NH4NO3_L_to_H_P Parameter: Treatment Value: 50mM NH4NO3 vs. 100mM Mannitol
  misc_feature: MA Experiment ID: 20000535 Result: Down-regulated in Transcription
  misc_feature: MA Experiment 20000535 PARAMETER Experiment Name: Zm_Hybrid_Seed_Dev_P Parameter: DAP Value: 30 vs. 12
  misc_feature: MA Experiment 20000535 PARAMETER Experiment Name: Zm_Hybrid_Seed_Dev_P Parameter: Organism Value: Zea mays
  misc_feature: MA Experiment 20000535 PARAMETER Experiment Name: Zm_Hybrid_Seed_Dev_P Parameter: Plant Line Value: 35A19
  misc_feature: MA Experiment 20000535 PARAMETER Experiment Name: Zm_Hybrid_Seed_Dev_P Parameter: Tissue Value: Embryo vs. Unfert Floret
atccattcatcacccatcgtgtgcttcagctactatgatataatagtgcagctaattaattaagcgcggacgacgacgtacgtaacagtatggctgctgctgctgctactgtcgtcacaccatcctcgcctcgctccatggctgttgccgccgccattgccttcttcttcgcggtgaccgcggcggcagcgtcgccggtgcccgcgatctacgtgctcggggactccctggcggacgtcgggaacaacaaccacctggtgacgctgctcaaggccgacttcccgcacaacggcatcgactacccgggccagaaggccaccggccgcttcagcaacggcaagaactccgtcgacttcctcgccgaaaacctggggctggcgacctcgccgccgtacctcgccttgtcgagcagcaaccccaactacgccaacggtgtcaacttcgcttccggtggcgccggagtctccaacctcacaaacaaggaccaatgtatcagcttcgacaagcagatcgactacttcgcgacggtgtacgcgtcgctggtgcagagcctggggcaggcgcaggccacggctcacctggccaagtccctcttcgccatcaccatcggcagcaacgacatcatccactacgccaaatccaactccgccgccaataccaagcaggccagtgccagtggcgccgccgccgacccatcgcagcagttcgtggacgcgctgatccacacgctcaccgggcagctgcagcgcctctacgccctgggcgcgcgcaaggtgctgttcctgggcacggggcccgtgggtgctgcccgtcgctgcgggagctcagccccgccaaggactgcagcgccgaggccaacggcatctccgtgcgctacaacgccggcgcggcgtccctcctcggcaccatggccgcgcgctacgcggacatgcactacgcgctcttcgactcctccgccgcgctgctccagtacatcgaccacccggcggcgcacgggttcaccgaggccaaggccgcctgctgcgggctcggggacatgaacgccaagatcgggtgcaccccgctaagcttctactgcgacaacaggaccagccacgtcttctgggacttctaccatcccacggagaccaccgcccggatgctcaccagcacggcgttcgacggctcggcgccgctcatcttccccatgaacataaggcagctcagcgccatatagctaggccaccagaattagagtgctgtccttctaccttgtatatgttgttgtgtatcacatagtggccttggacgtatgtacgtcgtcctagaagaaatcaaacgatatagcaaacatcatagaagcttgcattatattggcaatgct

SEQ ID NO: 16754 - protein, 316 aa, Zea mays subsp. mays
  peptide (1)..(316): Ceres Seq. ID no. 12374770
  misc_feature (40)..(238): Pfam Name: GDSL-like Lipase/Acylhydrolase Pfam Description: GDSL-like Lipase/Acylhydrolase
  misc_feature (19)..(238): Homolog of NCBI NO: 34899288 NR Description: similar to GDSL-motif lipase/hydrolase
  misc_feature (37)..(249): Homolog of NCBI NO: 15224005 NR Description: putative GDSL-motif lipase/acylhydrolase; protein
  misc_feature (19)..(240): Homolog of NCBI NO: 28071322 NR Description: P0705A05.30 [Oryza sativa (japonica
  misc_feature (23)..(240): Homolog of NCBI NO: 15229265 NR Description: putative GDSL-motif lipase/acylhydrolase
  misc_feature (17)..(240): Homolog of NCBI NO: 22758315 NR Description: putative early nodulin gene (Enod) related
  misc_feature (17)..(238): Homolog of NCBI NO: 30693137 NR Description: lipase family [Arabidopsis thaliana]
  misc_feature (21)..(240): Homolog of NCBI NO: 37535146 NR Description: putative early nodulin gene (Enod) related
  misc_feature (17)..(238): Homolog of NCBI NO: 21537293 NR Description: GDSL-motif lipase/hydrolase-like protein
  misc_feature (28)..(238): Homolog of NCBI NO: 15240452 NR Description: GDSL-motif lipase/hydrolase-like protein
  misc_feature (18)..(238): Homolog of NCBI NO: 29837765 NR Description: putative GDSL-like lipase/acylhydrolase
MAAAAATVVTPSSPRSMAVAAAIAFFFAVTAAAASPVPAIYVLGDSLADVGNNNHLVTLLKADFPHNGIDYPGQKATGRFSNGKNSVDFLAENLGLATSPPYLALSSSNPNYANGVNFASGGAGVSNLTNKDQCISFDKQIDYFATVYASLVQSLGQAQATAHLAKSLFAITIGSNDIIHYAKSNSAANTKQASASGAAADPSQQFVDALIHTLTGQLQRLYALGARKVLFLGTGPVGAARRCGSSAPPRTAAPRPTASPCATTPARRPSSAPWPRATRTCTTRSSTPPPRCSSTSTTRRRTGSPRPRPPAAGSGT

SEQ ID NO: 16755 - protein, 300 aa, Zea mays subsp. mays
  peptide (1)..(300): Ceres Seq. ID no. 12374771
  misc_feature (24)..(222): Pfam Name: GDSL-like Lipase/Acylhydrolase Pfam Description: GDSL-like Lipase/Acylhydrolase
  misc_feature (3)..(222): Homolog of NCBI NO: 34899288 NR Description: similar to GDSL-motif lipase/hydrolase
  misc_feature (21)..(233): Homolog of NCBI NO: 15224005 NR Description: putative GDSL-motif lipase/acylhydrolase; protein
  misc_feature (3)..(224): Homolog of NCBI NO: 28071322 NR Description: P0705A05.30 [Oryza sativa (japonica
  misc_feature (7)..(224): Homolog of NCBI NO: 15229265 NR Description: putative GDSL-motif lipase/acylhydrolase
  misc_feature (1)..(224): Homolog of NCBI NO: 22758315 NR Description: putative early nodulin gene (Enod) related
  misc_feature (1)..(222): Homolog of NCBI NO: 30693137 NR Description: lipase family [Arabidopsis thaliana]
  misc_feature (5)..(224): Homolog of NCBI NO: 37535146 NR Description: putative early nodulin gene (Enod) related
  misc_feature (1)..(222): Homolog of NCBI NO: 21537293 NR Description: GDSL-motif lipase/hydrolase-like protein
  misc_feature (12)..(222): Homolog of NCBI NO: 15240452 NR Description: GDSL-motif lipase/hydrolase-like protein
  misc_feature (2)..(222): Homolog of NCBI NO: 29837765 NR Description: putative GDSL-like lipase/acylhydrolase
MAVAAAIAFFFAVTAAAASPVPAIYVLGDSLADVGNNNHLVTLLKADFPHNGIDYPGQKATGRFSNGKNSVDFLAENLGLATSPPYLALSSSNPNYANGVNFASGGAGVSNLTNKDQCISFDKQIDYFATVYASLVQSLGQAQATAHLAKSLFAITIGSNDIIHYAKSNSAANTKQASASGAAADPSQQFVDALIHTLTGQLQRLYALGARKVLFLGTGPVGAARRCGSSAPPRTAAPRPTASPCATTPARRPSSAPWPRATRTCTTRSSTPPPRCSSTSTTRRRTGSPRPRPPAAGSGT

SEQ ID NO: 16756 - protein, 242 aa, Zea mays subsp. mays
  peptide (1)..(242): Ceres Seq. ID no. 12374772
  misc_feature (105)..(219): Pfam Name: GDSL-like Lipase/Acylhydrolase Pfam Description: GDSL-like Lipase/Acylhydrolase
  misc_feature (102)..(242): Homolog of NCBI NO: 34899288 NR Description: similar to GDSL-motif lipase/hydrolase
  misc_feature (98)..(242): Homolog of NCBI NO: 15224005 NR Description: putative GDSL-motif lipase/acylhydrolase; protein
  misc_feature (92)..(242): Homolog of NCBI NO: 28071322 NR Description: P0705A05.30 [Oryza sativa (japonica
  misc_feature (92)..(236): Homolog of NCBI NO: 15229265 NR Description: putative GDSL-motif lipase/acylhydrolase
  misc_feature (92)..(236): Homolog of NCBI NO: 22758315 NR Description: putative early nodulin gene (Enod) related
  misc_feature (100)..(224): Homolog of NCBI NO: 30693137 NR Description: lipase family [Arabidopsis thaliana]
  misc_feature (92)..(236): Homolog of NCBI NO: 37535146 NR Description: putative early nodulin gene (Enod) related
  misc_feature (100)..(224): Homolog of NCBI NO: 21537293 NR Description: GDSL-motif lipase/hydrolase-like protein
  misc_feature (105)..(239): Homolog of NCBI NO: 15240452 NR Description: GDSL-motif lipase/hydrolase-like protein
  misc_feature (100)..(242): Homolog of NCBI NO: 29837765 NR Description: putative GDSL-like lipase/acylhydrolase
MYQLRQADRLLRDGVRVAGAEPGAGAGHGSPGQVPLRHHHRQQRHHPLRQIQLRRQYQAGQCQWRRRRPIAAVRGRADPHAHRAAAAPLRPGRAQGAVPGHGARGCCPSLRELSPAKDCSAEANGISVRYNAGAASLLGTMAARYADMHYALFDSSAALLQYIDHPAAHGFTEAKAACCGLGDMNAKIGCTPLSFYCDNRTSHVFWDFYHPTETTARMLTSTAFDGSAPLIFPMNIRQLSAI

SEQ ID NO: 16757 - DNA, 1865 bp, Zea mays subsp. mays
  misc_feature (1)..(1865): Ceres Seq. ID no. 12415026
  misc_feature: MA Experiment ID: 108535 Result: Up-regulated in Transcription
  misc_feature: MA Experiment 108535 PARAMETER Experiment Name: Zm_Meristem_P Parameter: Age (day) Value: 8
  misc_feature: MA Experiment 108535 PARAMETER Experiment Name: Zm_Meristem_P Parameter: Organism Value: Zea mays
  misc_feature: MA Experiment 108535 PARAMETER Experiment Name: Zm_Meristem_P Parameter: Plant Line Value: 35A19
  misc_feature: MA Experiment 108535 PARAMETER Experiment Name: Zm_Meristem_P Parameter: Tissue Value: Root Meristem vs. Above Root Meristem
acgaaagctactagcaacatctggttccactctcgccggcatctcccccacccatccccaagtccagcacacacccgaagcgccgccgctagggtttggtccgacagccgcgaaacctagactttactgctccgacaggctgccattcactaatctagctagctccggttgggagctagggtttagctgagcttcgggtcgcggcggtgcggcatggcggggtacggggaagagaaccagaacaccatgagcgggtacgaggaagaggaggaagaagaggttgaagaagtcgaggaggtgtacgaggaggaggaggaggaggaggaggaggaggaggaggaggacggggagggggaagcggacgagggggctgtagcctccgagccagcggcgatggcggccgagacgagaagcgttgttggaggccggggcttagcgaaggccgttgggaatgttgataccggtggcgaggatgggagggatgcagattccagtggcggtgacgcctcggggaagattttcgtagggggtgtagcttgggagacaactgaagaaacattcacaaagcattttcagaagtatggagctataactgattctgtgatcatgaatgacaagcatactaggatgcctcgcggatttggatttgttacattttccgatccatctgtgcttgacagggttctagaggatgaacatgtcatagatggaagaacagttgaagtcaaaaggactgttccaaaagaggaaatgtcatcgaaagacggtcctaagacaaaaaagatctttgtgggtggtattccaccatctcttaccgaagataaattaaaggagcacttctcatcgtatgggaaggtggttgagcatcagattatgcttgaccatagcactggacgctcacgtggctttggatttgtcacatttgaaagcgaggatgctgttgaaagggttatgtcagaggggagaatcatgatcttggagggaaacaggttgaaattaagaaagctgaaccaaaaaaacctggtgtgggtgattcaagctcaaatggaagacacagtcgtggtggtggtcatcgtgattcataccgtggtagtggtggcaatggcttttctgggaacagcagtggtggtggctatggatacagtggtggctaccgatcaactgctgcagcacattatggcagcacagcatatggtgcctatggcagagggtatggatacggtggtactgctggctatggcttaggtatggctctgcatatggtggctccatgtatggaggtccatatggtgcctacgcggcatatggtggtgcctatggaggtgtgcatatggtgctccaggagggtatggcgcgggaggatatggcagctacggtggggctggaggcatgggtggtggtggcagcgctggtggtcggggctccagcagataccacccttatggaaaatgataatccattcactgcctttgccttcctctaggatctgataataaagctatacattcccaccgagaaaatggaacattccattcaccttgttgaatcagcggcatctgaacatttttttcctggaacaaagattctagtctgtagtcgctgaaccctgaactgcctcatcccacccccaccccctgagctttctgtagaaggtgcagctcaaattctcgtaggcatgagccttagaagacccttgaaactacaagctttgtggtaacaatatggtgtcatggaacatatgtattttgatgtaaaacattcgctcactgaccagtgacttcgccatctctgcttatgtatgtagagaagcttagcaaaggattggactgatactattgaattgtgtgggtttctatttgtctcct

SEQ ID NO: 16758 - protein, 343 aa, Zea mays subsp. mays
  peptide (1)..(343): Ceres Seq. ID no. 12415027
  misc_feature (102)..(171): Pfam Name: RNA recognition motif. (a.k.a. RRM, RBD, or RNP domain) Pfam Description: RNA recognition motif. (a.k.a. RRM, RBD, or RNP
  misc_feature (84)..(264): Homolog of NCBI NO: 30682550 NR Description: RNA recognition motif (RRM)-containing protein
  misc_feature (100)..(269): Homolog of NCBI NO: 15226106 NR Description: heterogeneous nuclear ribonucleoprotein(hnRNP),
  misc_feature (185)..(264): Homolog of NCBI NO: 37535274 NR Description: putative RNA-binding protein
  misc_feature (100)..(182): Homolog of NCBI NO: 37535274 NR Description: putative RNA-binding protein
  misc_feature (101)..(264): Homolog of NCBI NO: 33416839 NR Description: Unknown (protein for MGC:66127) [Danio rerio]
  misc_feature (84)..(268): Homolog of NCBI NO: 30682553 NR Description: RNA recognition motif (RRM)-containing protein
  misc_feature (101)..(268): Homolog of NCBI NO: 8778468 NR Description: F1L3.34 [Arabidopsis thaliana]
  misc_feature (81)..(268): Homolog of NCBI NO: 15220810 NR Description: RRM-containing RNA-binding protein, putative
  misc_feature (96)..(268): Homolog of NCBI NO: 35215091 NR Description: putative heterogeneous nuclear ribonucleoprotein
  misc_feature (82)..(268): Homolog of NCBI NO: 15242719 NR Description: RRM-containing RNA-binding protein, putative
MAGYGEENQNTMSGYEEEEEEEVEEVEEVYEEEEEEEEEEEEEDGEGEADEGAVASEPAAMAAETRSVVGGRGLAKAVGNVDTGGEDGRDADSSGGDASGKIFVGGVAWETTEETFTKHFQKYGAITDSVIMNDKHTRMPRGFGFVTFSDPSVLDRVLEDEHVIDGRTVEVKRTVPKEEMSSKDGPKTKKIFVGGIPPSLTEDKLKEHFSSYGKVVEHQIMLDHSTGRSRGFGFVTFESEDAVERVMSEGRIMILEGNRLKLRKLNQKNLVWVIQAQMEDTVVVVVIVIHTVVVVAMAFLGTAVVVAMDTVVATDQLLQHIMAAQHMVPMAEGMDTVVLLAMA

SEQ ID NO: 16759 - protein, 332 aa, Zea mays subsp. mays
  peptide (1)..(332): Ceres Seq. ID no. 12415028
  misc_feature (91)..(160): Pfam Name: RNA recognition motif. (a.k.a. RRM, RBD, or RNP domain) Pfam Description: RNA recognition motif. (a.k.a. RRM, RBD, or RNP
  misc_feature (73)..(253): Homolog of NCBI NO: 30682550 NR Description: RNA recognition motif (RRM)-containing protein
  misc_feature (89)..(258): Homolog of NCBI NO: 15226106 NR Description: heterogeneous nuclear ribonucleoprotein(hnRNP),
  misc_feature (174)..(253): Homolog of NCBI NO: 37535274 NR Description: putative RNA-binding protein
  misc_feature (89)..(171): Homolog of NCBI NO: 37535274 NR Description: putative RNA-binding protein
  misc_feature (90)..(253): Homolog of NCBI NO: 33416839 NR Description: Unknown (protein for MGC:66127) [Danio rerio]
  misc_feature (73)..(257): Homolog of NCBI NO: 30682553 NR Description: RNA recognition motif (RRM)-containing protein
  misc_feature (90)..(257): Homolog of NCBI NO: 8778468 NR Description: F1L3.34 [Arabidopsis thaliana]
  misc_feature (70)..(257): Homolog of NCBI NO: 15220810 NR Description: RRM-containing RNA-binding protein, putative
  misc_feature (85)..(257): Homolog of NCBI NO: 35215091 NR Description: putative heterogeneous nuclear ribonucleoprotein
  misc_feature (71)..(257): Homolog of NCBI NO: 15242719 NR Description: RRM-containing RNA-binding protein, putative
MSGYEEEEEEEVEEVEEVYEEEEEEEEEEEEEDGEGEADEGAVASEPAAMAAETRSVVGGRGLAKAVGNVDTGGEDGRDADSSGGDASGKIFVGGVAWETTEETFTKHFQKYGAITDSVIMNDKHTRMPRGFGFVTFSDPSVLDRVLEDEHVIDGRTVEVKRTVPKEEMSSKDGPKTKKIFVGGIPPSLTEDKLKEHFSSYGKVVEHQIMLDHSTGRSRGFGFVTFESEDAVERVMSEGRIMILEGNRLKLRKLNQKNLVWVIQAQMEDTVVVVVIVIHTVVVVAMAFLGTAVVVAMDTVVATDQLLQHIMAAQHMVPMAEGMDTVVLLAMA

SEQ ID NO: 16760 - protein, 283 aa, Zea mays subsp. mays
  peptide (1)..(283): Ceres Seq. ID no. 12415029
  misc_feature (42)..(111): Pfam Name: RNA recognition motif. (a.k.a. RRM, RBD, or RNP domain) Pfam Description: RNA recognition motif. (a.k.a. RRM, RBD, or RNP
  misc_feature (24)..(204): Homolog of NCBI NO: 30682550 NR Description: RNA recognition motif (RRM)-containing protein
  misc_feature (40)..(209): Homolog of NCBI NO: 15226106 NR Description: heterogeneous nuclear ribonucleoprotein(hnRNP),
  misc_feature (125)..(204): Homolog of NCBI NO: 37535274 NR Description: putative RNA-binding protein
  misc_feature (40)..(122): Homolog of NCBI NO: 37535274 NR Description: putative RNA-binding protein
  misc_feature (41)..(204): Homolog of NCBI NO: 33416839 NR Description: Unknown (protein for MGC:66127) [Danio rerio]
  misc_feature (24)..(208): Homolog of NCBI NO: 30682553 NR Description: RNA recognition motif (RRM)-containing protein
  misc_feature (41)..(208): Homolog of NCBI NO: 8778468 NR Description: F1L3.34 [Arabidopsis thaliana]
  misc_feature (21)..(208): Homolog of NCBI NO: 15220810 NR Description: RRM-containing RNA-binding protein, putative
  misc_feature (36)..(208): Homolog of NCBI NO: 35215091 NR Description: putative heterogeneous nuclear ribonucleoprotein
  misc_feature (22)..(208): Homolog of NCBI NO: 15242719 NR Description: RRM-containing RNA-binding protein, putative
MAAETRSVVGGRGLAKAVGNVDTGGEDGRDADSSGGDASGKIFVGGVAWETTEETFTKHFQKYGAITDSVIMNDKHTRMPRGFGFVTFSDPSVLDRVLEDEHVIDGRTVEVKRTVPKEEMSSKDGPKTKKIFVGGIPPSLTEDKLKEHFSSYGKVVEHQIMLDHSTGRSRGFGFVTFESEDAVERVMSEGRIMILEGNRLKLRKLNQKNLVWVIQAQMEDTVVVVVIVIHTVVVVAMAFLGTAVVVAMDTVVATDQLLQHIMAAQHMVPMAEGMDTVVLLAMA

SEQ ID NO: 16761 - DNA, 1522 bp, Zea mays subsp. mays
  misc_feature (1)..(1522): Ceres Seq. ID no. 12415477
  misc_feature: MA Experiment ID: 108504 Result: Down-regulated in Transcription
  misc_feature: MA Experiment 108504 PARAMETER Experiment Name: Zm_Drought_P Parameter: Age (day) Value: 8
  misc_feature: MA Experiment 108504 PARAMETER Experiment Name: Zm_Drought_P Parameter: Organism Value: Zea mays
  misc_feature: MA Experiment 108504 PARAMETER Experiment Name: Zm_Drought_P Parameter: Plant Line Value: 35A19
  misc_feature: MA Experiment 108504 PARAMETER Experiment Name: Zm_Drought_P Parameter: Timepoint (hr) Value: 12
  misc_feature: MA Experiment 108504 PARAMETER Experiment Name: Zm_Drought_P Parameter: Tissue Value: Aerial
  misc_feature: MA Experiment 108504 PARAMETER Experiment Name: Zm_Drought_P Parameter: Treatment Value: Drought vs. No Drought
  misc_feature: MA Experiment ID: 108522 Result: Down-regulated in Transcription
  misc_feature: MA Experiment 108522 PARAMETER Experiment Name: Zm_42deg_Heat_P Parameter: Age (day) Value: 8
  misc_feature: MA Experiment 108522 PARAMETER Experiment Name: Zm_42deg_Heat_P Parameter: Organism Value: Zea mays
  misc_feature: MA Experiment 108522 PARAMETER Experiment Name: Zm_42deg_Heat_P Parameter: Plant Line Value: 35A19
  misc_feature: MA Experiment 108522 PARAMETER Experiment Name: Zm_42deg_Heat_P Parameter: Temperature (deg C) Value: 42 vs. 22
  misc_feature: MA Experiment 108522 PARAMETER Experiment Name: Zm_42deg_Heat_P Parameter: Timepoint (hr) Value: 1
  misc_feature: MA Experiment 108522 PARAMETER Experiment Name: Zm_42deg_Heat_P Parameter: Tissue Value: Aerial
  misc_feature: MA Experiment ID: 108523 Result: Down-regulated in Transcription
  misc_feature: MA Experiment 108523 PARAMETER Experiment Name: Zm_42deg_Heat_P Parameter: Age (day) Value: 8
  misc_feature: MA Experiment 108523 PARAMETER Experiment Name: Zm_42deg_Heat_P Parameter: Organism Value: Zea mays
  misc_feature: MA Experiment 108523 PARAMETER Experiment Name: Zm_42deg_Heat_P Parameter: Plant Line Value: 35A19
  misc_feature: MA Experiment 108523 PARAMETER Experiment Name: Zm_42deg_Heat_P Parameter: Temperature (deg C) Value: 42 vs. 22
  misc_feature: MA Experiment 108523 PARAMETER Experiment Name: Zm_42deg_Heat_P Parameter: Timepoint (hr) Value: 6
  misc_feature: MA Experiment 108523 PARAMETER Experiment Name: Zm_42deg_Heat_P Parameter: Tissue Value: Aerial
  misc_feature: MA Experiment ID: 108535 Result: Up-regulated in Transcription
  misc_feature: MA Experiment 108535 PARAMETER Experiment Name: Zm_Meristem_P Parameter: Age (day) Value: 8
  misc_feature: MA Experiment 108535 PARAMETER Experiment Name: Zm_Meristem_P Parameter: Organism Value: Zea mays
  misc_feature: MA Experiment 108535 PARAMETER Experiment Name: Zm_Meristem_P Parameter: Plant Line Value: 35A19
  misc_feature: MA Experiment 108535 PARAMETER Experiment Name: Zm_Meristem_P Parameter: Tissue Value: Root Meristem vs. Above Root Meristem
  misc_feature: MA Experiment ID: 108543 Result: Down-regulated in Transcription
  misc_feature: MA Experiment ID: 108544 Result: Down-regulated in Transcription
  misc_feature: MA Experiment ID: 20000108 Result: Up-regulated in Transcription
  misc_feature: MA Experiment 20000108 PARAMETER Experiment Name: Zm_Root-Tips_P Parameter: Age (day) Value: 12
  misc_feature: MA Experiment 20000108 PARAMETER Experiment Name: Zm_Root-Tips_P Parameter: Organism Value: Zea mays
  misc_feature: MA Experiment 20000108 PARAMETER Experiment Name: Zm_Root-Tips_P Parameter: Tissue Value: Root tips vs. Root mid region    35
  misc_feature: MA Experiment 20000108 PARAMETER Experiment Name: Zm_Root-Tips_P Parameter: Tissue Value: Root tips vs. Root mid region   Sequence Listing-Misc Features (4)
  misc_feature: MA Experiment ID: 20000477 Result: Down-regulated in Transcription
  misc_feature: MA Experiment 20000477 PARAMETER Experiment Name: Zm_5mM_SA_P Parameter: Age (day) Value: 10
  misc_feature: MA Experiment 20000477 PARAMETER Experiment Name: Zm_5mM_SA_P Parameter: Organism Value: Zea mays
  misc_feature: MA Experiment 20000477 PARAMETER Experiment Name: Zm_5mM_SA_P Parameter: Plant Line Value: 35A19
  misc_feature: MA Experiment 20000477 PARAMETER Experiment Name: Zm_5mM_SA_P Parameter: Timepoint (hr) Value: 48
  misc_feature: MA Experiment 20000477 PARAMETER Experiment Name: Zm_5mM_SA_P Parameter: Tissue Value: Aerial
  misc_feature: MA Experiment 20000477 PARAMETER Experiment Name: Zm_5mM_SA_P Parameter: Treatment Value: 5mM SA vs. No Treatment
  misc_feature: MA Experiment ID: 20000478 Result: Down-regulated in Transcription
  misc_feature: MA Experiment 20000478 PARAMETER Experiment Name: Zm_5mM_SA_P Parameter: Age (day) Value: 11
  misc_feature: MA Experiment 20000478 PARAMETER Experiment Name: Zm_5mM_SA_P Parameter: Organism Value: Zea mays
  misc_feature: MA Experiment 20000478 PARAMETER Experiment Name: Zm_5mM_SA_P Parameter: Plant Line Value: 35A19
  misc_feature: MA Experiment 20000478 PARAMETER Experiment Name: Zm_5mM_SA_P Parameter: Timepoint (hr) Value: 72
  misc_feature: MA Experiment 20000478 PARAMETER Experiment Name: Zm_5mM_SA_P Parameter: Tissue Value: Aerial
  misc_feature: MA Experiment 20000478 PARAMETER Experiment Name: Zm_5mM_SA_P Parameter: Treatment Value: 5mM SA vs. No Treatment
  misc_feature: MA Experiment ID: 20000479 Result: Down-regulated in Transcription
  misc_feature: MA Experiment 20000479 PARAMETER Experiment Name: Zm_Drought_P Parameter: Age (day) Value: 10
  misc_feature: MA Experiment 20000479 PARAMETER Experiment Name: Zm_Drought_P Parameter: Organism Value: Zea mays
  misc_feature: MA Experiment 20000479 PARAMETER Experiment Name: Zm_Drought_P Parameter: Plant Line Value: 35A19
  misc_feature: MA Experiment 20000479 PARAMETER Experiment Name: Zm_Drought_P Parameter: Timepoint (hr) Value: 48
  misc_feature: MA Experiment 20000479 PARAMETER Experiment Name: Zm_Drought_P Parameter: Tissue Value: Aerial
  misc_feature: MA Experiment 20000479 PARAMETER Experiment Name: Zm_Drought_P Parameter: Treatment Value: Drought vs. No Drought
  misc_feature: MA Experiment ID: 20000487 Result: Down-regulated in Transcription
  misc_feature: MA Experiment 20000487 PARAMETER Experiment Name: Zm_50mM_NH4NO3_L_to_H_P Parameter: Organism Value: Zea mays
  misc_feature: MA Experiment 20000487 PARAMETER Experiment Name: Zm_50mM_NH4NO3_L_to_H_P Parameter: Timepoint (hr) Value: 4
  misc_feature: MA Experiment 20000487 PARAMETER Experiment Name: Zm_50mM_NH4NO3_L_to_H_P Parameter: Tissue Value: Leaves
  misc_feature: MA Experiment 20000487 PARAMETER Experiment Name: Zm_50mM_NH4NO3_L_to_H_P Parameter: Treatment Value: 50mM NH4NO3 vs. 100mM Mannitol
  misc_feature: MA Experiment ID: 20000535 Result: Up-regulated in Transcription
  misc_feature: MA Experiment 20000535 PARAMETER Experiment Name: Zm_Hybrid_Seed_Dev_P Parameter: DAP Value: 30 vs. 12
  misc_feature: MA Experiment 20000535 PARAMETER Experiment Name: Zm_Hybrid_Seed_Dev_P Parameter: Organism Value: Zea mays
  misc_feature: MA Experiment 20000535 PARAMETER Experiment Name: Zm_Hybrid_Seed_Dev_P Parameter: Plant Line Value: 35A19
  misc_feature: MA Experiment 20000535 PARAMETER Experiment Name: Zm_Hybrid_Seed_Dev_P Parameter: Tissue Value: Embryo vs. Unfert Floret
  misc_feature: MA Experiment ID: 20000632 Result: Down-regulated in Transcription
  misc_feature: MA Experiment 20000632 PARAMETER Experiment Name: Zm_Herbicide-Treatments_P Parameter: Timepoint (hr) Value: 4
  misc_feature: MA Experiment 20000632 PARAMETER Experiment Name: Zm_Herbicide-Treatments_P Parameter: Tissue Value: Aerial
  misc_feature: MA Experiment 20000632 PARAMETER Experiment Name: Zm_Herbicide-Treatments_P Parameter: Treatment Value: Glean vs. No Treatment
acagtctccagggtagctagccaagctaccaagctcgtcaggagcgagagaaagaggccggcggtgcgcggggatgatgatgatgagcagcggccgggcgggcggcggggccaccgcggggcggtacccgttcacggcgtcgcagtggcaggagctggagcaccaggcgctcatctacaagtgcctggcgtccggcaagcccatcccgtcctacctcatgccgccgctccgccgcatcctcgactccgccctcgccacgtcgccgtccctcgcctacccgccgcaaccctcgctgggctggggctgcttcgggatgggcttcacccggaaggccgacgaggacccggagcccgggcggtgccggcgcacggacggcaagaagtggcgctgctccaaggaggcgtacccggactccaagtactgcgagaagcacatgcaccggggcaagaaccgttcaagaaagcctgtggaaatgtccttggccacgccggccccggcgccggcccccgccgccgccacaaccgccaccgccacctcatccccggcgccgtcctaccaccgcccggcccacgacgccacgccgtctccgtaccacgcgctgtatggaggcggcggcggcggcggtagcccttactcggcgtcggcacgcccaggagcaaccggaggcggcggcgcgtaccaccacgcgcagcatgtgagcccattccacctccacctcgagaccacccacccgcacccgccgccgccctacaactactccgccgaccagagggactacgcgtacgggcacgcggccgccaaggaggtcggcgagcacgccttcttctcggacggcgcgggcgagcgggtcgaccgccaggccgcggcggggcagtggcagttcaggcagctcggggtggagacgaagccgggccccacgccgctgttccccgtcgccgggtacgggcacggcgcggcgtcgccgtacggcgtggagatgggcaagtacgacgacgagcaggaggagaggcgccgccagcactgcttcgttcttggagccggcctgcggctggagcggccgtcgtcgggccatggccatggccatgaccatgacgacgccgccgccgcgcagaagccgctccggcccttcttcgacgagtggccgcaccagaagggggacaaggccggttcgtggatggggctcgacggcgagacgcagctctccatttccatccccatggccgctaccgacctccccgtcacctcccgcttccgtaacgacgagtgatgccacatcaaacctggcgctggaaactcggaacgcatggtgctgatgctgaccatgagatgtaccgtttcgctcaaggccggccgtcatcaccacggccacatcaaaccggtttgaagaacttgggaaggccgaatgaaacctccagaagaatgatctgtcctcttttttctgcatttctttttctcttagtattacgcagtattgcttcgcgtgtaatatgttttcctgtaatatcaagtgagggcgtttctg

SEQ ID NO: 16762 - protein, 397 aa, Zea mays subsp. mays
  peptide (1)..(397): Ceres Seq. ID no. 12415478
  misc_feature (155)..(348): Homolog of NCBI NO: 34896388 NR Description: hypothetical protein [Oryza sativa (japonica
  misc_feature (266)..(393): Homolog of NCBI NO: 38569158 NR Description: OSJNBa0042N22.12 [Oryza sativa (japonica
  misc_feature (1)..(162): Homolog of NCBI NO: 28273382 NR Description: putative transcription activator
  misc_feature (7)..(185): Homolog of NCBI NO: 38345778 NR Description: OSJNBa0083N12.16 [Oryza sativa (japonica
  misc_feature (2)..(242): Homolog of NCBI NO: 30682907 NR Description: transcription activator (GRL5) [Arabidopsis
  misc_feature (2)..(242): Homolog of NCBI NO: 11994367 NR Description: gb|AAF17567.1~gene_id:MDC16.8~similar to unknown
  misc_feature (228)..(392): Homolog of NCBI NO: 34897962 NR Description: putative growth-regulating factor 1
  misc_feature (2)..(191): Homolog of NCBI NO: 34897962 NR Description: putative growth-regulating factor 1
  misc_feature (3)..(265): Homolog of NCBI NO: 18390099 NR Description: putative growth-regulating factor 1 [Sorghum
  misc_feature (2)..(397): Homolog of NCBI NO: 6573149 NR Description: growth-regulating factor 1 [Oryza sativa]
MMMMSSGRAGGGATAGRYPFTASQWQELEHQALIYKCLASGKPIPSYLMPPLRRILDSALATSPSLAYPPQPSLGWGCFGMGFTRKADEDPEPGRCRRTDGKKWRCSKEAYPDSKYCEKHMHRGKNRSRKPVEMSLATPAPAPAPAAATTATATSSPAPSYHRPAHDATPSPYHALYGGGGGGGSPYSASARPGATGGGGAYHHAQHVSPFHLHLETTHPHPPPPYNYSADQRDYAYGHAAAKEVGEHAFFSDGAGERVDRQAAAGQWQFRQLGVETKPGPTPLFPVAGYGHGAASPYGVEMGKYDDEQEERRRQHCFVLGAGLRLERPSSGHGHGHDHDDAAAAQKPLRPFFDEWPHQKGDKAGSWMGLDGETQLSISIPMAATDLPVTSRFRNDE

SEQ ID NO: 16763 - protein, 396 aa, Zea mays subsp. mays
  peptide (1)..(396): Ceres Seq. ID no. 12415479
  misc_feature (154)..(347): Homolog of NCBI NO: 34896388 NR Description: hypothetical protein [Oryza sativa (japonica
  misc_feature (265)..(392): Homolog of NCBI NO: 38569158 NR Description: OSJNBa0042N22.12 [Oryza sativa (japonica
  misc_feature (1)..(161): Homolog of NCBI NO: 28273382 NR Description: putative transcription activator
  misc_feature (6)..(184): Homolog of NCBI NO: 38345778 NR Description: OSJNBa0083N12.16 [Oryza sativa (japonica
  misc_feature (1)..(241): Homolog of NCBI NO: 30682907 NR Description: transcription activator (GRL5) [Arabidopsis
  misc_feature (1)..(241): Homolog of NCBI NO: 11994367 NR Description: gb|AAF17567.1~gene_id:MDC16.8~similar to unknown
  misc_feature (227)..(391): Homolog of NCBI NO: 34897962 NR Description: putative growth-regulating factor 1
  misc_feature (1)..(190): Homolog of NCBI NO: 34897962 NR Description: putative growth-regulating factor 1
  misc_feature (2)..(264): Homolog of NCBI NO: 18390099 NR Description: putative growth-regulating factor 1 [Sorghum
  misc_feature (1)..(396): Homolog of NCBI NO: 6573149 NR Description: growth-regulating factor 1 [Oryza sativa]
MMMSSGRAGGGATAGRYPFTASQWQELEHQALIYKCLASGKPIPSYLMPPLRRILDSALATSPSLAYPPQPSLGWGCFGMGFTRKADEDPEPGRCRRTDGKKWRCSKEAYPDSKYCEKHMHRGKNRSRKPVEMSLATPAPAPAPAAATTATATSSPAPSYHRPAHDATPSPYHALYGGGGGGGSPYSASARPGATGGGGAYHHAQHVSPFHLHLETTHPHPPPPYNYSADQRDYAYGHAAAKEVGEHAFFSDGAGERVDRQAAAGQWQFRQLGVETKPGPTPLFPVAGYGHGAASPYGVEMGKYDDEQEERRRQHCFVLGAGLRLERPSSGHGHGHDHDDAAAAQKPLRPFFDEWPHQKGDKAGSWMGLDGETQLSISIPMAATDLPVTSRFRNDE

SEQ ID NO: 16764 - protein, 395 aa, Zea mays subsp. mays
  peptide (1)..(395): Ceres Seq. ID no. 12415480
  misc_feature (153)..(346): Homolog of NCBI NO: 34896388 NR Description: hypothetical protein [Oryza sativa (japonica
  misc_feature (264)..(391): Homolog of NCBI NO: 38569158 NR Description: OSJNBa0042N22.12 [Oryza sativa (japonica
  misc_feature (1)..(160): Homolog of NCBI NO: 28273382 NR Description: putative transcription activator
  misc_feature (5)..(183): Homolog of NCBI NO: 38345778 NR Description: OSJNBa0083N12.16 [Oryza sativa (japonica
  misc_feature (1)..(240): Homolog of NCBI NO: 30682907 NR Description: transcription activator (GRL5) [Arabidopsis
  misc_feature (1)..(240): Homolog of NCBI NO: 11994367 NR Description: gb|AAF17567.1~gene_id:MDC16.8~similar to unknown
  misc_feature (226)..(390): Homolog of NCBI NO: 34897962 NR Description: putative growth-regulating factor 1
  misc_feature (1)..(189): Homolog of NCBI NO: 34897962 NR Description: putative growth-regulating factor 1
  misc_feature (1)..(263): Homolog of NCBI NO: 18390099 NR Description: putative growth-regulating factor 1 [Sorghum
  misc_feature (1)..(395): Homolog of NCBI NO: 6573149 NR Description: growth-regulating factor 1 [Oryza sativa]
MMSSGRAGGGATAGRYPFTASQWQELEHQALIYKCLASGKPIPSYLMPPLRRILDSALATSPSLAYPPQPSLGWGCFGMGFTRKADEDPEPGRCRRTDGKKWRCSKEAYPDSKYCEKHMHRGKNRSRKPVEMSLATPAPAPAPAAATTATATSSPAPSYHRPAHDATPSPYHALYGGGGGGGSPYSASARPGATGGGGAYHHAQHVSPFHLHLETTHPHPPPPYNYSADQRDYAYGHAAAKEVGEHAFFSDGAGERVDRQAAAGQWQFRQLGVETKPGPTPLFPVAGYGHGAASPYGVEMGKYDDEQEERRRQHCFVLGAGLRLERPSSGHGHGHDHDDAAAAQKPLRPFFDEWPHQKGDKAGSWMGLDGETQLSISIPMAATDLPVTSRFRNDE

SEQ ID NO: 16765 - DNA, 1306 bp, Zea mays subsp. mays
  misc_feature (1)..(1306): Ceres Seq. ID no. 12362545
  misc_feature: MA Experiment ID: 108532 Result: Up-regulated in Transcription
  misc_feature: MA Experiment 108532 PARAMETER Experiment Name: Zm_20uM_KNO3_H-to-L_P Parameter: Age (day) Value: 11
  misc_feature: MA Experiment 108532 PARAMETER Experiment Name: Zm_20uM_KNO3_H-to-L_P Parameter: Organism Value: Zea mays
  misc_feature: MA Experiment 108532 PARAMETER Experiment Name: Zm_20uM_KNO3_H-to-L_P Parameter: Plant Line Value: 35A19
  misc_feature: MA Experiment 108532 PARAMETER Experiment Name: Zm_20uM_KNO3_H-to-L_P Parameter: Timepoint (hr) Value: 16
  misc_feature: MA Experiment 108532 PARAMETER Experiment Name: Zm_20uM_KNO3_H-to-L_P Parameter: Tissue Value: Roots
  misc_feature: MA Experiment 108532 PARAMETER Experiment Name: Zm_20uM_KNO3_H-to-L_P Parameter: Treatment Value: 20uM KNO3 vs. 60mM KNO3
  misc_feature: MA Experiment ID: 108543 Result: Down-regulated in Transcription
  misc_feature: MA Experiment ID: 108544 Result: Up-regulated in Transcription
aaatccagttgggaatcccacgaagattcaccggagctggtgaggttgtaagccgggactgccgccactgccaaattgcgtgggtgccgccgtttggggcctggaaccgtgccagggagcttcgcggtgtagtaaggatgctggacggttgatgcttcgggctcgggaccatgtggaacaacagcaatccctcgccggagcacttttgtcgggccagaaccgccgtgcgccgtggccatggtatttagctgcgcgatttctgcaaggttacgagtcacctgaagagcaagtttgtacctggaatctcaagtcccaggtgacaagaagagctatcggatggagctcaacgagttcgccgacatgaccaacgacgagttcatggccatgtacactggcttgagaccagtcccggcaggggcaaagaagatggccggtttcaagtacgggaacgtgactctttcagacgccgacgacgaccagcagacggttgactggcggcagaaaggcgcggtcaccggtatcaaggaccagcgccagtgtggttgttgctgggccttcgctgcggtggcggccgtggagggcatccaccagatcacgacgggcaacttggtgtccttatcggagcagcaggtgctggactgcgacaccgacgggaacaacggctgcaacggcggctacatcgacaacgccttccaatacatcgtcggcaacggcggcctcgccaccgaggacgcctacccgtacaccgccgcgcaggccatgtgccagtccgtgcagccggtggccgccatcagcggctaccaggacgtgccgagcggcgacgaggcagcgctcgccgcggccgtcgccaaccagccggtgtcggttgccatcgacgcacataacttccagctctacggtggcggggtgatgaccgcagccagctgcagcacgccaccgaacctgaaccacgccgtcacggcggtaggctacggcacggcggaggatgggaccccgtactggctgctcaagaaccagtggggccagaactggggagagggaggatacctcaggcttgagagaggcgcaaacgcctgtggggtcgcccagcaagcctcctacccagtcgcatgatgaatatatagataacgtacgggtcgaaacgaaaacatatatattctacatacacgaaggcatgcataagaatgactactaaggaataaagcatgtacacacattgatagtacatacatacatagcgtaaacttgtaacacaattgtcatgcaacattccaaatataatttatttctacttggccttcttttc

SEQ ID NO: 16766 - protein, 258 aa, Zea mays subsp. mays
  peptide (1)..(258): Ceres Seq. ID no. 12362546
  misc_feature (49)..(257): Pfam Name: Papain family cysteine protease Pfam Description: Papain family cysteine protease
  misc_feature (1)..(258): Homolog of NCBI NO: 34329348 NR Description: putative cysteine proteinase [Medicago truncatula]
  misc_feature (1)..(258): Homolog of NCBI NO: 38346003 NR Description: OSJNBa0035O13.5 [Oryza sativa (japonica
  misc_feature (1)..(258): Homolog of NCBI NO: 37780045 NR Description: cysteine protease 5 [Trifolium repens]
  misc_feature (1)..(258): Homolog of NCBI NO: 37780047 NR Description: cysteine protease 8 [Trifolium repens]
  misc_feature (1)..(257): Homolog of NCBI NO: 34899394 NR Description: putative cysteine proteinase
  misc_feature (1)..(258): Homolog of NCBI NO: 37780051 NR Description: cysteine protease 12 [Trifolium repens]
  misc_feature (1)..(258): Homolog of NCBI NO: 38346007 NR Description: OSJNBa0035O13.9 [Oryza sativa (japonica
  misc_feature (1)..(258): Homolog of NCBI NO: 38345008 NR Description: OSJNBa0052O21.11 [Oryza sativa (japonica
  misc_feature (1)..(257): Homolog of NCBI NO: 21070926 NR Description: putative cysteine proteinase
  misc_feature (1)..(257): Homolog of NCBI NO: 7435799 NR Description: cysteine proteinase (EC 3.4.22.-) - barley
MELNEFADMTNDEFMAMYTGLRPVPAGAKKMAGFKYGNVTLSDADDDQQTVDWRQKGAVTGIKDQRQCGCCWAFAAVAAVEGIHQITTGNLVSLSEQQVLDCDTDGNNGCNGGYIDNAFQYIVGNGGLATEDAYPYTAAQAMCQSVQPVAAISGYQDVPSGDEAALAAAVANQPVSVAIDAHNFQLYGGGVMTAASCSTPPNLNHAVTAVGYGTAEDGTPYWLLKNQWGQNWGEGGYLRLERGANACGVAQQASYPVA

SEQ ID NO: 16767 - protein, 250 aa, Zea mays subsp. mays
  peptide (1)..(250): Ceres Seq. ID no. 12362547
  misc_feature (41)..(249): Pfam Name: Papain family cysteine protease Pfam Description: Papain family cysteine protease
  misc_feature (1)..(250): Homolog of NCBI NO: 34329348 NR Description: putative cysteine proteinase [Medicago truncatula]
  misc_feature (1)..(250): Homolog of NCBI NO: 38346003 NR Description: OSJNBa0035O13.5 [Oryza sativa (japonica
  misc_feature (1)..(250): Homolog of NCBI NO: 37780045 NR Description: cysteine protease 5 [Trifolium repens]
  misc_feature (1)..(250): Homolog of NCBI NO: 37780047 NR Description: cysteine protease 8 [Trifolium repens]
  misc_feature (1)..(249): Homolog of NCBI NO: 34899394 NR Description: putative cysteine proteinase
  misc_feature (1)..(250): Homolog of NCBI NO: 37780051 NR Description: cysteine protease 12 [Trifolium repens]
  misc_feature (1)..(250): Homolog of NCBI NO: 38346007 NR Description: OSJNBa0035O13.9 [Oryza sativa (japonica
  misc_feature (1)..(250): Homolog of NCBI NO: 38345008 NR Description: OSJNBa0052O21.11 [Oryza sativa (japonica
  misc_feature (1)..(249): Homolog of NCBI NO: 21070926 NR Description: putative cysteine proteinase
  misc_feature (1)..(249): Homolog of NCBI NO: 7435799 NR Description: cysteine proteinase (EC 3.4.22.-) - barley
MTNDEFMAMYTGLRPVPAGAKKMAGFKYGNVTLSDADDDQQTVDWRQKGAVTGIKDQRQCGCCWAFAAVAAVEGIHQITTGNLVSLSEQQVLDCDTDGNNGCNGGYIDNAFQYIVGNGGLATEDAYPYTAAQAMCQSVQPVAAISGYQDVPSGDEAALAAAVANQPVSVAIDAHNFQLYGGGVMTAASCSTPPNLNHAVTAVGYGTAEDGTPYWLLKNQWGQNWGEGGYLRLERGANACGVAQQASYPVA

SEQ ID NO: 16768 - protein, 244 aa, Zea mays subsp. mays
  peptide (1)..(244): Ceres Seq. ID no. 12362548
  misc_feature (35)..(243): Pfam Name: Papain family cysteine protease Pfam Description: Papain family cysteine protease
  misc_feature (1)..(244): Homolog of NCBI NO: 34329348 NR Description: putative cysteine proteinase [Medicago truncatula]
  misc_feature (1)..(244): Homolog of NCBI NO: 38346003 NR Description: OSJNBa0035O13.5 [Oryza sativa (japonica
  misc_feature (1)..(244): Homolog of NCBI NO: 37780045 NR Description: cysteine protease 5 [Trifolium repens]
  misc_feature (1)..(244): Homolog of NCBI NO: 37780047 NR Description: cysteine protease 8 [Trifolium repens]
  misc_feature (1)..(243): Homolog of NCBI NO: 34899394 NR Description: putative cysteine proteinase
  misc_feature (1)..(244): Homolog of NCBI NO: 37780051 NR Description: cysteine protease 12 [Trifolium repens]
  misc_feature (1)..(244): Homolog of NCBI NO: 38346007 NR Description: OSJNBa0035O13.9 [Oryza sativa (japonica
  misc_feature (1)..(244): Homolog of NCBI NO: 38345008 NR Description: OSJNBa0052O21.11 [Oryza sativa (japonica
  misc_feature (1)..(243): Homolog of NCBI NO: 21070926 NR Description: putative cysteine proteinase
  misc_feature (1)..(243): Homolog of NCBI NO: 7435799 NR Description: cysteine proteinase (EC 3.4.22.-) - barley
MAMYTGLRPVPAGAKKMAGFKYGNVTLSDADDDQQTVDWRQKGAVTGIKDQRQCGCCWAFAAVAAVEGIHQITTGNLVSLSEQQVLDCDTDGNNGCNGGYIDNAFQYIVGNGGLATEDAYPYTAAQAMCQSVQPVAAISGYQDVPSGDEAALAAAVANQPVSVAIDAHNFQLYGGGVMTAASCSTPPNLNHAVTAVGYGTAEDGTPYWLLKNQWGQNWGEGGYLRLERGANACGVAQQASYPVA

SEQ ID NO: 16769 - DNA, 1374 bp, Zea mays subsp. mays
  misc_feature (1)..(1374): Ceres Seq. ID no. 12415396
  misc_feature: MA Experiment ID: 108529 Result: Up-regulated in Transcription
  misc_feature: MA Experiment 108529 PARAMETER Experiment Name: Zm_Imbibed_Seeds_P Parameter: Age (day) Value: 5 vs. 2
  misc_feature: MA Experiment 108529 PARAMETER Experiment Name: Zm_Imbibed_Seeds_P Parameter: Organism Value: Zea mays
  misc_feature: MA Experiment 108529 PARAMETER Experiment Name: Zm_Imbibed_Seeds_P Parameter: Plant Line Value: 35A19
  misc_feature: MA Experiment 108529 PARAMETER Experiment Name: Zm_Imbibed_Seeds_P Parameter: Tissue Value: Roots vs. Embryo
  misc_feature: MA Experiment ID: 108535 Result: Down-regulated in Transcription
  misc_feature: MA Experiment 108535 PARAMETER Experiment Name: Zm_Meristem_P Parameter: Age (day) Value: 8
  misc_feature: MA Experiment 108535 PARAMETER Experiment Name: Zm_Meristem_P Parameter: Organism Value: Zea mays
  misc_feature: MA Experiment 108535 PARAMETER Experiment Name: Zm_Meristem_P Parameter: Plant Line Value: 35A19
  misc_feature: MA Experiment 108535 PARAMETER Experiment Name: Zm_Meristem_P Parameter: Tissue Value: Root Meristem vs. Above Root Meristem
  misc_feature: MA Experiment ID: 108536 Result: Up-regulated in Transcription
  misc_feature: MA Experiment 108536 PARAMETER Experiment Name: Zm_Meristem_P Parameter: Age (day) Value: 8
  misc_feature: MA Experiment 108536 PARAMETER Experiment Name: Zm_Meristem_P Parameter: Organism Value: Zea mays
  misc_feature: MA Experiment 108536 PARAMETER Experiment Name: Zm_Meristem_P Parameter: Plant Line Value: 35A19
  misc_feature: MA Experiment 108536 PARAMETER Experiment Name: Zm_Meristem_P Parameter: Tissue Value: Shoot Meristem vs. Above Shoot Meristem
  misc_feature: MA Experiment ID: 108543 Result: Down-regulated in Transcription
  misc_feature: MA Experiment ID: 108687 Result: Up-regulated in Transcription
  misc_feature: MA Experiment 108687 PARAMETER Experiment Name: Zm_Embryos-Flowers__P Parameter: Tissue Value: Embryo vs. Aerial+
  misc_feature: MA Experiment ID: 108688 Result: Down-regulated in Transcription
  misc_feature: MA Experiment 108688 PARAMETER Experiment Name: Zm_Embryos-Flowers__P Parameter: Tissue Value: Immature Flowers vs. Aerial+
  misc_feature: MA Experiment ID: 108689 Result: Up-regulated in Transcription
  misc_feature: MA Experiment 108689 PARAMETER Experiment Name: Zm_Drought_Roots_P Parameter: Age (day) Value: 9
  misc_feature: MA Experiment 108689 PARAMETER Experiment Name: Zm_Drought_Roots_P Parameter: Organism Value: Zea mays
  misc_feature: MA Experiment 108689 PARAMETER Experiment Name: Zm_Drought_Roots_P Parameter: Plant Line Value: 35A19
  misc_feature: MA Experiment 108689 PARAMETER Experiment Name: Zm_Drought_Roots_P Parameter: Timepoint (hr) Value: 24
  misc_feature: MA Experiment 108689 PARAMETER Experiment Name: Zm_Drought_Roots_P Parameter: Tissue Value: Roots
  misc_feature: MA Experiment 108689 PARAMETER Experiment Name: Zm_Drought_Roots_P Parameter: Treatment Value: Drought vs. No Drought
  misc_feature: MA Experiment ID: 20000479 Result: Up-regulated in Transcription
  misc_feature: MA Experiment 20000479 PARAMETER Experiment Name: Zm_Drought_P Parameter: Age (day) Value: 10
  misc_feature: MA Experiment 20000479 PARAMETER Experiment Name: Zm_Drought_P Parameter: Organism Value: Zea mays
  misc_feature: MA Experiment 20000479 PARAMETER Experiment Name: Zm_Drought_P Parameter: Plant Line Value: 35A19
  misc_feature: MA Experiment 20000479 PARAMETER Experiment Name: Zm_Drought_P Parameter: Timepoint (hr) Value: 48
  misc_feature: MA Experiment 20000479 PARAMETER Experiment Name: Zm_Drought_P Parameter: Tissue Value: Aerial
  misc_feature: MA Experiment 20000479 PARAMETER Experiment Name: Zm_Drought_P Parameter: Treatment Value: Drought vs. No Drought
  misc_feature: MA Experiment ID: 20000492 Result: Down-regulated in Transcription
  misc_feature: MA Experiment 20000492 PARAMETER Experiment Name: Zm_Hybrid_Seed_Dev_P Parameter: DAP Value: 12
  misc_feature: MA Experiment 20000492 PARAMETER Experiment Name: Zm_Hybrid_Seed_Dev_P Parameter: Organism Value: Zea mays
  misc_feature: MA Experiment 20000492 PARAMETER Experiment Name: Zm_Hybrid_Seed_Dev_P Parameter: Plant Line Value: 35A19
  misc_feature: MA Experiment 20000492 PARAMETER Experiment Name: Zm_Hybrid_Seed_Dev_P Parameter: Tissue Value: Fert Kernel vs. Unfert Floret
  misc_feature: MA Experiment ID: 20000535 Result: Down-regulated in Transcription
  misc_feature: MA Experiment 20000535 PARAMETER Experiment Name: Zm_Hybrid_Seed_Dev_P Parameter: DAP Value: 30 vs. 12
  misc_feature: MA Experiment 20000535 PARAMETER Experiment Name: Zm_Hybrid_Seed_Dev_P Parameter: Organism Value: Zea mays
  misc_feature: MA Experiment 20000535 PARAMETER Experiment Name: Zm_Hybrid_Seed_Dev_P Parameter: Plant Line Value: 35A19
  misc_feature: MA Experiment 20000535 PARAMETER Experiment Name: Zm_Hybrid_Seed_Dev_P Parameter: Tissue Value: Embryo vs. Unfert Floret
acttgccagttcccactcctaactctctcttcgtttactcttcttcccacccccagcgttcgcttccatccaagctcatatcatcatagatcgacggactaggccacgcgccccaatactcagaactagtcttgagtaaagcatggcgtcgtcttctccgtcctgccgtggcagcggcggcaagtcggacgtggaccggatcaagggcccctggagccccgaggaggacgaggccctgcagcgcctggtggcccgccacggcgcccgcaactggtccctcatcagccggtccatcccgggccgctccggcaagtcgtgccgcctccggtggtgcaaccagctgtcgccgcaggtggagcaccggcccttcacggccgaggaggacgacaccatcctccgcgcgcacgccaggttcggcaacaagtgggccaccatcgcgcgcctcctctccggccgcaccgacaacgccatcaagaaccactggaactccacgctaaagcgcaagtactacgccgccagcgacgctgttgttgctgacgctgacgacgagcgcccgctgaagcgcacaagcagcgacggccacccagggctctgcttcagccccggaagcccatccgggtccgacctcagcgactctagcaaccacagccttccctccgtcatgccgtcagccgcttctgctgccgccgtcacctcccaccagcagcagcagcacgtgtaccgccccgtgccgcgcgcgggcggcgtggtcatgctaccggtggcgcctcttgcgccgccgccgccgccacagcctccggcgacctccttatcactgtccctctccctgcccgggctggacggccagaagcccgaagcatcccaagcggttctgacgccggcaccggcaccgcctcaacctcctcttcagatacagcagcagcagcctgctccacctcagatgccgccaccacaagcccaaccgagcttgccgttccagctgcaggcggccgcgacgaacctcacgtcgcagcagccggcagcagcgccgttcagctcggagttcctgttgttgatgcaggagatgatccggatcgaggtacggaactacatgtccgggtcggggctcgatccgcgcaccgacggcgccgccgtgcacgccgtgagcaagcgtatgatgggtatggccaagatcgagtagtttcagcgcgcatgcacacagcggcagcagcaggcgtggaagatacaaaagaaaacgaaccgccgatcgatccgcggcggccagcgcgtgtatgaagtagtaatgaaccagcaagaacggcgtggccttgaaccatacggaggccgtgtggtgcggcaagtgaacagctccaaccatcggctttttagctcatg

SEQ ID NO: 16770 - protein, 345 aa, Zea mays subsp. mays
  peptide (1)..(345): Ceres Seq. ID no. 12415397
  misc_feature (21)..(67): Pfam Name: Myb-like DNA-binding domain Pfam Description: Myb-like DNA-binding domain
  misc_feature (14)..(193): Homolog of NCBI NO: 15235484 NR Description: myb DNA-binding protein (AtMYB73)
  misc_feature (11)..(227): Homolog of NCBI NO: 15227806 NR Description: MYB family transcription factor
  misc_feature (11)..(227): Homolog of NCBI NO: 21593586 NR Description: putative MYB family transcription factor
  misc_feature (18)..(233): Homolog of NCBI NO: 21592897 NR Description: myb-related protein, 33.3K [Arabidopsis thaliana]
  misc_feature (18)..(233): Homolog of NCBI NO: 2129648 NR Description: myb-related protein, 33.3K - Arabidopsis thaliana
  misc_feature (18)..(233): Homolog of NCBI NO: 15450393 NR Description: AT5g67300/K8K14_2 [Arabidopsis thaliana]
  misc_feature (18)..(233): Homolog of NCBI NO: 15240708 NR Description: myb family transcription factor
  misc_feature (19)..(253): Homolog of NCBI NO: 9954114 NR Description: tuber-specific and sucrose-responsive element
  misc_feature (17)..(319): Homolog of NCBI NO: 9954112 NR Description: tuber-specific and sucrose-responsive element
  misc_feature (14)..(345): Homolog of NCBI NO: 27529846 NR Description: Myb-like protein [Nicotiana tabacum]
MASSSPSCRGSGGKSDVDRIKGPWSPEEDEALQRLVARHGARNWSLISRSIPGRSGKSCRLRWCNQLSPQVEHRPFTAEEDDTILRAHARFGNKWATIARLLSGRTDNAIKNHWNSTLKRKYYAASDAVVADADDERPLKRTSSDGHPGLCFSPGSPSGSDLSDSSNHSLPSVMPSAASAAAVTSHQQQQHVYRPVPRAGGVVMLPVAPLAPPPPPQPPATSLSLSLSLPGLDGQKPEASQAVLTPAPAPPQPPLQIQQQQPAPPQMPPPQAQPSLPFQLQAAATNLTSQQPAAAPFSSEFLLLMQEMIRIEVRNYMSGSGLDPRTDGAAVHAVSKRMMGMAKIE

SEQ ID NO: 16771 - protein, 172 aa, Zea mays subsp. mays
  peptide (1)..(172): Ceres Seq. ID no. 12415398
  misc_feature (1)..(20): Homolog of NCBI NO: 15235484 NR Description: myb DNA-binding protein (AtMYB73)
  misc_feature (1)..(54): Homolog of NCBI NO: 15227806 NR Description: MYB family transcription factor
  misc_feature (1)..(54): Homolog of NCBI NO: 21593586 NR Description: putative MYB family transcription factor
  misc_feature (1)..(60): Homolog of NCBI NO: 21592897 NR Description: myb-related protein, 33.3K [Arabidopsis thaliana]
  misc_feature (1)..(60): Homolog of NCBI NO: 2129648 NR Description: myb-related protein, 33.3K - Arabidopsis thaliana
  misc_feature (1)..(60): Homolog of NCBI NO: 15450393 NR Description: AT5g67300/K8K14_2 [Arabidopsis thaliana]
  misc_feature (1)..(60): Homolog of NCBI NO: 15240708 NR Description: myb family transcription factor
  misc_feature (1)..(80): Homolog of NCBI NO: 9954114 NR Description: tuber-specific and sucrose-responsive element
  misc_feature (1)..(146): Homolog of NCBI NO: 9954112 NR Description: tuber-specific and sucrose-responsive element
  misc_feature (1)..(172): Homolog of NCBI NO: 27529846 NR Description: Myb-like protein [Nicotiana tabacum]
MPSAASAAAVTSHQQQQHVYRPVPRAGGVVMLPVAPLAPPPPPQPPATSLSLSLSLPGLDGQKPEASQAVLTPAPAPPQPPLQIQQQQPAPPQMPPPQAQPSLPFQLQAAATNLTSQQPAAAPFSSEFLLLMQEMIRIEVRNYMSGSGLDPRTDGAAVHAVSKRMMGMAKIE

SEQ ID NO: 16772 - DNA, 2015 bp, Zea mays subsp. mays; identical to SEQ ID NO: 6065
  misc_feature (1)..(2015): Ceres Seq. ID no. 12594596
  misc_feature: MA Experiment ID: 108535 Result: Up-regulated in Transcription
  misc_feature: MA Experiment 108535 PARAMETER Experiment Name: Zm_Meristem_P Parameter: Age (day) Value: 8
  misc_feature: MA Experiment 108535 PARAMETER Experiment Name: Zm_Meristem_P Parameter: Organism Value: Zea mays
  misc_feature: MA Experiment 108535 PARAMETER Experiment Name: Zm_Meristem_P Parameter: Plant Line Value: 35A19
  misc_feature: MA Experiment 108535 PARAMETER Experiment Name: Zm_Meristem_P Parameter: Tissue Value: Root Meristem vs. Above Root Meristem
  misc_feature: MA Experiment ID: 108544 Result: Down-regulated in Transcription
  misc_feature: MA Experiment ID: 20000108 Result: Up-regulated in Transcription
  misc_feature: MA Experiment 20000108 PARAMETER Experiment Name: Zm_Root-Tips_P Parameter: Age (day) Value: 12
  misc_feature: MA Experiment 20000108 PARAMETER Experiment Name: Zm_Root-Tips_P Parameter: Organism Value: Zea mays
  misc_feature: MA Experiment 20000108 PARAMETER Experiment Name: Zm_Root-Tips_P Parameter: Tissue Value: Root tips vs. Root mid region    35
  misc_feature: MA Experiment 20000108 PARAMETER Experiment Name: Zm_Root-Tips_P Parameter: Tissue Value: Root tips vs. Root mid region   Sequence Listing-Misc Features (4)

SEQ ID NO: 16773 - protein, 583 aa, Zea mays subsp. mays; identical to SEQ ID NO: 6066
  peptide (1)..(583): Ceres Seq. ID no. 12594597
  misc_feature (69)..(576): Pfam Name: TCP-1/cpn60 chaperonin family Pfam Description: TCP-1/cpn60 chaperonin family
  misc_feature (39)..(583): Homolog of NCBI NO: 24371053 NR Description: t-complex polypeptide 1 [Bruguiera sexangula]
  misc_feature (39)..(583): Homolog of NCBI NO: 25083339 NR Description: t-complex polypeptide 1 homologue [Arabidopsis
  misc_feature (39)..(583): Homolog of NCBI NO: 15231024 NR Description: t-complex polypeptide 1 homologue; protein id:
  misc_feature (39)..(583): Homolog of NCBI NO: 9293959 NR Description: chaperonin, t-complex protein alpha subunit
  misc_feature (40)..(580): Homolog of NCBI NO: 13959582 NR Description: T-complex protein 1, alpha subunit (TCP-1-alpha)
  misc_feature (48)..(582): Homolog of NCBI NO: 13959583 NR Description: T-complex protein 1, alpha subunit (TCP-1-alpha)
  misc_feature (48)..(583): Homolog of NCBI NO: 135536 NR Description: T-COMPLEX PROTEIN 1, ALPHA SUBUNIT (TCP-1-ALPHA)
  misc_feature (48)..(583): Homolog of NCBI NO: 135538 NR Description: T-complex protein 1, alpha subunit (TCP-1-alpha)
  misc_feature (48)..(583): Homolog of NCBI NO: 13540473 NR Description: t-complex 1; T-complex locus TCP-1; t-complex 1
  misc_feature (34)..(578): Homolog of NCBI NO: 17532601 NR Description: Chaperonin Containing TCP-1 CCT-1 (58.8 kD)

SEQ ID NO: 16774 - protein, 545 aa, Zea mays subsp. mays; identical to SEQ ID NO: 6067
  peptide (1)..(545): Ceres Seq. ID no. 12594598
  misc_feature (31)..(538): Pfam Name: TCP-1/cpn60 chaperonin family Pfam Description: TCP-1/cpn60 chaperonin family
  misc_feature (1)..(545): Homolog of NCBI NO: 24371053 NR Description: t-complex polypeptide 1 [Bruguiera sexangula]
  misc_feature (1)..(545): Homolog of NCBI NO: 25083339 NR Description: t-complex polypeptide 1 homologue [Arabidopsis
  misc_feature (1)..(545): Homolog of NCBI NO: 15231024 NR Description: t-complex polypeptide 1 homologue; protein id:
  misc_feature (1)..(545): Homolog of NCBI NO: 9293959 NR Description: chaperonin, t-complex protein alpha subunit
  misc_feature (2)..(542): Homolog of NCBI NO: 13959582 NR Description: T-complex protein 1, alpha subunit (TCP-1-alpha)
  misc_feature (10)..(544): Homolog of NCBI NO: 13959583 NR Description: T-complex protein 1, alpha subunit (TCP-1-alpha)
  misc_feature (10)..(545): Homolog of NCBI NO: 135536 NR Description: T-COMPLEX PROTEIN 1, ALPHA SUBUNIT (TCP-1-ALPHA)
  misc_feature (10)..(545): Homolog of NCBI NO: 135538 NR Description: T-complex protein 1, alpha subunit (TCP-1-alpha)
  misc_feature (10)..(545): Homolog of NCBI NO: 13540473 NR Description: t-complex 1; T-complex locus TCP-1; t-complex 1
  misc_feature (1)..(540): Homolog of NCBI NO: 17532601 NR Description: Chaperonin Containing TCP-1 CCT-1 (58.8 kD)

SEQ ID NO: 16775 - protein, 520 aa, Zea mays subsp. mays; identical to SEQ ID NO: 6068
  peptide (1)..(520): Ceres Seq. ID no. 12594599
  misc_feature (6)..(513): Pfam Name: TCP-1/cpn60 chaperonin family Pfam Description: TCP-1/cpn60 chaperonin family
  misc_feature (1)..(520): Homolog of NCBI NO: 24371053 NR Description: t-complex polypeptide 1 [Bruguiera sexangula]
  misc_feature (1)..(520): Homolog of NCBI NO: 25083339 NR Description: t-complex polypeptide 1 homologue [Arabidopsis
  misc_feature (1)..(520): Homolog of NCBI NO: 15231024 NR Description: t-complex polypeptide 1 homologue; protein id:
  misc_feature (1)..(520): Homolog of NCBI NO: 9293959 NR Description: chaperonin, t-complex protein alpha subunit
  misc_feature (1)..(517): Homolog of NCBI NO: 13959582 NR Description: T-complex protein 1, alpha subunit (TCP-1-alpha)
  misc_feature (1)..(519): Homolog of NCBI NO: 13959583 NR Description: T-complex protein 1, alpha subunit (TCP-1-alpha)
  misc_feature (1)..(520): Homolog of NCBI NO: 135536 NR Description: T-COMPLEX PROTEIN 1, ALPHA SUBUNIT (TCP-1-ALPHA)
  misc_feature (1)..(520): Homolog of NCBI NO: 135538 NR Description: T-complex protein 1, alpha subunit (TCP-1-alpha)
  misc_feature (1)..(520): Homolog of NCBI NO: 13540473 NR Description: t-complex 1; T-complex locus TCP-1; t-complex 1
  misc_feature (1)..(515): Homolog of NCBI NO: 17532601 NR Description: Chaperonin Containing TCP-1 CCT-1 (58.8 kD)

SEQ ID NO: 16776 - DNA, 1859 bp, Zea mays subsp. mays
  misc_feature (1)..(1859): Ceres Seq. ID no. 13492557
  misc_feature: MA Experiment ID: 108529 Result: Up-regulated in Transcription
  misc_feature: MA Experiment 108529 PARAMETER Experiment Name: Zm_Imbibed_Seeds_P Parameter: Age (day) Value: 5 vs. 2
  misc_feature: MA Experiment 108529 PARAMETER Experiment Name: Zm_Imbibed_Seeds_P Parameter: Organism Value: Zea mays
  misc_feature: MA Experiment 108529 PARAMETER Experiment Name: Zm_Imbibed_Seeds_P Parameter: Plant Line Value: 35A19
  misc_feature: MA Experiment 108529 PARAMETER Experiment Name: Zm_Imbibed_Seeds_P Parameter: Tissue Value: Roots vs. Embryo
  misc_feature: MA Experiment ID: 108535 Result: Down-regulated in Transcription
  misc_feature: MA Experiment 108535 PARAMETER Experiment Name: Zm_Meristem_P Parameter: Age (day) Value: 8
  misc_feature: MA Experiment 108535 PARAMETER Experiment Name: Zm_Meristem_P Parameter: Organism Value: Zea mays
  misc_feature: MA Experiment 108535 PARAMETER Experiment Name: Zm_Meristem_P Parameter: Plant Line Value: 35A19
  misc_feature: MA Experiment 108535 PARAMETER Experiment Name: Zm_Meristem_P Parameter: Tissue Value: Root Meristem vs. Above Root Meristem
  misc_feature: MA Experiment ID: 108687 Result: Down-regulated in Transcription
  misc_feature: MA Experiment 108687 PARAMETER Experiment Name: Zm_Embryos-Flowers__P Parameter: Tissue Value: Embryo vs. Aerial+
  misc_feature: MA Experiment ID: 20000535 Result: Down-regulated in Transcription
  misc_feature: MA Experiment 20000535 PARAMETER Experiment Name: Zm_Hybrid_Seed_Dev_P Parameter: DAP Value: 30 vs. 12
  misc_feature: MA Experiment 20000535 PARAMETER Experiment Name: Zm_Hybrid_Seed_Dev_P Parameter: Organism Value: Zea mays
  misc_feature: MA Experiment 20000535 PARAMETER Experiment Name: Zm_Hybrid_Seed_Dev_P Parameter: Plant Line Value: 35A19
  misc_feature: MA Experiment 20000535 PARAMETER Experiment Name: Zm_Hybrid_Seed_Dev_P Parameter: Tissue Value: Embryo vs. Unfert Floret
aaaactttagtctactcgtcctcggtcctcctcttctcgcagcagccagcagaccaatcgggacaagcaaactcccccgattagtttaagcagcccgggcccggcgacgaccagctccgttccgcgcggggatttaaacgcgcgaagcgagaaggcacgcagcaggcggcagcggcaagcaacgaacgcgatcgcgcgccgacgacgacgcgcggtgccggcgcctggtggtgccgtgttgcggactccgctgcatcgtctcggtcggtcgtcgtcgttatcatgggtgtccggctgccggtggcgtggtccgccgtcctcgtcctcctcgtgcgggcggccgtggcgcgggagtacgcggccatcttcaacttcggggactccctggtggacgccggcaacctggtggtggacggcatcccggactacctggccacggcgcgcctgccctacggcatgacccacttcggctaccccaccggccgctgctccgacggccgcctcgtcgttgacttcatcgcgcaggagctgggcgtgccgctgctgccgccgtccaaggcgaagaacgcgacgttccaccgcggcgccaacttcgcgatcacgggcgccacgtcgctggacacgcccttcttcgtggagcgcgggctggggaagacggtctggaactcggggtccctgcacacgcagatccagtggttccaggacatgaagcccaagctgtgcgggcaggagcaggagtgccgggacctgttccggcggtcgctgttcatcgtgggcgagttcggcgggaacgactacaactcgccgctgttcgcgttccggccgctggcggaggcgcacgacatggtgccgcacgtggtggagtccatcgggcggggcgtggagcggctgatcgcggagggcgccgcggagctggtggtgcccggggtgctccccatcggctgcttccccgtctacctctccatcttccgcaggcagccggccggcggctacggcgcccgcagcggctgcgtcaaggagctgaacacgctgtcgtgggtgcacaacgccgcgctgcgccgcaaggtcgaggagctccgcgccaggcaccccggcgtgcgcatcgtgtacgccgactactacacgccggccatccagttcgtcctccacgccgagaaatacgggatgctgaagcagacgccgcgggcgtgctgcggcgcgccgggcgtgggcgagtacaacttcaacctgacgtccaagtgcggcgagccgggggcgtacgcgtgcccggacccctccaaccactggagttgggacggcatccacctcacggaggccgcctacggccacatcgccaggggctggctctacgggcccttcgccgacccgcccatcctcgacgccaagcacctcggctaacgtcgtccatccaccgtcttctccagcgccggccccgcccgcacggccagtacagactactcctccggctctgggcgccgtcgtatgtgcgtccttattaccgacctgcaaaattggattggttgcttgtagtagaagtgtagagagagcgagacagagatagatgacaaacacgaaacgaaccggaaggaggacgataaggcgcgcgtgccggccggtcttttactcctctctgttcatagctgtcccatatcgtagtcaagaaaactgagcagggaaacaaaccgggcgatatttctgttgcatcttgctttgtttgagagtgtgcgtgcgtgtgcggccagctcgatctgaactcgataggcaggtgcgtcgcgtcgtggatgaactggtccgtggacgtgatcttgtttatttttttaaggagcaggtgttgtcaaaagtccatcgctaagatgtgc

SEQ ID NO: 16777 - protein, 371 aa, Zea mays subsp. mays
  peptide (1)..(371): Ceres Seq. ID no. 13492558
  misc_feature (28)..(354): Pfam Name: GDSL-like Lipase/Acylhydrolase Pfam Description: GDSL-like Lipase/Acylhydrolase
  misc_feature (28)..(354): Pfam Name: GDSL-like Lipase/Acylhydrolase Pfam Description: GDSL-like Lipase/Acylhydrolase
  misc_feature (27)..(351): Homolog of NCBI NO: 7486138 NR Description: hypothetical protein F25I24.160 - Arabidopsis
  misc_feature (27)..(351): Homolog of NCBI NO: 7486718 NR Description: hypothetical protein F8M12.9 - Arabidopsis
  misc_feature (27)..(351): Homolog of NCBI NO: 18413404 NR Description: GDSL-motif lipase/hydrolase protein [Arabidopsis
  misc_feature (103)..(352): Homolog of NCBI NO: 15237586 NR Description: GDSL-motif lipase/hydrolase protein [Arabidopsis
  misc_feature (24)..(362): Homolog of NCBI NO: 21553708 NR Description: GDSL-motif lipase/hydrolase-like protein
  misc_feature (27)..(351): Homolog of NCBI NO: 7486138 NR Description: hypothetical protein F25I24.160 - Arabidopsis
  misc_feature (27)..(351): Homolog of NCBI NO: 18413404 NR Description: GDSL-motif lipase/hydrolase protein [Arabidopsis
  misc_feature (24)..(362): Homolog of NCBI NO: 21553708 NR Description: GDSL-motif lipase/hydrolase-like protein
  misc_feature (3)..(369): Homolog of NCBI NO: 34903958 NR Description: OSJNBa0038J17.24 [Oryza sativa (japonica
  misc_feature (7)..(365): Homolog of NCBI NO: 34903956 NR Description: OSJNBa0038J17.23 [Oryza sativa (japonica
  misc_feature (27)..(367): Homolog of NCBI NO: 34903994 NR Description: unnamed protein product [Oryza sativa (japonica
  misc_feature (6)..(367): Homolog of NCBI NO: 34903996 NR Description: unnamed protein product [Oryza sativa (japonica
  misc_feature (24)..(362): Homolog of NCBI NO: 15242538 NR Description: GDSL-motif lipase/hydrolase protein [Arabidopsis
  misc_feature (103)..(352): Homolog of NCBI NO: 15237586 NR Description: GDSL-motif lipase/hydrolase protein [Arabidopsis
  misc_feature (27)..(351): Homolog of NCBI NO: 7486718 NR Description: hypothetical protein F8M12.9 - Arabidopsis
  misc_feature (24)..(362): Homolog of NCBI NO: 15242538 NR Description: GDSL-motif lipase/hydrolase protein [Arabidopsis
  misc_feature (6)..(367): Homolog of NCBI NO: 34903996 NR Description: unnamed protein product [Oryza sativa (japonica
  misc_feature (27)..(367): Homolog of NCBI NO: 34903994 NR Description: unnamed protein product [Oryza sativa (japonica
  misc_feature (7)..(365): Homolog of NCBI NO: 34903956 NR Description: OSJNBa0038J17.23 [Oryza sativa (japonica
  misc_feature (3)..(369): Homolog of NCBI NO: 34903958 NR Description: OSJNBa0038J17.24 [Oryza sativa (japonica
MGVRLPVAWSAVLVLLVRAAVAREYAAIFNFGDSLVDAGNLVVDGIPDYLATARLPYGMTHFGYPTGRCSDGRLVVDFIAQELGVPLLPPSKAKNATFHRGANFAITGATSLDTPFFVERGLGKTVWNSGSLHTQIQWFQDMKPKLCGQEQECRDLFRRSLFIVGEFGGNDYNSPLFAFRPLAEAHDMVPHVVESIGRGVERLIAEGAAELVVPGVLPIGCFPVYLSIFRRQPAGGYGARSGCVKELNTLSWVHNAALRRKVEELRARHPGVRIVYADYYTPAIQFVLHAEKYGMLKQTPRACCGAPGVGEYNFNLTSKCGEPGAYACPDPSNHWSWDGIHLTEAAYGHIARGWLYGPFADPPILDAKHLG

SEQ ID NO: 16778 - protein, 313 aa, Zea mays subsp. mays
  peptide (1)..(313): Ceres Seq. ID no. 13492559
  misc_feature (1)..(296): Pfam Name: GDSL-like Lipase/Acylhydrolase Pfam Description: GDSL-like Lipase/Acylhydrolase
  misc_feature (1)..(296): Pfam Name: GDSL-like Lipase/Acylhydrolase Pfam Description: GDSL-like Lipase/Acylhydrolase
  misc_feature (1)..(293): Homolog of NCBI NO: 7486138 NR Description: hypothetical protein F25I24.160 - Arabidopsis
  misc_feature (1)..(293): Homolog of NCBI NO: 7486718 NR Description: hypothetical protein F8M12.9 - Arabidopsis
  misc_feature (1)..(293): Homolog of NCBI NO: 18413404 NR Description: GDSL-motif lipase/hydrolase protein [Arabidopsis
  misc_feature (45)..(294): Homolog of NCBI NO: 15237586 NR Description: GDSL-motif lipase/hydrolase protein [Arabidopsis
  misc_feature (1)..(304): Homolog of NCBI NO: 21553708 NR Description: GDSL-motif lipase/hydrolase-like protein
  misc_feature (1)..(293): Homolog of NCBI NO: 7486138 NR Description: hypothetical protein F25I24.160 - Arabidopsis
  misc_feature (1)..(293): Homolog of NCBI NO: 18413404 NR Description: GDSL-motif lipase/hydrolase protein [Arabidopsis
  misc_feature (1)..(304): Homolog of NCBI NO: 21553708 NR Description: GDSL-motif lipase/hydrolase-like protein
  misc_feature (1)..(311): Homolog of NCBI NO: 34903958 NR Description: OSJNBa0038J17.24 [Oryza sativa (japonica
  misc_feature (1)..(307): Homolog of NCBI NO: 34903956 NR Description: OSJNBa0038J17.23 [Oryza sativa (japonica
  misc_feature (1)..(309): Homolog of NCBI NO: 34903994 NR Description: unnamed protein product [Oryza sativa (japonica
  misc_feature (1)..(309): Homolog of NCBI NO: 34903996 NR Description: unnamed protein product [Oryza sativa (japonica
  misc_feature (1)..(304): Homolog of NCBI NO: 15242538 NR Description: GDSL-motif lipase/hydrolase protein [Arabidopsis
  misc_feature (45)..(294): Homolog of NCBI NO: 15237586 NR Description: GDSL-motif lipase/hydrolase protein [Arabidopsis
  misc_feature (1)..(293): Homolog of NCBI NO: 7486718 NR Description: hypothetical protein F8M12.9 - Arabidopsis
  misc_feature (1)..(304): Homolog of NCBI NO: 15242538 NR Description: GDSL-motif lipase/hydrolase protein [Arabidopsis
  misc_feature (1)..(309): Homolog of NCBI NO: 34903996 NR Description: unnamed protein product [Oryza sativa (japonica
  misc_feature (1)..(309): Homolog of NCBI NO: 34903994 NR Description: unnamed protein product [Oryza sativa (japonica
  misc_feature (1)..(307): Homolog of NCBI NO: 34903956 NR Description: OSJNBa0038J17.23 [Oryza sativa (japonica
  misc_feature (1)..(311): Homolog of NCBI NO: 34903958 NR Description: OSJNBa0038J17.24 [Oryza sativa (japonica
MTHFGYPTGRCSDGRLVVDFIAQELGVPLLPPSKAKNATFHRGANFAITGATSLDTPFFVERGLGKTVWNSGSLHTQIQWFQDMKPKLCGQEQECRDLFRRSLFIVGEFGGNDYNSPLFAFRPLAEAHDMVPHVVESIGRGVERLIAEGAAELVVPGVLPIGCFPVYLSIFRRQPAGGYGARSGCVKELNTLSWVHNAALRRKVEELRARHPGVRIVYADYYTPAIQFVLHAEKYGMLKQTPRACCGAPGVGEYNFNLTSKCGEPGAYACPDPSNHWSWDGIHLTEAAYGHIARGWLYGPFADPPILDAKHLG

SEQ ID NO: 16779 - protein, 230 aa, Zea mays subsp. mays
  peptide (1)..(230): Ceres Seq. ID no. 13492560
  misc_feature (1)..(213): Pfam Name: GDSL-like Lipase/Acylhydrolase Pfam Description: GDSL-like Lipase/Acylhydrolase
  misc_feature (1)..(213): Pfam Name: GDSL-like Lipase/Acylhydrolase Pfam Description: GDSL-like Lipase/Acylhydrolase
  misc_feature (1)..(210): Homolog of NCBI NO: 7486138 NR Description: hypothetical protein F25I24.160 - Arabidopsis
  misc_feature (1)..(210): Homolog of NCBI NO: 7486718 NR Description: hypothetical protein F8M12.9 - Arabidopsis
  misc_feature (1)..(210): Homolog of NCBI NO: 18413404 NR Description: GDSL-motif lipase/hydrolase protein [Arabidopsis
  misc_feature (1)..(211): Homolog of NCBI NO: 15237586 NR Description: GDSL-motif lipase/hydrolase protein [Arabidopsis
  misc_feature (1)..(221): Homolog of NCBI NO: 21553708 NR Description: GDSL-motif lipase/hydrolase-like protein
  misc_feature (1)..(210): Homolog of NCBI NO: 7486138 NR Description: hypothetical protein F25I24.160 - Arabidopsis
  misc_feature (1)..(210): Homolog of NCBI NO: 18413404 NR Description: GDSL-motif lipase/hydrolase protein [Arabidopsis
  misc_feature (1)..(221): Homolog of NCBI NO: 21553708 NR Description: GDSL-motif lipase/hydrolase-like protein
  misc_feature (1)..(228): Homolog of NCBI NO: 34903958 NR Description: OSJNBa0038J17.24 [Oryza sativa (japonica
  misc_feature (1)..(224): Homolog of NCBI NO: 34903956 NR Description: OSJNBa0038J17.23 [Oryza sativa (japonica
  misc_feature (1)..(226): Homolog of NCBI NO: 34903994 NR Description: unnamed protein product [Oryza sativa (japonica
  misc_feature (1)..(226): Homolog of NCBI NO: 34903996 NR Description: unnamed protein product [Oryza sativa (japonica
  misc_feature (1)..(221): Homolog of NCBI NO: 15242538 NR Description: GDSL-motif lipase/hydrolase protein [Arabidopsis
  misc_feature (1)..(211): Homolog of NCBI NO: 15237586 NR Description: GDSL-motif lipase/hydrolase protein [Arabidopsis
  misc_feature (1)..(210): Homolog of NCBI NO: 7486718 NR Description: hypothetical protein F8M12.9 - Arabidopsis
  misc_feature (1)..(221): Homolog of NCBI NO: 15242538 NR Description: GDSL-motif lipase/hydrolase protein [Arabidopsis
  misc_feature (1)..(226): Homolog of NCBI NO: 34903996 NR Description: unnamed protein product [Oryza sativa (japonica
  misc_feature (1)..(226): Homolog of NCBI NO: 34903994 NR Description: unnamed protein product [Oryza sativa (japonica
  misc_feature (1)..(224): Homolog of NCBI NO: 34903956 NR Description: OSJNBa0038J17.23 [Oryza sativa (japonica
  misc_feature (1)..(228): Homolog of NCBI NO: 34903958 NR Description: OSJNBa0038J17.24 [Oryza sativa (japonica
MKPKLCGQEQECRDLFRRSLFIVGEFGGNDYNSPLFAFRPLAEAHDMVPHVVESIGRGVERLIAEGAAELVVPGVLPIGCFPVYLSIFRRQPAGGYGARSGCVKELNTLSWVHNAALRRKVEELRARHPGVRIVYADYYTPAIQFVLHAEKYGMLKQTPRACCGAPGVGEYNFNLTSKCGEPGAYACPDPSNHWSWDGIHLTEAAYGHIARGWLYGPFADPPILDAKHLG

SEQ ID NO: 16780 - DNA, 2177 bp, Zea mays subsp. mays
  misc_feature (1)..(2177): Ceres Seq. ID no. 13492553
  misc_feature: MA Experiment ID: 108522 Result: Down-regulated in Transcription
  misc_feature: MA Experiment 108522 PARAMETER Experiment Name: Zm_42deg_Heat_P Parameter: Age (day) Value: 8
  misc_feature: MA Experiment 108522 PARAMETER Experiment Name: Zm_42deg_Heat_P Parameter: Organism Value: Zea mays
  misc_feature: MA Experiment 108522 PARAMETER Experiment Name: Zm_42deg_Heat_P Parameter: Plant Line Value: 35A19
  misc_feature: MA Experiment 108522 PARAMETER Experiment Name: Zm_42deg_Heat_P Parameter: Temperature (deg C) Value: 42 vs. 22
  misc_feature: MA Experiment 108522 PARAMETER Experiment Name: Zm_42deg_Heat_P Parameter: Timepoint (hr) Value: 1
  misc_feature: MA Experiment 108522 PARAMETER Experiment Name: Zm_42deg_Heat_P Parameter: Tissue Value: Aerial
  misc_feature: MA Experiment ID: 108535 Result: Down-regulated in Transcription
  misc_feature: MA Experiment 108535 PARAMETER Experiment Name: Zm_Meristem_P Parameter: Age (day) Value: 8
  misc_feature: MA Experiment 108535 PARAMETER Experiment Name: Zm_Meristem_P Parameter: Organism Value: Zea mays
  misc_feature: MA Experiment 108535 PARAMETER Experiment Name: Zm_Meristem_P Parameter: Plant Line Value: 35A19
  misc_feature: MA Experiment 108535 PARAMETER Experiment Name: Zm_Meristem_P Parameter: Tissue Value: Root Meristem vs. Above Root Meristem
  misc_feature: MA Experiment ID: 20000535 Result: Down-regulated in Transcription
  misc_feature: MA Experiment 20000535 PARAMETER Experiment Name: Zm_Hybrid_Seed_Dev_P Parameter: DAP Value: 30 vs. 12
  misc_feature: MA Experiment 20000535 PARAMETER Experiment Name: Zm_Hybrid_Seed_Dev_P Parameter: Organism Value: Zea mays
  misc_feature: MA Experiment 20000535 PARAMETER Experiment Name: Zm_Hybrid_Seed_Dev_P Parameter: Plant Line Value: 35A19
  misc_feature: MA Experiment 20000535 PARAMETER Experiment Name: Zm_Hybrid_Seed_Dev_P Parameter: Tissue Value: Embryo vs. Unfert Floret
cttcccactccactccgcgttttcaaaaatcaaaaccccagccggaacagcgaaaccccttccaccatagcccgtaggaaacggagcagcggttgcggtttctctctccgtcgctctcaccgctcgccgccgtctccgtatccggtccgcaaggcgggcctggcgtcaaggtcctccgctccgtccccttcactcgcgaccggagtcccctcttcgttggttcgccaatctacttcgtcggcccaccccttttcccccgatcgatctctccttctcgctaagcgaactatcttgacctccctccctcgtgcgagattagccagtagaaagttccccgcttttcacccaggcacacttccaccacctcgctttgctgcttcactgcttgcttctgttgggcggagtgctaagaggacggcacgggagtcaagattcctcctccttaacctgccctttcgtgttgccgttgttggtggtttggtttgtgattgcggtggcgctggagttgcggtgtgtgtgaagcgagggatccgagattcttgtggattctgttctacttttcgattgctgctgatcctctctcccgtgcgacggcacaagcggcggtgtggggagagcatccgccgttgcccggccttggagggccccggtccgtctatggaacttgccgccccggtgccacgccccggcccggaactgaagtgctcagcaaggcgcttcttgcctgccactctcacgctgctggtgcctactgtggcagtcccctgtttggttcctgctcctcactgaccggctacggggctgcgataatggtgcctcagatggtgctgctcctttgctgctgccttctggcgttcccgccacatggtccgttagtcgttgaggcttttgtaggcggttatggagtaaactatgggagaatagcaaacaacatcccttcccctgacaaagtggtggagctcctgaggagagcaaagataaggaatgttaagatatacgactctgaccacagcgttctcgatgcgttcaaagggtctgggatcaatctggtcatcgcaatccccaatgagctcgtcaaggatatggctgcaaacacgagccgttcaatggactggctaaatcaaaatgtgcagccttatctccctcagacgcgcatcgttgggatcactgtgggaaatgaggtgctcggaggccaagatcaaagcttgtatcagccacttgttgatgctgtgaagaatgtgtatgatgggctcaagaggctccacttggagagaaaaattgagcttttcacacctcattcggaagctgtttttgctacttcttatccaccctccgcatgtgtgttcaaggaggaactcatgccatacatgaaacctcttctcgacttctttgcaatgattggctcacctttctatgtcaacgcatacccctttttggcttacataagtgatcctgaacatatcgatatcaattatgctctctttaaacccaacaaaggaataattgatccaaataatagcctgcactatgacaatatgtttgatgctcaggtagatgcagcttatgctgctctacatgctgctggttatgataacatggaggttcgtgtggcagagactggttgggcttctagtggggatcaaaatgaagcaggagcttcatctgagaatgcaaggacgtacaatttcaatcttcgtaaacggctatttctgaggaccggaactcctctgaagccaaagagaccagtcaaagcgtatatatttgcattgtttaatgagaatcagaagcctggagctggctctgagaggcattatgggctgttccttcctgatgggaggatttcatatgacatcggtgtctcaggtctactaccttcatctgcatcctcatccgtgctgtccattaagaatgttcaagctgggggttggattttacagcattgggctacagttcttttatgttgttttcattttttgggggccatagtgacttgaggacggcataacacatccgtagtaaagggtgcaattgagcaagttagaatgttgctattgggaaattcacaatgaaaatccaaataatagtaccgctgcaataatctcttctcctgaggctgtcctgctttgctgcttaaaaccgtactcagttattgttctaaaaaatgattcatacctgct

SEQ ID NO: 16781 - protein, 394 aa, Zea mays subsp. mays
  peptide (1)..(394): Ceres Seq. ID no. 13492554
  misc_feature (31)..(349): Pfam Name: Glycosyl hydrolases family 17 Pfam Description: Glycosyl hydrolases family 17
  misc_feature (31)..(349): Pfam Name: Glycosyl hydrolases family 17 Pfam Description: Glycosyl hydrolases family 17
  misc_feature (92)..(369): Homolog of NCBI NO: 30683187 NR Description: glycosyl hydrolase family 17 [Arabidopsis
  misc_feature (30)..(366): Homolog of NCBI NO: 25316425 NR Description: probable beta-1,3-glucanase [imported] -
  misc_feature (30)..(366): Homolog of NCBI NO: 18401444 NR Description: glycosyl hydrolase family 17 [Arabidopsis
  misc_feature (92)..(369): Homolog of NCBI NO: 26452328 NR Description: putative beta-1,3-glucanase [Arabidopsis
  misc_feature (29)..(362): Homolog of NCBI NO: 15209173 NR Description: putative elicitor inducible chitinase [Solanum
  misc_feature (92)..(369): Homolog of NCBI NO: 30683187 NR Description: glycosyl hydrolase family 17 [Arabidopsis
  misc_feature (30)..(366): Homolog of NCBI NO: 18401444 NR Description: glycosyl hydrolase family 17 [Arabidopsis
  misc_feature (29)..(362): Homolog of NCBI NO: 15209173 NR Description: putative elicitor inducible chitinase [Solanum
  misc_feature (26)..(369): Homolog of NCBI NO: 18401187 NR Description: glycosyl hydrolase family 17 [Arabidopsis
  misc_feature (26)..(369): Homolog of NCBI NO: 21618052 NR Description: putative beta-1,3-glucanase [Arabidopsis thaliana]
  misc_feature (26)..(366): Homolog of NCBI NO: 7447981 NR Description: probable beta-1,3-glucanase At2g26600
  misc_feature (13)..(389): Homolog of NCBI NO: 15232696 NR Description: glycosyl hydrolase family 17 [Arabidopsis
  misc_feature (26)..(389): Homolog of NCBI NO: 11994352 NR Description: beta-1,3-glucanase-like protein [Arabidopsis
  misc_feature (92)..(369): Homolog of NCBI NO: 26452328 NR Description: putative beta-1,3-glucanase [Arabidopsis
  misc_feature (30)..(366): Homolog of NCBI NO: 25316425 NR Description: probable beta-1,3-glucanase [imported] -
  misc_feature (26)..(389): Homolog of NCBI NO: 11994352 NR Description: beta-1,3-glucanase-like protein [Arabidopsis
  misc_feature (13)..(389): Homolog of NCBI NO: 15232696 NR Description: glycosyl hydrolase family 17 [Arabidopsis
  misc_feature (26)..(366): Homolog of NCBI NO: 7447981 NR Description: probable beta-1,3-glucanase At2g26600
  misc_feature (26)..(369): Homolog of NCBI NO: 21618052 NR Description: putative beta-1,3-glucanase [Arabidopsis thaliana]
  misc_feature (26)..(369): Homolog of NCBI NO: 18401187 NR Description: glycosyl hydrolase family 17 [Arabidopsis
MVPQMVLLLCCCLLAFPPHGPLVVEAFVGGYGVNYGRIANNIPSPDKVVELLRRAKIRNVKIYDSDHSVLDAFKGSGINLVIAIPNELVKDMAANTSRSMDWLNQNVQPYLPQTRIVGITVGNEVLGGQDQSLYQPLVDAVKNVYDGLKRLHLERKIELFTPHSEAVFATSYPPSACVFKEELMPYMKPLLDFFAMIGSPFYVNAYPFLAYISDPEHIDINYALFKPNKGIIDPNNSLHYDNMFDAQVDAAYAALHAAGYDNMEVRVAETGWASSGDQNEAGASSENARTYNFNLRKRLFLRTGTPLKPKRPVKAYIFALFNENQKPGAGSERHYGLFLPDGRISYDIGVSGLLPSSASSSVLSIKNVQAGGWILQHWATVLLCCFHFLGAIVT

SEQ ID NO: 16782 - protein, 390 aa, Zea mays subsp. mays
  peptide (1)..(390): Ceres Seq. ID no. 13492555
  misc_feature (27)..(345): Pfam Name: Glycosyl hydrolases family 17 Pfam Description: Glycosyl hydrolases family 17
  misc_feature (27)..(345): Pfam Name: Glycosyl hydrolases family 17 Pfam Description: Glycosyl hydrolases family 17
  misc_feature (88)..(365): Homolog of NCBI NO: 30683187 NR Description: glycosyl hydrolase family 17 [Arabidopsis
  misc_feature (26)..(362): Homolog of NCBI NO: 25316425 NR Description: probable beta-1,3-glucanase [imported] -
  misc_feature (26)..(362): Homolog of NCBI NO: 18401444 NR Description: glycosyl hydrolase family 17 [Arabidopsis
  misc_feature (88)..(365): Homolog of NCBI NO: 26452328 NR Description: putative beta-1,3-glucanase [Arabidopsis
  misc_feature (25)..(358): Homolog of NCBI NO: 15209173 NR Description: putative elicitor inducible chitinase [Solanum
  misc_feature (88)..(365): Homolog of NCBI NO: 26452328 NR Description: putative beta-1,3-glucanase [Arabidopsis
  misc_feature (22)..(385): Homolog of NCBI NO: 11994352 NR Description: beta-1,3-glucanase-like protein [Arabidopsis
  misc_feature (22)..(362): Homolog of NCBI NO: 7447981 NR Description: probable beta-1,3-glucanase At2g26600
  misc_feature (26)..(362): Homolog of NCBI NO: 18401444 NR Description: glycosyl hydrolase family 17 [Arabidopsis
  misc_feature (26)..(362): Homolog of NCBI NO: 25316425 NR Description: probable beta-1,3-glucanase [imported] -
  misc_feature (88)..(365): Homolog of NCBI NO: 30683187 NR Description: glycosyl hydrolase family 17 [Arabidopsis
  misc_feature (22)..(365): Homolog of NCBI NO: 18401187 NR Description: glycosyl hydrolase family 17 [Arabidopsis
  misc_feature (22)..(365): Homolog of NCBI NO: 21618052 NR Description: putative beta-1,3-glucanase [Arabidopsis thaliana]
  misc_feature (9)..(385): Homolog of NCBI NO: 15232696 NR Description: glycosyl hydrolase family 17 [Arabidopsis
  misc_feature (25)..(358): Homolog of NCBI NO: 15209173 NR Description: putative elicitor inducible chitinase [Solanum
  misc_feature (22)..(385): Homolog of NCBI NO: 11994352 NR Description: beta-1,3-glucanase-like protein [Arabidopsis
  misc_feature (9)..(385): Homolog of NCBI NO: 15232696 NR Description: glycosyl hydrolase family 17 [Arabidopsis
  misc_feature (22)..(362): Homolog of NCBI NO: 7447981 NR Description: probable beta-1,3-glucanase At2g26600
  misc_feature (22)..(365): Homolog of NCBI NO: 21618052 NR Description: putative beta-1,3-glucanase [Arabidopsis thaliana]
  misc_feature (22)..(365): Homolog of NCBI NO: 18401187 NR Description: glycosyl hydrolase family 17 [Arabidopsis
MVLLLCCCLLAFPPHGPLVVEAFVGGYGVNYGRIANNIPSPDKVVELLRRAKIRNVKIYDSDHSVLDAFKGSGINLVIAIPNELVKDMAANTSRSMDWLNQNVQPYLPQTRIVGITVGNEVLGGQDQSLYQPLVDAVKNVYDGLKRLHLERKIELFTPHSEAVFATSYPPSACVFKEELMPYMKPLLDFFAMIGSPFYVNAYPFLAYISDPEHIDINYALFKPNKGIIDPNNSLHYDNMFDAQVDAAYAALHAAGYDNMEVRVAETGWASSGDQNEAGASSENARTYNFNLRKRLFLRTGTPLKPKRPVKAYIFALFNENQKPGAGSERHYGLFLPDGRISYDIGVSGLLPSSASSSVLSIKNVQAGGWILQHWATVLLCCFHFLGAIVT

SEQ ID NO: 16783 - protein, 303 aa, Zea mays subsp. mays
  peptide (1)..(303): Ceres Seq. ID no. 13492556
  misc_feature (1)..(258): Pfam Name: Glycosyl hydrolases family 17 Pfam Description: Glycosyl hydrolases family 17
  misc_feature (1)..(258): Pfam Name: Glycosyl hydrolases family 17 Pfam Description: Glycosyl hydrolases family 17
  misc_feature (1)..(278): Homolog of NCBI NO: 30683187 NR Description: glycosyl hydrolase family 17 [Arabidopsis
  misc_feature (1)..(275): Homolog of NCBI NO: 25316425 NR Description: probable beta-1,3-glucanase [imported] -
  misc_feature (1)..(275): Homolog of NCBI NO: 18401444 NR Description: glycosyl hydrolase family 17 [Arabidopsis
  misc_feature (1)..(278): Homolog of NCBI NO: 26452328 NR Description: putative beta-1,3-glucanase [Arabidopsis
  misc_feature (1)..(271): Homolog of NCBI NO: 15209173 NR Description: putative elicitor inducible chitinase [Solanum
  misc_feature (1)..(278): Homolog of NCBI NO: 30683187 NR Description: glycosyl hydrolase family 17 [Arabidopsis
  misc_feature (1)..(275): Homolog of NCBI NO: 18401444 NR Description: glycosyl hydrolase family 17 [Arabidopsis
  misc_feature (1)..(271): Homolog of NCBI NO: 15209173 NR Description: putative elicitor inducible chitinase [Solanum
  misc_feature (1)..(278): Homolog of NCBI NO: 18401187 NR Description: glycosyl hydrolase family 17 [Arabidopsis
  misc_feature (1)..(278): Homolog of NCBI NO: 21618052 NR Description: putative beta-1,3-glucanase [Arabidopsis thaliana]
  misc_feature (1)..(275): Homolog of NCBI NO: 7447981 NR Description: probable beta-1,3-glucanase At2g26600
  misc_feature (1)..(298): Homolog of NCBI NO: 15232696 NR Description: glycosyl hydrolase family 17 [Arabidopsis
  misc_feature (1)..(298): Homolog of NCBI NO: 11994352 NR Description: beta-1,3-glucanase-like protein [Arabidopsis
  misc_feature (1)..(278): Homolog of NCBI NO: 26452328 NR Description: putative beta-1,3-glucanase [Arabidopsis
  misc_feature (1)..(275): Homolog of NCBI NO: 25316425 NR Description: probable beta-1,3-glucanase [imported] -
  misc_feature (1)..(298): Homolog of NCBI NO: 11994352 NR Description: beta-1,3-glucanase-like protein [Arabidopsis
  misc_feature (1)..(298): Homolog of NCBI NO: 15232696 NR Description: glycosyl hydrolase family 17 [Arabidopsis
  misc_feature (1)..(275): Homolog of NCBI NO: 7447981 NR Description: probable beta-1,3-glucanase At2g26600
  misc_feature (1)..(278): Homolog of NCBI NO: 21618052 NR Description: putative beta-1,3-glucanase [Arabidopsis thaliana]
  misc_feature (1)..(278): Homolog of NCBI NO: 18401187 NR Description: glycosyl hydrolase family 17 [Arabidopsis
MAANTSRSMDWLNQNVQPYLPQTRIVGITVGNEVLGGQDQSLYQPLVDAVKNVYDGLKRLHLERKIELFTPHSEAVFATSYPPSACVFKEELMPYMKPLLDFFAMIGSPFYVNAYPFLAYISDPEHIDINYALFKPNKGIIDPNNSLHYDNMFDAQVDAAYAALHAAGYDNMEVRVAETGWASSGDQNEAGASSENARTYNFNLRKRLFLRTGTPLKPKRPVKAYIFALFNENQKPGAGSERHYGLFLPDGRISYDIGVSGLLPSSASSSVLSIKNVQAGGWILQHWATVLLCCFHFLGAIVT

SEQ ID NO: 16784 - DNA, 1994 bp, Zea mays subsp. mays
  misc_feature (1)..(1994): Ceres Seq. ID no. 12368255
  misc_feature: MA Experiment ID: 108527 Result: Up-regulated in Transcription
  misc_feature: MA Experiment 108527 PARAMETER Experiment Name: Zm_5mM_NO_P Parameter: Age (day) Value: 8
  misc_feature: MA Experiment 108527 PARAMETER Experiment Name: Zm_5mM_NO_P Parameter: Organism Value: Zea mays
  misc_feature: MA Experiment 108527 PARAMETER Experiment Name: Zm_5mM_NO_P Parameter: Plant Line Value: 35A19
  misc_feature: MA Experiment 108527 PARAMETER Experiment Name: Zm_5mM_NO_P Parameter: Timepoint (hr) Value: 6
  misc_feature: MA Experiment 108527 PARAMETER Experiment Name: Zm_5mM_NO_P Parameter: Tissue Value: Aerial
  misc_feature: MA Experiment 108527 PARAMETER Experiment Name: Zm_5mM_NO_P Parameter: Treatment Value: 5mM NO vs. No Treatment
  misc_feature: MA Experiment ID: 108535 Result: Down-regulated in Transcription
  misc_feature: MA Experiment 108535 PARAMETER Experiment Name: Zm_Meristem_P Parameter: Age (day) Value: 8
  misc_feature: MA Experiment 108535 PARAMETER Experiment Name: Zm_Meristem_P Parameter: Organism Value: Zea mays
  misc_feature: MA Experiment 108535 PARAMETER Experiment Name: Zm_Meristem_P Parameter: Plant Line Value: 35A19
  misc_feature: MA Experiment 108535 PARAMETER Experiment Name: Zm_Meristem_P Parameter: Tissue Value: Root Meristem vs. Above Root Meristem
aacccacccaccgcgaaaccttcctccctctccttctctgtccccttctctcccctcctctcctccgccgctcgacagcctactctccaagccaggagaacccaacccggccagccccacacgcacacgcccacgcccacgcccacgcagccgcggcggaggccatccggcgggcgtccatgggctgctgcggctcctcgctacgggcggggacgcagccggagaagaagccggcggcgggggcgctgcccccgcgccgcccctcctactcgctgagccagaaccagaaccaggcgccgccggcagcccgcgcgggcgcccaccaggtgccgccgctcagggagttctcgctggcggagctgcgcgccgccacggccggcttcgcgccggacaacatcgtgtccgagagcggcgacaaggcgccgaatttcgtgtacaggggccgcctcgagcccagccgccgcgcgatcgccgtcaagaagttcgccaagatggcgtggcccgaccccaagcagttcgcggaggaggccaagggggtcgggaagctgcgccaccgccgcctggccaacctgatcggctactgctgcgacggcgaggagcgcctgctcgtcgccgagttcatgcccaacgacacgctcgccaagcacctcttccactgggaaaaccagacaattgaatgggctatgcgcctgagagttgcatactacatcgctgaagcactggaatattgtagcaccgaaggaaggcctttgtatcatgacctaaatgcatatagggtcctctttgatgagaatggtgatcctcgtctttcatgctttggcctgatgaaaaacagcagggatgggaaaagctatagcacaaaccttgcatatacacctccagaatatttgagaaatggaagagtaacatcagaaagtgtcatattcagctttggcactatactgctggacctcctaagtggaaaacgtatacctccatcccgtgctcttgatatgataaaaggcaacaatatccaagtactgatggattcacatctggagggaaactactcaacagaagaggcaaccacattggttgaccttgcctctcagtgcctacagtacgaacctagggatcgtcccaacactaaaaagctggtttccgtacttgagcccttgcaaataaaatcagaggtaccatcctacgagatgcttggcattccgaagcatgaagaagaagcacctccccctccacaaccgcaacaccctctttctcccatgggcgaggcctgttccaggatggatctgactgccatccatcagattctagtgaacacgcattacagggatgatgaagggagcaacgagctatcgttccaggaatggacgcagcagatgagggacatgctggaagctaggaaacgtgggtactttgctttccgtgacaaagatttcaaggcagccatagactgctacacgcagttcgtcgacgtggggacgatggtgtcgccaacagtgtacgcgaggcggagcttgtgccacctcatgtgcgaccagcctgacgccgccctccgtgacgccatgcaagcgcagtgcgcgtacccagattggccaaccgcgttctacatgcaggccgtcgcgctctcgaagctgaacatgcagagcgacgctacggacatgctgaacgaggcgtcgcagctcgaagagaagcggcagaagaacacgaaaccttgatgaaagaccagacccctctctctcgtcccggggttacggtccttctgcggctcaaataggtttgtgttgagacatgctgctcggtccttccgaaacattgtggttagttcctggtgcaagggttgggttgggacttgggaatgttaactggggggaatgtgctgtagagtaactacctggtttggcatttctgtgatgcatttttttggggcccgtgtacatgttacactgacaaaagtagtcgaaacagccagaatgcaagggaatttaattctggttatc

SEQ ID NO: 16785 - protein, 569 aa, Zea mays subsp. mays
  peptide (1)..(569): Ceres Seq. ID no. 12368256
  misc_feature (108)..(566): Homolog of NCBI NO: 28393210 NR Description: putative protein kinase [Arabidopsis thaliana]
  misc_feature (108)..(566): Homolog of NCBI NO: 15237465 NR Description: protein kinase-like protein; protein id:
  misc_feature (103)..(563): Homolog of NCBI NO: 15237604 NR Description: protein kinase-like; protein id: At5g41260.1
  misc_feature (87)..(563): Homolog of NCBI NO: 21553556 NR Description: protein kinase-like protein [Arabidopsis thaliana]
  misc_feature (87)..(563): Homolog of NCBI NO: 15232406 NR Description: protein kinase -like protein
  misc_feature (87)..(566): Homolog of NCBI NO: 22327962 NR Description: protein kinase - like
  misc_feature (60)..(566): Homolog of NCBI NO: 37537032 NR Description: putative protein kinase [Oryza sativa (japonica
  misc_feature (60)..(565): Homolog of NCBI NO: 7486022 NR Description: hypothetical protein F23E12.210 - Arabidopsis
  misc_feature (60)..(565): Homolog of NCBI NO: 18418600 NR Description: putative protein
  misc_feature (60)..(568): Homolog of NCBI NO: 37536550 NR Description: protein kinase-like protein
PTHRETFLPLLLCPLLSPPLLRRSTAYSPSQENPTRPAPHAHAHAHAHAAAAEAIRRASMGCCGSSLRAGTQPEKKPAAGALPPRRPSYSLSQNQNQAPPAARAGAHQVPPLREFSLAELRAATAGFAPDNIVSESGDKAPNFVYRGRLEPSRRAIAVKKFAKMAWPDPKQFAEEAKGVGKLRHRRLANLIGYCCDGEERLLVAEFMPNDTLAKHLFHWENQTIEWAMRLRVAYYIAEALEYCSTEGRPLYHDLNAYRVLFDENGDPRLSCFGLMKNSRDGKSYSTNLAYTPPEYLRNGRVTSESVIFSFGTILLDLLSGKRIPPSRALDMIKGNNIQVLMDSHLEGNYSTEEATTLVDLASQCLQYEPRDRPNTKKLVSVLEPLQIKSEVPSYEMLGIPKHEEEAPPPPQPQHPLSPMGEACSRMDLTAIHQILVNTHYRDDEGSNELSFQEWTQQMRDMLEARKRGYFAFRDKDFKAAIDCYTQFVDVGTMVSPTVYARRSLCHLMCDQPDAALRDAMQAQCAYPDWPTAFYMQAVALSKLNMQSDATDMLNEASQLEEKRQKNTKP

SEQ ID NO: 16786 - protein, 510 aa, Zea mays subsp. mays
  peptide (1)..(510): Ceres Seq. ID no. 12368257
  misc_feature (49)..(507): Homolog of NCBI NO: 28393210 NR Description: putative protein kinase [Arabidopsis thaliana]
  misc_feature (49)..(507): Homolog of NCBI NO: 15237465 NR Description: protein kinase-like protein; protein id:
  misc_feature (44)..(504): Homolog of NCBI NO: 15237604 NR Description: protein kinase-like; protein id: At5g41260.1
  misc_feature (28)..(504): Homolog of NCBI NO: 21553556 NR Description: protein kinase-like protein [Arabidopsis thaliana]
  misc_feature (28)..(504): Homolog of NCBI NO: 15232406 NR Description: protein kinase -like protein
  misc_feature (28)..(507): Homolog of NCBI NO: 22327962 NR Description: protein kinase - like
  misc_feature (1)..(507): Homolog of NCBI NO: 37537032 NR Description: putative protein kinase [Oryza sativa (japonica
  misc_feature (1)..(506): Homolog of NCBI NO: 7486022 NR Description: hypothetical protein F23E12.210 - Arabidopsis
  misc_feature (1)..(506): Homolog of NCBI NO: 18418600 NR Description: putative protein
  misc_feature (1)..(509): Homolog of NCBI NO: 37536550 NR Description: protein kinase-like protein
MGCCGSSLRAGTQPEKKPAAGALPPRRPSYSLSQNQNQAPPAARAGAHQVPPLREFSLAELRAATAGFAPDNIVSESGDKAPNFVYRGRLEPSRRAIAVKKFAKMAWPDPKQFAEEAKGVGKLRHRRLANLIGYCCDGEERLLVAEFMPNDTLAKHLFHWENQTIEWAMRLRVAYYIAEALEYCSTEGRPLYHDLNAYRVLFDENGDPRLSCFGLMKNSRDGKSYSTNLAYTPPEYLRNGRVTSESVIFSFGTILLDLLSGKRIPPSRALDMIKGNNIQVLMDSHLEGNYSTEEATTLVDLASQCLQYEPRDRPNTKKLVSVLEPLQIKSEVPSYEMLGIPKHEEEAPPPPQPQHPLSPMGEACSRMDLTAIHQILVNTHYRDDEGSNELSFQEWTQQMRDMLEARKRGYFAFRDKDFKAAIDCYTQFVDVGTMVSPTVYARRSLCHLMCDQPDAALRDAMQAQCAYPDWPTAFYMQAVALSKLNMQSDATDMLNEASQLEEKRQKNTKP

SEQ ID NO: 16787 - protein, 406 aa, Zea mays subsp. mays
  peptide (1)..(406): Ceres Seq. ID no. 12368258
  misc_feature (1)..(403): Homolog of NCBI NO: 28393210 NR Description: putative protein kinase [Arabidopsis thaliana]
  misc_feature (1)..(403): Homolog of NCBI NO: 15237465 NR Description: protein kinase-like protein; protein id:
  misc_feature (1)..(400): Homolog of NCBI NO: 15237604 NR Description: protein kinase-like; protein id: At5g41260.1
  misc_feature (1)..(400): Homolog of NCBI NO: 21553556 NR Description: protein kinase-like protein [Arabidopsis thaliana]
  misc_feature (1)..(400): Homolog of NCBI NO: 15232406 NR Description: protein kinase -like protein
  misc_feature (1)..(403): Homolog of NCBI NO: 22327962 NR Description: protein kinase - like
  misc_feature (1)..(403): Homolog of NCBI NO: 37537032 NR Description: putative protein kinase [Oryza sativa (japonica
  misc_feature (1)..(402): Homolog of NCBI NO: 7486022 NR Description: hypothetical protein F23E12.210 - Arabidopsis
  misc_feature (1)..(402): Homolog of NCBI NO: 18418600 NR Description: putative protein
  misc_feature (1)..(405): Homolog of NCBI NO: 37536550 NR Description: protein kinase-like protein
MAWPDPKQFAEEAKGVGKLRHRRLANLIGYCCDGEERLLVAEFMPNDTLAKHLFHWENQTIEWAMRLRVAYYIAEALEYCSTEGRPLYHDLNAYRVLFDENGDPRLSCFGLMKNSRDGKSYSTNLAYTPPEYLRNGRVTSESVIFSFGTILLDLLSGKRIPPSRALDMIKGNNIQVLMDSHLEGNYSTEEATTLVDLASQCLQYEPRDRPNTKKLVSVLEPLQIKSEVPSYEMLGIPKHEEEAPPPPQPQHPLSPMGEACSRMDLTAIHQILVNTHYRDDEGSNELSFQEWTQQMRDMLEARKRGYFAFRDKDFKAAIDCYTQFVDVGTMVSPTVYARRSLCHLMCDQPDAALRDAMQAQCAYPDWPTAFYMQAVALSKLNMQSDATDMLNEASQLEEKRQKNTKP

SEQ ID NO: 16788 - DNA, 1252 bp, Zea mays subsp. mays
  misc_feature (1)..(1252): Ceres Seq. ID no. 12368639
  misc_feature: MA Experiment ID: 108527 Result: Up-regulated in Transcription
  misc_feature: MA Experiment 108527 PARAMETER Experiment Name: Zm_5mM_NO_P Parameter: Age (day) Value: 8
  misc_feature: MA Experiment 108527 PARAMETER Experiment Name: Zm_5mM_NO_P Parameter: Organism Value: Zea mays
  misc_feature: MA Experiment 108527 PARAMETER Experiment Name: Zm_5mM_NO_P Parameter: Plant Line Value: 35A19
  misc_feature: MA Experiment 108527 PARAMETER Experiment Name: Zm_5mM_NO_P Parameter: Timepoint (hr) Value: 6
  misc_feature: MA Experiment 108527 PARAMETER Experiment Name: Zm_5mM_NO_P Parameter: Tissue Value: Aerial
  misc_feature: MA Experiment 108527 PARAMETER Experiment Name: Zm_5mM_NO_P Parameter: Treatment Value: 5mM NO vs. No Treatment
  misc_feature: MA Experiment ID: 108543 Result: Down-regulated in Transcription
  misc_feature: MA Experiment ID: 20000626 Result: Up-regulated in Transcription
  misc_feature: MA Experiment 20000626 PARAMETER Experiment Name: Zm_Herbicide-Treatments_P Parameter: Timepoint (hr) Value: 12
  misc_feature: MA Experiment 20000626 PARAMETER Experiment Name: Zm_Herbicide-Treatments_P Parameter: Tissue Value: Aerial
  misc_feature: MA Experiment 20000626 PARAMETER Experiment Name: Zm_Herbicide-Treatments_P Parameter: Treatment Value: Roundup vs. No Treatment
acgacggcacccgttcccatctcaattgataacgcatctccaatctccaagcgcagacgccggaggaagaaagcttgaagcagccacggcaatggcgtcccggcagttcttcacctacgacccctacgagttcgcgtacgaccagtactacaacctttacgaaccttactacctgcggcagtccgcgcccacccatcgagctagggacatctttgcgggtgccgagccggcggccgcgaaagcgagatccgcgcccagggcaaaggagtcggagacgcagacgtcgttctcaatcccagtcaacgggcctgactcgccggagagggctccctctccggtggcggaagctcgcgcgggaccgatggcgccggcgatgtcggcagaggacgccgcggcgcggatgcaggcagtggtgcgagggttcctcgcgaggaagtcggtgcgggcggtacgccaggtggatcaggaggcggagcaagtcgcgggaaagatggcgtgcgaggcggaggccctgctagcggaccccagggcacgcgtcgccgtctgggaggcgctcatgaggatgctgctgcgtctcgacgcggtgcgcggagcgcgggactaccggaggagggtcaccaagcgggtcgtcgcgctgcaggacgccgtcgacgcgctcgtcgctaagccggcaccggcaaccgtcgagattgctgaggagatcgccatagcgccggagctgccggacgctgaagatgaaaaggaagacgaagaggcagagacacacgaggcggcggccgtcgagatagcagaggagagcaataccaatgttggtgtcgacgagccctgagggttcggagatattggctgaagaaaacgaacacacctcaccggccctgactgcagttgctggcgccgcctccgacgttgtggacgcgaggaagttgatgcagatggtggcgacgctgtgcgagcagagcgcgcagcagtgcgcgttgatcgaagtgctggccgagcgtgtggacatgctggagcgtaccgtgcggcggatgcaagacgccgacagcgccggcggcggccagccaagaagctgagcacggagggcaactgaaggagcaacagcaagctttacagcggttgacgacgaaatctattaatagagatttaaatagttatgtatttttccattgcttttaatctcgagatttattattatagacactagattatttatattcattattttataataaagttcctcgtatttattgtt

SEQ ID NO: 16789 - protein, 275 aa, Zea mays subsp. mays
  peptide (1)..(275): Ceres Seq. ID no. 12368640
  misc_feature (188)..(273): Homolog of NCBI NO: 4185307 NR Description: unknown [Zea mays]
  misc_feature (36)..(266): Homolog of NCBI NO: 22208518 NR Description: hypothetical protein [Sorghum bicolor]
  misc_feature (31)..(266): Homolog of NCBI NO: 22208514 NR Description: hypothetical protein [Sorghum bicolor]
RRHPFPSQLITHLQSPSADAGGRKLEAATAMASRQFFTYDPYEFAYDQYYNLYEPYYLRQSAPTHRARDIFAGAEPAAAKARSAPRAKESETQTSFSIPVNGPDSPERAPSPVAEARAGPMAPAMSAEDAAARMQAVVRGFLARKSVRAVRQVDQEAEQVAGKMACEAEALLADPRARVAVWEALMRMLLRLDAVRGARDYRRRVTKRVVALQDAVDALVAKPAPATVEIAEEIAIAPELPDAEDEKEDEEAETHEAAAVEIAEESNTNVGVDEP

SEQ ID NO: 16790 - protein, 245 aa, Zea mays subsp. mays
  peptide (1)..(245): Ceres Seq. ID no. 12368641
  misc_feature (158)..(243): Homolog of NCBI NO: 4185307 NR Description: unknown [Zea mays]
  misc_feature (6)..(236): Homolog of NCBI NO: 22208518 NR Description: hypothetical protein [Sorghum bicolor]
  misc_feature (1)..(236): Homolog of NCBI NO: 22208514 NR Description: hypothetical protein [Sorghum bicolor]
MASRQFFTYDPYEFAYDQYYNLYEPYYLRQSAPTHRARDIFAGAEPAAAKARSAPRAKESETQTSFSIPVNGPDSPERAPSPVAEARAGPMAPAMSAEDAAARMQAVVRGFLARKSVRAVRQVDQEAEQVAGKMACEAEALLADPRARVAVWEALMRMLLRLDAVRGARDYRRRVTKRVVALQDAVDALVAKPAPATVEIAEEIAIAPELPDAEDEKEDEEAETHEAAAVEIAEESNTNVGVDEP

SEQ ID NO: 16791 - protein, 155 aa, Zea mays subsp. mays
  peptide (1)..(155): Ceres Seq. ID no. 12368642
  misc_feature (68)..(153): Homolog of NCBI NO: 4185307 NR Description: unknown [Zea mays]
  misc_feature (1)..(146): Homolog of NCBI NO: 22208518 NR Description: hypothetical protein [Sorghum bicolor]
  misc_feature (1)..(146): Homolog of NCBI NO: 22208514 NR Description: hypothetical protein [Sorghum bicolor]
MAPAMSAEDAAARMQAVVRGFLARKSVRAVRQVDQEAEQVAGKMACEAEALLADPRARVAVWEALMRMLLRLDAVRGARDYRRRVTKRVVALQDAVDALVAKPAPATVEIAEEIAIAPELPDAEDEKEDEEAETHEAAAVEIAEESNTNVGVDEP

SEQ ID NO: 16792 - DNA, 1479 bp, Zea mays subsp. mays
  misc_feature (1)..(1479): Ceres Seq. ID no. 12415392
  misc_feature: MA Experiment ID: 108529 Result: Down-regulated in Transcription
  misc_feature: MA Experiment 108529 PARAMETER Experiment Name: Zm_Imbibed_Seeds_P Parameter: Age (day) Value: 5 vs. 2
  misc_feature: MA Experiment 108529 PARAMETER Experiment Name: Zm_Imbibed_Seeds_P Parameter: Organism Value: Zea mays
  misc_feature: MA Experiment 108529 PARAMETER Experiment Name: Zm_Imbibed_Seeds_P Parameter: Plant Line Value: 35A19
  misc_feature: MA Experiment 108529 PARAMETER Experiment Name: Zm_Imbibed_Seeds_P Parameter: Tissue Value: Roots vs. Embryo
  misc_feature: MA Experiment ID: 108536 Result: Down-regulated in Transcription
  misc_feature: MA Experiment 108536 PARAMETER Experiment Name: Zm_Meristem_P Parameter: Age (day) Value: 8
  misc_feature: MA Experiment 108536 PARAMETER Experiment Name: Zm_Meristem_P Parameter: Organism Value: Zea mays
  misc_feature: MA Experiment 108536 PARAMETER Experiment Name: Zm_Meristem_P Parameter: Plant Line Value: 35A19
  misc_feature: MA Experiment 108536 PARAMETER Experiment Name: Zm_Meristem_P Parameter: Tissue Value: Shoot Meristem vs. Above Shoot Meristem
  misc_feature: MA Experiment ID: 108544 Result: Up-regulated in Transcription
  misc_feature: MA Experiment ID: 108546 Result: Down-regulated in Transcription
  misc_feature: MA Experiment 108546 PARAMETER Experiment Name: Zm_Imbibed_Seeds_P Parameter: Age (day) Value: 3 vs. 2
  misc_feature: MA Experiment 108546 PARAMETER Experiment Name: Zm_Imbibed_Seeds_P Parameter: Organism Value: Zea mays
  misc_feature: MA Experiment 108546 PARAMETER Experiment Name: Zm_Imbibed_Seeds_P Parameter: Plant Line Value: 35A19
  misc_feature: MA Experiment 108546 PARAMETER Experiment Name: Zm_Imbibed_Seeds_P Parameter: Tissue Value: Roots vs. Embryo
  misc_feature: MA Experiment ID: 20000479 Result: Down-regulated in Transcription
  misc_feature: MA Experiment 20000479 PARAMETER Experiment Name: Zm_Drought_P Parameter: Age (day) Value: 10
  misc_feature: MA Experiment 20000479 PARAMETER Experiment Name: Zm_Drought_P Parameter: Organism Value: Zea mays
  misc_feature: MA Experiment 20000479 PARAMETER Experiment Name: Zm_Drought_P Parameter: Plant Line Value: 35A19
  misc_feature: MA Experiment 20000479 PARAMETER Experiment Name: Zm_Drought_P Parameter: Timepoint (hr) Value: 48
  misc_feature: MA Experiment 20000479 PARAMETER Experiment Name: Zm_Drought_P Parameter: Tissue Value: Aerial
  misc_feature: MA Experiment 20000479 PARAMETER Experiment Name: Zm_Drought_P Parameter: Treatment Value: Drought vs. No Drought
  misc_feature: MA Experiment ID: 20000492 Result: Up-regulated in Transcription
  misc_feature: MA Experiment 20000492 PARAMETER Experiment Name: Zm_Hybrid_Seed_Dev_P Parameter: DAP Value: 12
  misc_feature: MA Experiment 20000492 PARAMETER Experiment Name: Zm_Hybrid_Seed_Dev_P Parameter: Organism Value: Zea mays
  misc_feature: MA Experiment 20000492 PARAMETER Experiment Name: Zm_Hybrid_Seed_Dev_P Parameter: Plant Line Value: 35A19
  misc_feature: MA Experiment 20000492 PARAMETER Experiment Name: Zm_Hybrid_Seed_Dev_P Parameter: Tissue Value: Fert Kernel vs. Unfert Floret
cccaagtcccggcccaacccatctgtagcactaggcaacagcgaagctgagcagagagctgtcactgcatctgcctcatctaccagtacgatggtgatgatgtcgggacttgctgcctactgttcactaagtatgacaacgaccgggactgcgccgttatcatggaatacacgggcaccgccggcgcgactcgctttccagaggcggcggcgcatgagtacgatcacggccacggtcacgtgcaggcgcgaatcggcgatgacggccccggagaaggccgacgtgctgcggtcgctagacgggtgggcggagtcgaacctgctgccgctgctgaagccggtggagcgggcatggcagccgcacgacctgctgccggactcggcgtcgccggggttccgcgaggcggtggacgagctgcgggcgcgggcgcgagagatccccgacgactactacgtgtgcctggtgggcaacatggtgacggaggaggccctcccccacgtaccacgccgccctcaacagcttcgtgggctacgacagcccctccagcgccgatgcctgggcgcgctggtcccgcggctggaccgccgaggagaaccgccacggcgacctgctgaaccgctatctctacctgtgcggccgcgtcgacgtccggcgcgtggagcagaccatccaccacctcatcaacgccgggatgcgcctcgcctccgacaagtgcccctacaggggcttcatctacacggcgttccaggagcgcgccaccgccgtctcgcacggcaacacggcgcggcgcgccatggcgctgggcgacgccagcctggccaggatctgcggcgccatcgcgagcgacgagaagcggcacgaggcggcctacacccgggtggtggaccagctgttcgcgctcacgcccgacgccgccgtgcgcgcgctcgagtacatgatgagggagaggatcctcatgccggcctactacatgttcgacggccgggacccggacctgttccgccactacgccgccgtcgcgcagaggctcggcgtctacaccaccgccgactacgccgacctcgtccagttcttcgtcgacaggtggggcgtggcggacctaggccccggcctcaccggcgaggggaggcaggcgcaggactacgtctgccggttgcctgagagggtgcgcaggatggaccagctggacgcgcgacgaaggctgcagccccagactcgtcaggtccccttctcttggctgttcgacaggcacgtggagctgctgacctgacttgattgatcggcagtctgcagcccagctagcggtccttttgccccctttggcagagcccagagctatcaattctgttactgcgtctccttctcctctacttctacttcttcctcgttggccactccgtagttccgtatgtgtctaccgtcaagtgactgactggaaccatgtactgtgtgtcagtcatcattcaatccatttggtgc

SEQ ID NO: 16793 - protein, 386 aa, Zea mays subsp. mays
  peptide (1)..(386): Ceres Seq. ID no. 12415393
  misc_feature (192)..(386): Pfam Name: HlyD family secretion protein Pfam Description: HlyD family secretion protein
  misc_feature (76)..(178): Homolog of NCBI NO: 34907410 NR Description: putative stearoyl-acyl carrier protein desaturase
  misc_feature (90)..(178): Homolog of NCBI NO: 417820 NR Description: Acyl-
  misc_feature (90)..(178): Homolog of NCBI NO: 7433272 NR Description: acyl-
  misc_feature (90)..(178): Homolog of NCBI NO: 2194093 NR Description: Chain A, Stearoyl-Acyl Carrier Protein Desaturase
  misc_feature (90)..(178): Homolog of NCBI NO: 951427 NR Description: stearoyl-acyl-carrier protein desaturase
  misc_feature (90)..(178): Homolog of NCBI NO: 134945 NR Description: Acyl-
  misc_feature (90)..(178): Homolog of NCBI NO: 134944 NR Description: Acyl-
  misc_feature (42)..(178): Homolog of NCBI NO: 5726639 NR Description: steroyl-ACP desaturase [Arachis hypogaea]
  misc_feature (90)..(178): Homolog of NCBI NO: 7433271 NR Description: acyl-
  misc_feature (23)..(165): Homolog of NCBI NO: 38636957 NR Description: putative AE9 stearoyl-ACP desaturase
PKSRPNPSVALGNSEAEQRAVTASASSTSTMVMMSGLAAYCSLSMTTTGTAPLSWNTRAPPARLAFQRRRRMSTITATVTCRRESAMTAPEKADVLRSLDGWAESNLLPLLKPVERAWQPHDLLPDSASPGFREAVDELRARAREIPDDYYVCLVGNMVTEEALPHVPRRPQQLRGLRQPLQRRCLGALVPRLDRRGEPPRRPAEPLSLPVRPRRRPARGADHPPPHQRRDAPRLRQVPLQGLHLHGVPGARHRRLARQHGAARHGAGRRQPGQDLRRHRERREAARGGLHPGGGPAVRAHARRRRARARVHDEGEDPHAGLLHVRRPGPGPVPPLRRRRAEARRLHHRRLRRPRPVLRRQVGRGGPRPRPHRRGEAGAGLRLPVA

SEQ ID NO: 16794 - protein, 356 aa, Zea mays subsp. mays
  peptide (1)..(356): Ceres Seq. ID no. 12415394
  misc_feature (162)..(356): Pfam Name: HlyD family secretion protein Pfam Description: HlyD family secretion protein
  misc_feature (46)..(148): Homolog of NCBI NO: 34907410 NR Description: putative stearoyl-acyl carrier protein desaturase
  misc_feature (60)..(148): Homolog of NCBI NO: 417820 NR Description: Acyl-
  misc_feature (60)..(148): Homolog of NCBI NO: 7433272 NR Description: acyl-
  misc_feature (60)..(148): Homolog of NCBI NO: 2194093 NR Description: Chain A, Stearoyl-Acyl Carrier Protein Desaturase
  misc_feature (60)..(148): Homolog of NCBI NO: 951427 NR Description: stearoyl-acyl-carrier protein desaturase
  misc_feature (60)..(148): Homolog of NCBI NO: 134945 NR Description: Acyl-
  misc_feature (60)..(148): Homolog of NCBI NO: 134944 NR Description: Acyl-
  misc_feature (12)..(148): Homolog of NCBI NO: 5726639 NR Description: steroyl-ACP desaturase [Arachis hypogaea]
  misc_feature (60)..(148): Homolog of NCBI NO: 7433271 NR Description: acyl-
  misc_feature (1)..(135): Homolog of NCBI NO: 38636957 NR Description: putative AE9 stearoyl-ACP desaturase
MVMMSGLAAYCSLSMTTTGTAPLSWNTRAPPARLAFQRRRRMSTITATVTCRRESAMTAPEKADVLRSLDGWAESNLLPLLKPVERAWQPHDLLPDSASPGFREAVDELRARAREIPDDYYVCLVGNMVTEEALPHVPRRPQQLRGLRQPLQRRCLGALVPRLDRRGEPPRRPAEPLSLPVRPRRRPARGADHPPPHQRRDAPRLRQVPLQGLHLHGVPGARHRRLARQHGAARHGAGRRQPGQDLRRHRERREAARGGLHPGGGPAVRAHARRRRARARVHDEGEDPHAGLLHVRRPGPGPVPPLRRRRAEARRLHHRRLRRPRPVLRRQVGRGGPRPRPHRRGEAGAGLRLPVA

SEQ ID NO: 16795 - protein, 354 aa, Zea mays subsp. mays
  peptide (1)..(354): Ceres Seq. ID no. 12415395
  misc_feature (160)..(354): Pfam Name: HlyD family secretion protein Pfam Description: HlyD family secretion protein
  misc_feature (44)..(146): Homolog of NCBI NO: 34907410 NR Description: putative stearoyl-acyl carrier protein desaturase
  misc_feature (58)..(146): Homolog of NCBI NO: 417820 NR Description: Acyl-
  misc_feature (58)..(146): Homolog of NCBI NO: 7433272 NR Description: acyl-
  misc_feature (58)..(146): Homolog of NCBI NO: 951427 NR Description: stearoyl-acyl-carrier protein desaturase
  misc_feature (58)..(146): Homolog of NCBI NO: 2194093 NR Description: Chain A, Stearoyl-Acyl Carrier Protein Desaturase
  misc_feature (58)..(146): Homolog of NCBI NO: 134945 NR Description: Acyl-
  misc_feature (58)..(146): Homolog of NCBI NO: 134944 NR Description: Acyl-
  misc_feature (10)..(146): Homolog of NCBI NO: 5726639 NR Description: steroyl-ACP desaturase [Arachis hypogaea]
  misc_feature (58)..(146): Homolog of NCBI NO: 7433271 NR Description: acyl-
  misc_feature (1)..(133): Homolog of NCBI NO: 38636957 NR Description: putative AE9 stearoyl-ACP desaturase
MMSGLAAYCSLSMTTTGTAPLSWNTRAPPARLAFQRRRRMSTITATVTCRRESAMTAPEKADVLRSLDGWAESNLLPLLKPVERAWQPHDLLPDSASPGFREAVDELRARAREIPDDYYVCLVGNMVTEEALPHVPRRPQQLRGLRQPLQRRCLGALVPRLDRRGEPPRRPAEPLSLPVRPRRRPARGADHPPPHQRRDAPRLRQVPLQGLHLHGVPGARHRRLARQHGAARHGAGRRQPGQDLRRHRERREAARGGLHPGGGPAVRAHARRRRARARVHDEGEDPHAGLLHVRRPGPGPVPPLRRRRAEARRLHHRRLRRPRPVLRRQVGRGGPRPRPHRRGEAGAGLRLPVA

SEQ ID NO: 16796 - DNA, 1686 bp, Zea mays subsp. mays
  misc_feature (1)..(1686): Ceres Seq. ID no. 12387379
  misc_feature: MA Experiment ID: 108522 Result: Down-regulated in Transcription
  misc_feature: MA Experiment 108522 PARAMETER Experiment Name: Zm_42deg_Heat_P Parameter: Age (day) Value: 8
  misc_feature: MA Experiment 108522 PARAMETER Experiment Name: Zm_42deg_Heat_P Parameter: Organism Value: Zea mays
  misc_feature: MA Experiment 108522 PARAMETER Experiment Name: Zm_42deg_Heat_P Parameter: Plant Line Value: 35A19
  misc_feature: MA Experiment 108522 PARAMETER Experiment Name: Zm_42deg_Heat_P Parameter: Temperature (deg C) Value: 42 vs. 22
  misc_feature: MA Experiment 108522 PARAMETER Experiment Name: Zm_42deg_Heat_P Parameter: Timepoint (hr) Value: 1
  misc_feature: MA Experiment 108522 PARAMETER Experiment Name: Zm_42deg_Heat_P Parameter: Tissue Value: Aerial
  misc_feature: MA Experiment ID: 108529 Result: Up-regulated in Transcription
  misc_feature: MA Experiment 108529 PARAMETER Experiment Name: Zm_Imbibed_Seeds_P Parameter: Age (day) Value: 5 vs. 2
  misc_feature: MA Experiment 108529 PARAMETER Experiment Name: Zm_Imbibed_Seeds_P Parameter: Organism Value: Zea mays
  misc_feature: MA Experiment 108529 PARAMETER Experiment Name: Zm_Imbibed_Seeds_P Parameter: Plant Line Value: 35A19
  misc_feature: MA Experiment 108529 PARAMETER Experiment Name: Zm_Imbibed_Seeds_P Parameter: Tissue Value: Roots vs. Embryo
  misc_feature: MA Experiment ID: 108535 Result: Down-regulated in Transcription
  misc_feature: MA Experiment 108535 PARAMETER Experiment Name: Zm_Meristem_P Parameter: Age (day) Value: 8
  misc_feature: MA Experiment 108535 PARAMETER Experiment Name: Zm_Meristem_P Parameter: Organism Value: Zea mays
  misc_feature: MA Experiment 108535 PARAMETER Experiment Name: Zm_Meristem_P Parameter: Plant Line Value: 35A19
  misc_feature: MA Experiment 108535 PARAMETER Experiment Name: Zm_Meristem_P Parameter: Tissue Value: Root Meristem vs. Above Root Meristem
aaaaggtggagggggtgtgaggtgtgtggttggagttggcctaacaattgagcctgccgcgcacaatcaatggccgcgctcgagtccaacaagaagctgcgcctccttctcgtgcccttcttcgccactagtcacataggcccgttcaccgacctcgccgtccgtctagccacagccaacccggacgccgtcgagctcactctcgccgtcaccccagcgaacgtccacgtggttcgctcggccctcgggcggtacggcgccgaggcgggcggcgtgatcaagattgccacctacccgttccccgcgtggacggcctcgctccgggcgtggagaacctctcggccgccggggacgacgggtggcgcattgatgccgtcgccgtcgacgaggcctcgacgcgaccggcgcaggaggcgctcatcagggaacagtcccctgacgccgtcatcaccgacgtccacttcatctggaacaacgccgtggccggcgagctcggcgtgccgtgcgttacgttcagcgtcgttggcatcttctcgacgctcgtcatgtaccacctcggccgtgacgtcgtcatcagagatggccaggaggtgaccgtccctgggttgccggggccggagatacggatccccgtatccgagttgccggagttcctgagacgccggcaggagcacgacggggtcaggcggtgccatgtggagatgggcaggtgcttcggcgtcaccctcaactcgttcgtggatctggagcagccataccgggacatgtgcgtgcgcagcggatacctgaagcgcgcctacttcgtcgggcccctctcgctgccgttaccaccggccggagcaagcaccagagattcgccgtgcctcgcgtggctcggcaccaagccgaggttttcagtggtgtacgtatgcttcggcaccttcgctgccatctcggaggaccagctccgggaactggcgcttgggctagaagcttcagagaagccattcctgtgggtagtgagggcggacggatggacgccgccggagggctgggaggagcgcgtcggagagagggggatgctagtgagagggtgggcgccgcagacggcgatactgtcccatccagcagttggcgcgttcctgacgcactgcgggtcgagctcgctgctggaggcggcggcggccggcgtgccgatgctgacgtggccgctggtgttcgaccagttcatcgaggagaggctggtgaccgaggtcctcaagatcggggagagggtgtggagcgggacacggagcacgagatacgaggagcaaaaggtcgtggcagcagaggtggtggcgcgagcggtggcaaggttcctggagccgggtggcaccggcgaggcggcgaggagcaaggcgggggtgctcgctgcgaaggcgcgctcggctgtggcggagggtggctcgtcattctgtgatctgcgccgtctcgtcaatgacctgatcgaagcaagaacggctgccggaaccaacgcctgagttacaaaaatcacgagtacgtgttgaattgctctatgtgttttcctttttttccagctgtttgtcgtttctttgggcagcagtttgtgtataggagggtaccaaatatttttaagagaaagaggtatttgtatttccttgtgaatagtagagaaacagacatttttggctagcagccaaatctgcg

SEQ ID NO: 16797 - protein, 317 aa, Zea mays subsp. mays
  peptide (1)..(317): Ceres Seq. ID no. 12387380
  misc_feature (1)..(310): Pfam Name: UDP-glucoronosyl and UDP-glucosyl transferase Pfam Description: UDP-glucoronosyl and UDP-glucosyl transferase
  misc_feature (1)..(306): Homolog of NCBI NO: 13492674 NR Description: phenylpropanoid:glucosyltransferase 1 [Nicotiana
  misc_feature (1)..(306): Homolog of NCBI NO: 4115534 NR Description: UDP-glycose:flavonoid glycosyltransferase [Vigna
  misc_feature (1)..(305): Homolog of NCBI NO: 18418380 NR Description: glucosyltransferase -like protein
  misc_feature (1)..(310): Homolog of NCBI NO: 7433911 NR Description: probable glucosyltransferase twi1 (EC 2.4.1.-) -
  misc_feature (1)..(307): Homolog of NCBI NO: 32816178 NR Description: flavonoid glucosyl-transferase [Allium cepa]
  misc_feature (1)..(306): Homolog of NCBI NO: 7635494 NR Description: putative UDP-glycose [Cicer arietinum]
  misc_feature (1)..(310): Homolog of NCBI NO: 34911572 NR Description: putative salicylate-induced glucosyltransferase
  misc_feature (1)..(176): Homolog of NCBI NO: 30103010 NR Description: putative immediate-early salicylate-induced
  misc_feature (12)..(313): Homolog of NCBI NO: 30103010 NR Description: putative immediate-early salicylate-induced
  misc_feature (1)..(313): Homolog of NCBI NO: 30017585 NR Description: putative immediate-early salicylate-induced
MYHLGRDVVIRDGQEVTVPGLPGPEIRIPVSELPEFLRRRQEHDGVRRCHVEMGRCFGVTLNSFVDLEQPYRDMCVRSGYLKRAYFVGPLSLPLPPAGASTRDSPCLAWLGTKPRFSVVYVCFGTFAAISEDQLRELALGLEASEKPFLWVVRADGWTPPEGWEERVGERGMLVRGWAPQTAILSHPAVGAFLTHCGSSSLLEAAAAGVPMLTWPLVFDQFIEERLVTEVLKIGERVWSGTRSTRYEEQKVVAAEVVARAVARFLEPGGTGEAARSKAGVLAAKARSAVAEGGSSFCDLRRLVNDLIEARTAAGTNA

SEQ ID NO: 16798 - protein, 265 aa, Zea mays subsp. mays
  peptide (1)..(265): Ceres Seq. ID no. 12387381
  misc_feature (1)..(258): Pfam Name: UDP-glucoronosyl and UDP-glucosyl transferase Pfam Description: UDP-glucoronosyl and UDP-glucosyl transferase
  misc_feature (1)..(254): Homolog of NCBI NO: 13492674 NR Description: phenylpropanoid:glucosyltransferase 1 [Nicotiana
  misc_feature (1)..(254): Homolog of NCBI NO: 4115534 NR Description: UDP-glycose:flavonoid glycosyltransferase [Vigna
  misc_feature (1)..(253): Homolog of NCBI NO: 18418380 NR Description: glucosyltransferase -like protein
  misc_feature (1)..(258): Homolog of NCBI NO: 7433911 NR Description: probable glucosyltransferase twi1 (EC 2.4.1.-) -
  misc_feature (1)..(255): Homolog of NCBI NO: 32816178 NR Description: flavonoid glucosyl-transferase [Allium cepa]
  misc_feature (1)..(254): Homolog of NCBI NO: 7635494 NR Description: putative UDP-glycose [Cicer arietinum]
  misc_feature (1)..(258): Homolog of NCBI NO: 34911572 NR Description: putative salicylate-induced glucosyltransferase
  misc_feature (1)..(124): Homolog of NCBI NO: 30103010 NR Description: putative immediate-early salicylate-induced
  misc_feature (1)..(261): Homolog of NCBI NO: 30103010 NR Description: putative immediate-early salicylate-induced
  misc_feature (1)..(261): Homolog of NCBI NO: 30017585 NR Description: putative immediate-early salicylate-induced
MGRCFGVTLNSFVDLEQPYRDMCVRSGYLKRAYFVGPLSLPLPPAGASTRDSPCLAWLGTKPRFSVVYVCFGTFAAISEDQLRELALGLEASEKPFLWVVRADGWTPPEGWEERVGERGMLVRGWAPQTAILSHPAVGAFLTHCGSSSLLEAAAAGVPMLTWPLVFDQFIEERLVTEVLKIGERVWSGTRSTRYEEQKVVAAEVVARAVARFLEPGGTGEAARSKAGVLAAKARSAVAEGGSSFCDLRRLVNDLIEARTAAGTNA

SEQ ID NO: 16799 - protein, 244 aa, Zea mays subsp. mays
  peptide (1)..(244): Ceres Seq. ID no. 12387382
  misc_feature (1)..(237): Pfam Name: UDP-glucoronosyl and UDP-glucosyl transferase Pfam Description: UDP-glucoronosyl and UDP-glucosyl transferase
  misc_feature (1)..(233): Homolog of NCBI NO: 13492674 NR Description: phenylpropanoid:glucosyltransferase 1 [Nicotiana
  misc_feature (1)..(233): Homolog of NCBI NO: 4115534 NR Description: UDP-glycose:flavonoid glycosyltransferase [Vigna
  misc_feature (1)..(232): Homolog of NCBI NO: 18418380 NR Description: glucosyltransferase -like protein
  misc_feature (1)..(237): Homolog of NCBI NO: 7433911 NR Description: probable glucosyltransferase twi1 (EC 2.4.1.-) -
  misc_feature (1)..(234): Homolog of NCBI NO: 32816178 NR Description: flavonoid glucosyl-transferase [Allium cepa]
  misc_feature (1)..(233): Homolog of NCBI NO: 7635494 NR Description: putative UDP-glycose [Cicer arietinum]
  misc_feature (1)..(237): Homolog of NCBI NO: 34911572 NR Description: putative salicylate-induced glucosyltransferase
  misc_feature (1)..(103): Homolog of NCBI NO: 30103010 NR Description: putative immediate-early salicylate-induced
  misc_feature (1)..(240): Homolog of NCBI NO: 30103010 NR Description: putative immediate-early salicylate-induced
  misc_feature (1)..(240): Homolog of NCBI NO: 30017585 NR Description: putative immediate-early salicylate-induced
MCVRSGYLKRAYFVGPLSLPLPPAGASTRDSPCLAWLGTKPRFSVVYVCFGTFAAISEDQLRELALGLEASEKPFLWVVRADGWTPPEGWEERVGERGMLVRGWAPQTAILSHPAVGAFLTHCGSSSLLEAAAAGVPMLTWPLVFDQFIEERLVTEVLKIGERVWSGTRSTRYEEQKVVAAEVVARAVARFLEPGGTGEAARSKAGVLAAKARSAVAEGGSSFCDLRRLVNDLIEARTAAGTNA

SEQ ID NO: 16800 - DNA, 1728 bp, Zea mays subsp. mays
  misc_feature (1)..(1728): Ceres Seq. ID no. 12367809
  misc_feature: MA Experiment ID: 108504 Result: Down-regulated in Transcription
  misc_feature: MA Experiment 108504 PARAMETER Experiment Name: Zm_Drought_P Parameter: Age (day) Value: 8
  misc_feature: MA Experiment 108504 PARAMETER Experiment Name: Zm_Drought_P Parameter: Organism Value: Zea mays
  misc_feature: MA Experiment 108504 PARAMETER Experiment Name: Zm_Drought_P Parameter: Plant Line Value: 35A19
  misc_feature: MA Experiment 108504 PARAMETER Experiment Name: Zm_Drought_P Parameter: Timepoint (hr) Value: 12
  misc_feature: MA Experiment 108504 PARAMETER Experiment Name: Zm_Drought_P Parameter: Tissue Value: Aerial
  misc_feature: MA Experiment 108504 PARAMETER Experiment Name: Zm_Drought_P Parameter: Treatment Value: Drought vs. No Drought
  misc_feature: MA Experiment ID: 108513 Result: Down-regulated in Transcription
  misc_feature: MA Experiment 108513 PARAMETER Experiment Name: Zm_100uM_ABA_P Parameter: Age (day) Value: 8
  misc_feature: MA Experiment 108513 PARAMETER Experiment Name: Zm_100uM_ABA_P Parameter: Organism Value: Zea mays
  misc_feature: MA Experiment 108513 PARAMETER Experiment Name: Zm_100uM_ABA_P Parameter: Plant Line Value: 35A19
  misc_feature: MA Experiment 108513 PARAMETER Experiment Name: Zm_100uM_ABA_P Parameter: Timepoint (hr) Value: 6
  misc_feature: MA Experiment 108513 PARAMETER Experiment Name: Zm_100uM_ABA_P Parameter: Tissue Value: Aerial
  misc_feature: MA Experiment 108513 PARAMETER Experiment Name: Zm_100uM_ABA_P Parameter: Treatment Value: 100uM ABA vs. No Treatment
  misc_feature: MA Experiment ID: 108515 Result: Down-regulated in Transcription
  misc_feature: MA Experiment 108515 PARAMETER Experiment Name: Zm_2mM_SA_P Parameter: Age (day) Value: 8
  misc_feature: MA Experiment 108515 PARAMETER Experiment Name: Zm_2mM_SA_P Parameter: Organism Value: Zea mays
  misc_feature: MA Experiment 108515 PARAMETER Experiment Name: Zm_2mM_SA_P Parameter: Plant Line Value: 35A19
  misc_feature: MA Experiment 108515 PARAMETER Experiment Name: Zm_2mM_SA_P Parameter: Timepoint (hr) Value: 12
  misc_feature: MA Experiment 108515 PARAMETER Experiment Name: Zm_2mM_SA_P Parameter: Tissue Value: Aerial
  misc_feature: MA Experiment 108515 PARAMETER Experiment Name: Zm_2mM_SA_P Parameter: Treatment Value: 2mM SA vs. No Treatment
  misc_feature: MA Experiment ID: 108527 Result: Down-regulated in Transcription
  misc_feature: MA Experiment 108527 PARAMETER Experiment Name: Zm_5mM_NO_P Parameter: Age (day) Value: 8
  misc_feature: MA Experiment 108527 PARAMETER Experiment Name: Zm_5mM_NO_P Parameter: Organism Value: Zea mays
  misc_feature: MA Experiment 108527 PARAMETER Experiment Name: Zm_5mM_NO_P Parameter: Plant Line Value: 35A19
  misc_feature: MA Experiment 108527 PARAMETER Experiment Name: Zm_5mM_NO_P Parameter: Timepoint (hr) Value: 6
  misc_feature: MA Experiment 108527 PARAMETER Experiment Name: Zm_5mM_NO_P Parameter: Tissue Value: Aerial
  misc_feature: MA Experiment 108527 PARAMETER Experiment Name: Zm_5mM_NO_P Parameter: Treatment Value: 5mM NO vs. No Treatment
  misc_feature: MA Experiment ID: 108528 Result: Up-regulated in Transcription
  misc_feature: MA Experiment 108528 PARAMETER Experiment Name: Zm_Imbibed_Seeds_P Parameter: Age (day) Value: 5 vs. 2
  misc_feature: MA Experiment 108528 PARAMETER Experiment Name: Zm_Imbibed_Seeds_P Parameter: Organism Value: Zea mays
  misc_feature: MA Experiment 108528 PARAMETER Experiment Name: Zm_Imbibed_Seeds_P Parameter: Plant Line Value: 35A19
  misc_feature: MA Experiment 108528 PARAMETER Experiment Name: Zm_Imbibed_Seeds_P Parameter: Tissue Value: Aerial vs. Embryo
  misc_feature: MA Experiment ID: 108530 Result: Up-regulated in Transcription
  misc_feature: MA Experiment 108530 PARAMETER Experiment Name: Zm_Imbibed_Seeds_P Parameter: Age (day) Value: 6 vs. 2
  misc_feature: MA Experiment 108530 PARAMETER Experiment Name: Zm_Imbibed_Seeds_P Parameter: Organism Value: Zea mays
  misc_feature: MA Experiment 108530 PARAMETER Experiment Name: Zm_Imbibed_Seeds_P Parameter: Plant Line Value: 35A19
  misc_feature: MA Experiment 108530 PARAMETER Experiment Name: Zm_Imbibed_Seeds_P Parameter: Tissue Value: Aerial vs. Embryo
  misc_feature: MA Experiment ID: 108534 Result: Up-regulated in Transcription
  misc_feature: MA Experiment 108534 PARAMETER Experiment Name: Zm_4deg_Cold_P Parameter: Age (hr) Value: 8
  misc_feature: MA Experiment 108534 PARAMETER Experiment Name: Zm_4deg_Cold_P Parameter: Organism Value: Zea mays
  misc_feature: MA Experiment 108534 PARAMETER Experiment Name: Zm_4deg_Cold_P Parameter: Plant Line Value: 35A19
  misc_feature: MA Experiment 108534 PARAMETER Experiment Name: Zm_4deg_Cold_P Parameter: Temperature (deg C) Value: 4 vs. 22
  misc_feature: MA Experiment 108534 PARAMETER Experiment Name: Zm_4deg_Cold_P Parameter: Timepoint (hr) Value: 6
  misc_feature: MA Experiment 108534 PARAMETER Experiment Name: Zm_4deg_Cold_P Parameter: Tissue Value: Aerial
  misc_feature: MA Experiment ID: 108540 Result: Down-regulated in Transcription
  misc_feature: MA Experiment 108540 PARAMETER Experiment Name: Zm_20percent_PEG_P Parameter: Age (day) Value: 8
  misc_feature: MA Experiment 108540 PARAMETER Experiment Name: Zm_20percent_PEG_P Parameter: Organism Value: Zea mays
  misc_feature: MA Experiment 108540 PARAMETER Experiment Name: Zm_20percent_PEG_P Parameter: Plant Line Value: 35A19
  misc_feature: MA Experiment 108540 PARAMETER Experiment Name: Zm_20percent_PEG_P Parameter: Timepoint (hr) Value: 6
  misc_feature: MA Experiment 108540 PARAMETER Experiment Name: Zm_20percent_PEG_P Parameter: Tissue Value: Aerial
  misc_feature: MA Experiment 108540 PARAMETER Experiment Name: Zm_20percent_PEG_P Parameter: Treatment Value: 20percent PEG vs. No Treatment
  misc_feature: MA Experiment ID: 108542 Result: Down-regulated in Transcription
  misc_feature: MA Experiment 108542 PARAMETER Experiment Name: Zm_150mM_NaCl_P Parameter: Age (day) Value: 8
  misc_feature: MA Experiment 108542 PARAMETER Experiment Name: Zm_150mM_NaCl_P Parameter: Organism Value: Zea mays
  misc_feature: MA Experiment 108542 PARAMETER Experiment Name: Zm_150mM_NaCl_P Parameter: Plant Line Value: 35A19
  misc_feature: MA Experiment 108542 PARAMETER Experiment Name: Zm_150mM_NaCl_P Parameter: Timepoint (hr) Value: 6
  misc_feature: MA Experiment 108542 PARAMETER Experiment Name: Zm_150mM_NaCl_P Parameter: Tissue Value: Aerial
  misc_feature: MA Experiment 108542 PARAMETER Experiment Name: Zm_150mM_NaCl_P Parameter: Treatment Value: 150mM NaCl vs. No Treatment
  misc_feature: MA Experiment ID: 108544 Result: Up-regulated in Transcription
  misc_feature: MA Experiment ID: 108545 Result: Up-regulated in Transcription
  misc_feature: MA Experiment 108545 PARAMETER Experiment Name: Zm_Imbibed_Seeds_P Parameter: Age (day) Value: 3 vs. 2
  misc_feature: MA Experiment 108545 PARAMETER Experiment Name: Zm_Imbibed_Seeds_P Parameter: Organism Value: Zea mays
  misc_feature: MA Experiment 108545 PARAMETER Experiment Name: Zm_Imbibed_Seeds_P Parameter: Plant Line Value: 35A19
  misc_feature: MA Experiment 108545 PARAMETER Experiment Name: Zm_Imbibed_Seeds_P Parameter: Tissue Value: Aerial vs. Embryo
  misc_feature: MA Experiment ID: 108547 Result: Up-regulated in Transcription
  misc_feature: MA Experiment 108547 PARAMETER Experiment Name: Zm_Imbibed_Seeds_P Parameter: Age (day) Value: 4 vs. 2
  misc_feature: MA Experiment 108547 PARAMETER Experiment Name: Zm_Imbibed_Seeds_P Parameter: Organism Value: Zea mays
  misc_feature: MA Experiment 108547 PARAMETER Experiment Name: Zm_Imbibed_Seeds_P Parameter: Plant Line Value: 35A19
  misc_feature: MA Experiment 108547 PARAMETER Experiment Name: Zm_Imbibed_Seeds_P Parameter: Tissue Value: Aerial vs. Embryo
  misc_feature: MA Experiment ID: 108556 Result: Down-regulated in Transcription
  misc_feature: MA Experiment 108556 PARAMETER Experiment Name: Zm_Drought_P Parameter: Age (day) Value: 9
  misc_feature: MA Experiment 108556 PARAMETER Experiment Name: Zm_Drought_P Parameter: Organism Value: Zea mays
  misc_feature: MA Experiment 108556 PARAMETER Experiment Name: Zm_Drought_P Parameter: Plant Line Value: 35A19
  misc_feature: MA Experiment 108556 PARAMETER Experiment Name: Zm_Drought_P Parameter: Timepoint (hr) Value: 24
  misc_feature: MA Experiment 108556 PARAMETER Experiment Name: Zm_Drought_P Parameter: Tissue Value: Aerial
  misc_feature: MA Experiment 108556 PARAMETER Experiment Name: Zm_Drought_P Parameter: Treatment Value: Drought vs. No Drought
  misc_feature: MA Experiment ID: 108559 Result: Down-regulated in Transcription
  misc_feature: MA Experiment 108559 PARAMETER Experiment Name: Zm_5mM_NO_P Parameter: Age (day) Value: 8
  misc_feature: MA Experiment 108559 PARAMETER Experiment Name: Zm_5mM_NO_P Parameter: Organism Value: Zea mays
  misc_feature: MA Experiment 108559 PARAMETER Experiment Name: Zm_5mM_NO_P Parameter: Plant Line Value: 35A19
  misc_feature: MA Experiment 108559 PARAMETER Experiment Name: Zm_5mM_NO_P Parameter: Timepoint (hr) Value: 12
  misc_feature: MA Experiment 108559 PARAMETER Experiment Name: Zm_5mM_NO_P Parameter: Tissue Value: Aerial
  misc_feature: MA Experiment 108559 PARAMETER Experiment Name: Zm_5mM_NO_P Parameter: Treatment Value: 5mM NO vs. No Treatment
  misc_feature: MA Experiment ID: 108597 Result: Down-regulated in Transcription
  misc_feature: MA Experiment 108597 PARAMETER Experiment Name: Zm_100uM_ABA_P Parameter: Age (day) Value: 9
  misc_feature: MA Experiment 108597 PARAMETER Experiment Name: Zm_100uM_ABA_P Parameter: Organism Value: Zea mays
  misc_feature: MA Experiment 108597 PARAMETER Experiment Name: Zm_100uM_ABA_P Parameter: Plant Line Value: 35A19
  misc_feature: MA Experiment 108597 PARAMETER Experiment Name: Zm_100uM_ABA_P Parameter: Timepoint (hr) Value: 24
  misc_feature: MA Experiment 108597 PARAMETER Experiment Name: Zm_100uM_ABA_P Parameter: Tissue Value: Aerial
  misc_feature: MA Experiment 108597 PARAMETER Experiment Name: Zm_100uM_ABA_P Parameter: Treatment Value: 100uM ABA vs. No Treatment
  misc_feature: MA Experiment ID: 108687 Result: Down-regulated in Transcription
  misc_feature: MA Experiment 108687 PARAMETER Experiment Name: Zm_Embryos-Flowers__P Parameter: Tissue Value: Embryo vs. Aerial+
  misc_feature: MA Experiment ID: 108688 Result: Down-regulated in Transcription
  misc_feature: MA Experiment 108688 PARAMETER Experiment Name: Zm_Embryos-Flowers__P Parameter: Tissue Value: Immature Flowers vs. Aerial+
  misc_feature: MA Experiment ID: 20000477 Result: Down-regulated in Transcription
  misc_feature: MA Experiment 20000477 PARAMETER Experiment Name: Zm_5mM_SA_P Parameter: Age (day) Value: 10
  misc_feature: MA Experiment 20000477 PARAMETER Experiment Name: Zm_5mM_SA_P Parameter: Organism Value: Zea mays
  misc_feature: MA Experiment 20000477 PARAMETER Experiment Name: Zm_5mM_SA_P Parameter: Plant Line Value: 35A19
  misc_feature: MA Experiment 20000477 PARAMETER Experiment Name: Zm_5mM_SA_P Parameter: Timepoint (hr) Value: 48
  misc_feature: MA Experiment 20000477 PARAMETER Experiment Name: Zm_5mM_SA_P Parameter: Tissue Value: Aerial
  misc_feature: MA Experiment 20000477 PARAMETER Experiment Name: Zm_5mM_SA_P Parameter: Treatment Value: 5mM SA vs. No Treatment
  misc_feature: MA Experiment ID: 20000478 Result: Down-regulated in Transcription
  misc_feature: MA Experiment 20000478 PARAMETER Experiment Name: Zm_5mM_SA_P Parameter: Age (day) Value: 11
  misc_feature: MA Experiment 20000478 PARAMETER Experiment Name: Zm_5mM_SA_P Parameter: Organism Value: Zea mays
  misc_feature: MA Experiment 20000478 PARAMETER Experiment Name: Zm_5mM_SA_P Parameter: Plant Line Value: 35A19
  misc_feature: MA Experiment 20000478 PARAMETER Experiment Name: Zm_5mM_SA_P Parameter: Timepoint (hr) Value: 72
  misc_feature: MA Experiment 20000478 PARAMETER Experiment Name: Zm_5mM_SA_P Parameter: Tissue Value: Aerial
  misc_feature: MA Experiment 20000478 PARAMETER Experiment Name: Zm_5mM_SA_P Parameter: Treatment Value: 5mM SA vs. No Treatment
  misc_feature: MA Experiment ID: 20000480 Result: Down-regulated in Transcription
  misc_feature: MA Experiment 20000480 PARAMETER Experiment Name: Zm_Drought_P Parameter: Age (day) Value: 11
  misc_feature: MA Experiment 20000480 PARAMETER Experiment Name: Zm_Drought_P Parameter: Organism Value: Zea mays
  misc_feature: MA Experiment 20000480 PARAMETER Experiment Name: Zm_Drought_P Parameter: Plant Line Value: 35A19
  misc_feature: MA Experiment 20000480 PARAMETER Experiment Name: Zm_Drought_P Parameter: Timepoint (hr) Value: 72
  misc_feature: MA Experiment 20000480 PARAMETER Experiment Name: Zm_Drought_P Parameter: Tissue Value: Aerial
  misc_feature: MA Experiment 20000480 PARAMETER Experiment Name: Zm_Drought_P Parameter: Treatment Value: Drought vs. No Drought
  misc_feature: MA Experiment ID: 20000535 Result: Down-regulated in Transcription
  misc_feature: MA Experiment 20000535 PARAMETER Experiment Name: Zm_Hybrid_Seed_Dev_P Parameter: DAP Value: 30 vs. 12
  misc_feature: MA Experiment 20000535 PARAMETER Experiment Name: Zm_Hybrid_Seed_Dev_P Parameter: Organism Value: Zea mays
  misc_feature: MA Experiment 20000535 PARAMETER Experiment Name: Zm_Hybrid_Seed_Dev_P Parameter: Plant Line Value: 35A19
  misc_feature: MA Experiment 20000535 PARAMETER Experiment Name: Zm_Hybrid_Seed_Dev_P Parameter: Tissue Value: Embryo vs. Unfert Floret
  misc_feature: MA Experiment ID: 20001608 Result: Down-regulated in Transcription
  misc_feature: MA Experiment 20001608 PARAMETER Experiment Name: Zm_50ppm_KNO3_L-to-H_P Parameter: Age (day) Value: 21
  misc_feature: MA Experiment 20001608 PARAMETER Experiment Name: Zm_50ppm_KNO3_L-to-H_P Parameter: Organism Value: Zea mays
  misc_feature: MA Experiment 20001608 PARAMETER Experiment Name: Zm_50ppm_KNO3_L-to-H_P Parameter: Plant Line Value: 35A19
  misc_feature: MA Experiment 20001608 PARAMETER Experiment Name: Zm_50ppm_KNO3_L-to-H_P Parameter: Timepoint (hr) Value: 48
  misc_feature: MA Experiment 20001608 PARAMETER Experiment Name: Zm_50ppm_KNO3_L-to-H_P Parameter: Tissue Value: Shoots
  misc_feature: MA Experiment 20001608 PARAMETER Experiment Name: Zm_50ppm_KNO3_L-to-H_P Parameter: Treatment Value: 50ppm KNO3 vs. 50ppm KCl
gcacgagaccattacctagaacatcctaatcaaaaaaaggagtgaggaaccagatccttgcttgcattggcggagcagcatcatgccttccacgacagcgcagcagaagccccacgtcgtgctggtgccgttcccggcgcacggccacatcgcgccgcacgtgcagctggcgcgcgccctccgcgcccgcggcgtccacgccacgctcgtccacaccgagctgtaccaccgccgcctgctgcgcaccaagcagcagcaggccacgggcggcgacgacgccctggacccggacgagggcttctccgtcgaggtcatcccggacgggctatcgctggaggacccaccgcgcacgctgcgtgcgtaccacgaggcgatggagcgcaactgcctcgagccgttcaaggcgctgctgcgggacctgctgttgccgcccaccggcgtgccgccggtcagctgcgtcgtggccgacaccccgatgccgttcgcggccgtggcggcgcgcgaggttggcgtcccggacgtgcagttcttcacggcgtccgcgtgcggcctcatgggctacctccagttccaggagctcttggcgagggaggtcatccctcttagacccacctacgagaccgacggctccctcgacgccccgctggactgggtgcccgggatgaaggccgtgcgcctaagggacctgccgacgttctgccacaccacggacgccgacgactggcttgtgcacttccacgtccaccagatgaagacggccgccgcctccaaggccgtcgtcctcaacactctctacgacatggagaaggacgtcgtcgacgcgctcgcgccgcacttgccgcccatctacaccgtcggcccgctcgcaagcgtcgtcaaagcgtccttgcccgctccgcgcggcgccggcgacgacaccagcgtccccgccgccggctcggtgaggagcagcgccatgcttggcgtgttacaggaagacagggagtgcatggcgtggctcgacgacggcaaggcggcgcgctccgtcgtgtacttgagcttcggcagccacgccagcatgagcgacgcgcggctcaaggagatcgcgtccgggctagcacgctgtggctctccctacctctgggtcctcaggccagaaatggccgccgcggtcgaggtcggcgagaacggcctcgtcgtgccgtggtgcgcgcaggaggcggtgctgagccacccggccgtggggctgttcgtcacccactgtgggtggaactccattctggagagcgtcgtcgccggcgtgccggtgcttggatgccccgtgctgtctgagcagaccacgaactgccgccaggtgtgcaccgcgtggggcatcggcgccgagctgccgcaggaagctggcagcgacgaggttgcggcgctcgtgagggagatgatgaccgggaggaaggggaaggacgcaagggagaagacgctgcagtggaagaggctggctcaagtcagtgcacaaccaggggggctatcttacaataatattggtcggatggtggagaatatcctactcaaacacatctgacttcaaatcatggtcatgtttttgtcatagcgactgaggggagaaagatcgtcaataaccaacagctcaaccgtatctccctgatcctatagcactattaaattaaattctgtacctagcattaaaatatctcataccatatagtccaatataaataaatcagttcatattcc

SEQ ID NO: 16801 - protein, 490 aa, Zea mays subsp. mays
  peptide (1)..(490): Ceres Seq. ID no. 12367810
  misc_feature (11)..(487): Pfam Name: UDP-glucoronosyl and UDP-glucosyl transferase Pfam Description: UDP-glucoronosyl and UDP-glucosyl transferase
  misc_feature (8)..(487): Homolog of NCBI NO: 15219876 NR Description: UDP-glucose glucosyltransferase, putative
  misc_feature (8)..(487): Homolog of NCBI NO: 15219870 NR Description: UDP-glucose glucosyltransferase
  misc_feature (8)..(487): Homolog of NCBI NO: 17065006 NR Description: UDP-glucose glucosyltransferase [Arabidopsis
  misc_feature (8)..(490): Homolog of NCBI NO: 15219867 NR Description: UDP-glucose glucosyltransferase, putative
  misc_feature (3)..(487): Homolog of NCBI NO: 25286821 NR Description: T16E15.2 protein - Arabidopsis thaliana
  misc_feature (1)..(487): Homolog of NCBI NO: 38569188 NR Description: OSJNBa0086B14.13 [Oryza sativa (japonica
  misc_feature (6)..(487): Homolog of NCBI NO: 38569140 NR Description: OSJNBb0033P05.8 [Oryza sativa (japonica
  misc_feature (1)..(487): Homolog of NCBI NO: 38569139 NR Description: OSJNBb0033P05.7 [Oryza sativa (japonica
  misc_feature (1)..(487): Homolog of NCBI NO: 38344776 NR Description: OSJNBb0026L04.7 [Oryza sativa (japonica
  misc_feature (10)..(487): Homolog of NCBI NO: 6561805 NR Description: UDP-glucose glucosyltransferase [Sorghum bicolor]
MPSTTAQQKPHVVLVPFPAHGHIAPHVQLARALRARGVHATLVHTELYHRRLLRTKQQQATGGDDALDPDEGFSVEVIPDGLSLEDPPRTLRAYHEAMERNCLEPFKALLRDLLLPPTGVPPVSCVVADTPMPFAAVAAREVGVPDVQFFTASACGLMGYLQFQELLAREVIPLRPTYETDGSLDAPLDWVPGMKAVRLRDLPTFCHTTDADDWLVHFHVHQMKTAAASKAVVLNTLYDMEKDVVDALAPHLPPIYTVGPLASVVKASLPAPRGAGDDTSVPAAGSVRSSAMLGVLQEDRECMAWLDDGKAARSVVYLSFGSHASMSDARLKEIASGLARCGSPYLWVLRPEMAAAVEVGENGLVVPWCAQEAVLSHPAVGLFVTHCGWNSILESVVAGVPVLGCPVLSEQTTNCRQVCTAWGIGAELPQEAGSDEVAALVREMMTGRKGKDAREKTLQWKRLAQVSAQPGGLSYNNIGRMVENILLKHI

SEQ ID NO: 16802 - protein, 393 aa, Zea mays subsp. mays
  peptide (1)..(393): Ceres Seq. ID no. 12367811
  misc_feature (1)..(390): Pfam Name: UDP-glucoronosyl and UDP-glucosyl transferase Pfam Description: UDP-glucoronosyl and UDP-glucosyl transferase
  misc_feature (1)..(390): Homolog of NCBI NO: 15219876 NR Description: UDP-glucose glucosyltransferase, putative
  misc_feature (1)..(390): Homolog of NCBI NO: 15219870 NR Description: UDP-glucose glucosyltransferase
  misc_feature (1)..(390): Homolog of NCBI NO: 17065006 NR Description: UDP-glucose glucosyltransferase [Arabidopsis
  misc_feature (1)..(393): Homolog of NCBI NO: 15219867 NR Description: UDP-glucose glucosyltransferase, putative
  misc_feature (1)..(390): Homolog of NCBI NO: 25286821 NR Description: T16E15.2 protein - Arabidopsis thaliana
  misc_feature (1)..(390): Homolog of NCBI NO: 38569188 NR Description: OSJNBa0086B14.13 [Oryza sativa (japonica
  misc_feature (1)..(390): Homolog of NCBI NO: 38569140 NR Description: OSJNBb0033P05.8 [Oryza sativa (japonica
  misc_feature (1)..(390): Homolog of NCBI NO: 38569139 NR Description: OSJNBb0033P05.7 [Oryza sativa (japonica
  misc_feature (1)..(390): Homolog of NCBI NO: 38344776 NR Description: OSJNBb0026L04.7 [Oryza sativa (japonica
  misc_feature (1)..(390): Homolog of NCBI NO: 6561805 NR Description: UDP-glucose glucosyltransferase [Sorghum bicolor]
MERNCLEPFKALLRDLLLPPTGVPPVSCVVADTPMPFAAVAAREVGVPDVQFFTASACGLMGYLQFQELLAREVIPLRPTYETDGSLDAPLDWVPGMKAVRLRDLPTFCHTTDADDWLVHFHVHQMKTAAASKAVVLNTLYDMEKDVVDALAPHLPPIYTVGPLASVVKASLPAPRGAGDDTSVPAAGSVRSSAMLGVLQEDRECMAWLDDGKAARSVVYLSFGSHASMSDARLKEIASGLARCGSPYLWVLRPEMAAAVEVGENGLVVPWCAQEAVLSHPAVGLFVTHCGWNSILESVVAGVPVLGCPVLSEQTTNCRQVCTAWGIGAELPQEAGSDEVAALVREMMTGRKGKDAREKTLQWKRLAQVSAQPGGLSYNNIGRMVENILLKHI

SEQ ID NO: 16803 - protein, 359 aa, Zea mays subsp. mays
  peptide (1)..(359): Ceres Seq. ID no. 12367812
  misc_feature (1)..(356): Pfam Name: UDP-glucoronosyl and UDP-glucosyl transferase Pfam Description: UDP-glucoronosyl and UDP-glucosyl transferase
  misc_feature (1)..(356): Homolog of NCBI NO: 15219876 NR Description: UDP-glucose glucosyltransferase, putative
  misc_feature (1)..(356): Homolog of NCBI NO: 15219870 NR Description: UDP-glucose glucosyltransferase
  misc_feature (1)..(356): Homolog of NCBI NO: 17065006 NR Description: UDP-glucose glucosyltransferase [Arabidopsis
  misc_feature (1)..(359): Homolog of NCBI NO: 15219867 NR Description: UDP-glucose glucosyltransferase, putative
  misc_feature (1)..(356): Homolog of NCBI NO: 25286821 NR Description: T16E15.2 protein - Arabidopsis thaliana
  misc_feature (1)..(356): Homolog of NCBI NO: 38569188 NR Description: OSJNBa0086B14.13 [Oryza sativa (japonica
  misc_feature (1)..(356): Homolog of NCBI NO: 38569140 NR Description: OSJNBb0033P05.8 [Oryza sativa (japonica
  misc_feature (1)..(356): Homolog of NCBI NO: 38569139 NR Description: OSJNBb0033P05.7 [Oryza sativa (japonica
  misc_feature (1)..(356): Homolog of NCBI NO: 38344776 NR Description: OSJNBb0026L04.7 [Oryza sativa (japonica
  misc_feature (1)..(356): Homolog of NCBI NO: 6561805 NR Description: UDP-glucose glucosyltransferase [Sorghum bicolor]
MPFAAVAAREVGVPDVQFFTASACGLMGYLQFQELLAREVIPLRPTYETDGSLDAPLDWVPGMKAVRLRDLPTFCHTTDADDWLVHFHVHQMKTAAASKAVVLNTLYDMEKDVVDALAPHLPPIYTVGPLASVVKASLPAPRGAGDDTSVPAAGSVRSSAMLGVLQEDRECMAWLDDGKAARSVVYLSFGSHASMSDARLKEIASGLARCGSPYLWVLRPEMAAAVEVGENGLVVPWCAQEAVLSHPAVGLFVTHCGWNSILESVVAGVPVLGCPVLSEQTTNCRQVCTAWGIGAELPQEAGSDEVAALVREMMTGRKGKDAREKTLQWKRLAQVSAQPGGLSYNNIGRMVENILLKHI

SEQ ID NO: 16804 - DNA, 1533 bp, Zea mays subsp. mays
  misc_feature (1)..(1533): Ceres Seq. ID no. 12350231
  misc_feature: MA Experiment ID: 108522 Result: Up-regulated in Transcription
  misc_feature: MA Experiment 108522 PARAMETER Experiment Name: Zm_42deg_Heat_P Parameter: Age (day) Value: 8
  misc_feature: MA Experiment 108522 PARAMETER Experiment Name: Zm_42deg_Heat_P Parameter: Organism Value: Zea mays
  misc_feature: MA Experiment 108522 PARAMETER Experiment Name: Zm_42deg_Heat_P Parameter: Plant Line Value: 35A19
  misc_feature: MA Experiment 108522 PARAMETER Experiment Name: Zm_42deg_Heat_P Parameter: Temperature (deg C) Value: 42 vs. 22
  misc_feature: MA Experiment 108522 PARAMETER Experiment Name: Zm_42deg_Heat_P Parameter: Timepoint (hr) Value: 1
  misc_feature: MA Experiment 108522 PARAMETER Experiment Name: Zm_42deg_Heat_P Parameter: Tissue Value: Aerial
  misc_feature: MA Experiment ID: 108523 Result: Up-regulated in Transcription
  misc_feature: MA Experiment 108523 PARAMETER Experiment Name: Zm_42deg_Heat_P Parameter: Age (day) Value: 8
  misc_feature: MA Experiment 108523 PARAMETER Experiment Name: Zm_42deg_Heat_P Parameter: Organism Value: Zea mays
  misc_feature: MA Experiment 108523 PARAMETER Experiment Name: Zm_42deg_Heat_P Parameter: Plant Line Value: 35A19
  misc_feature: MA Experiment 108523 PARAMETER Experiment Name: Zm_42deg_Heat_P Parameter: Temperature (deg C) Value: 42 vs. 22
  misc_feature: MA Experiment 108523 PARAMETER Experiment Name: Zm_42deg_Heat_P Parameter: Timepoint (hr) Value: 6
  misc_feature: MA Experiment 108523 PARAMETER Experiment Name: Zm_42deg_Heat_P Parameter: Tissue Value: Aerial
  misc_feature: MA Experiment ID: 108527 Result: Up-regulated in Transcription
  misc_feature: MA Experiment 108527 PARAMETER Experiment Name: Zm_5mM_NO_P Parameter: Age (day) Value: 8
  misc_feature: MA Experiment 108527 PARAMETER Experiment Name: Zm_5mM_NO_P Parameter: Organism Value: Zea mays
  misc_feature: MA Experiment 108527 PARAMETER Experiment Name: Zm_5mM_NO_P Parameter: Plant Line Value: 35A19
  misc_feature: MA Experiment 108527 PARAMETER Experiment Name: Zm_5mM_NO_P Parameter: Timepoint (hr) Value: 6
  misc_feature: MA Experiment 108527 PARAMETER Experiment Name: Zm_5mM_NO_P Parameter: Tissue Value: Aerial
  misc_feature: MA Experiment 108527 PARAMETER Experiment Name: Zm_5mM_NO_P Parameter: Treatment Value: 5mM NO vs. No Treatment
  misc_feature: MA Experiment ID: 108536 Result: Up-regulated in Transcription
  misc_feature: MA Experiment 108536 PARAMETER Experiment Name: Zm_Meristem_P Parameter: Age (day) Value: 8
  misc_feature: MA Experiment 108536 PARAMETER Experiment Name: Zm_Meristem_P Parameter: Organism Value: Zea mays
  misc_feature: MA Experiment 108536 PARAMETER Experiment Name: Zm_Meristem_P Parameter: Plant Line Value: 35A19
  misc_feature: MA Experiment 108536 PARAMETER Experiment Name: Zm_Meristem_P Parameter: Tissue Value: Shoot Meristem vs. Above Shoot Meristem
  misc_feature: MA Experiment ID: 108559 Result: Up-regulated in Transcription
  misc_feature: MA Experiment 108559 PARAMETER Experiment Name: Zm_5mM_NO_P Parameter: Age (day) Value: 8
  misc_feature: MA Experiment 108559 PARAMETER Experiment Name: Zm_5mM_NO_P Parameter: Organism Value: Zea mays
  misc_feature: MA Experiment 108559 PARAMETER Experiment Name: Zm_5mM_NO_P Parameter: Plant Line Value: 35A19
  misc_feature: MA Experiment 108559 PARAMETER Experiment Name: Zm_5mM_NO_P Parameter: Timepoint (hr) Value: 12
  misc_feature: MA Experiment 108559 PARAMETER Experiment Name: Zm_5mM_NO_P Parameter: Tissue Value: Aerial
  misc_feature: MA Experiment 108559 PARAMETER Experiment Name: Zm_5mM_NO_P Parameter: Treatment Value: 5mM NO vs. No Treatment
aaaaaccaccaccgcccccagcttccctaccgccctcgttccggagcctagggtttgggaagtcgaaggcctcggcgcttcgtttgccagcgcaatgccggatacgggagcgagaggccgcggcgatgagccggagcctgtgacgccgcagcagcaggcggaggagacccaggcggtggacgatcggcggttgctgcgctcgcagtacctcgccgtgaagggccttatcagcgacgagaaggatgaaatggcgagcgcggactctgataagttctgctccattatcaacagagtggagagcctgcaccagcttgttcagaggcccagggagcaaatagctgacgcagaaaccctgctggaccttactgctagtttggtagcatcagtaaggtcccaatcagttctgggaatcacaccttctgattttattgctggactgctgaagaaattttaaagaaaggaggttccaatgataatgtttcattggactgggctcgtcttgggcttgctacctcacgtgttttcttgtctgcatctggatgtgccaccatgattggtcccatgacgacagaagtgaagccacgaagagtttgtattaggaagaagaggactgcgaggccacatggaaacgcttgccctgaacagcttgctgatccatctgagaaaacaaagtctgatactgacaagaacatgtctgctatatttgatctcctgaggaggaggaaaagtgcaaggctggaacacattattttgaacaggacatcatttgctcaaacagtggagaacatatttgccttgtcattccttgtgaaagatggaagagttgaaatcaaagtgaatgaccagggacatcattttgtctatccaaggaatgcaccagtggcaagtgctgttgcctcaggagatgtggtctataaccactttgtcttccgatttgattttaaagactggaagctcatgaaaggggttgttccagagggagaagagcttatgccgcacaggtcctctcagaccatagccaacacaggaggaaacaatcctacccagtctgaggcacctttggccacaccaagcacaacgatcaggaagctttgcaggaaccgtggcctcatcttgcaagatgagttgatcgcgacaggtgcatatggagtcatggaacaggagatgttagccatgggcacgaacgacgccatggaagatgagatggtagctgccatgggtgtgacggaagctatgggagagaagaggaagtacaagcgcaagcgtctgttccaggacgtctgatgcgttgatccagctgaccgttgctgatggtgtacatgtctaggtagtaggtagagatgccaacccggctcacttcagcttagcttaccttagatgcatttgggtcaaagcaccccatttggtatgggttatggtggctcttggaatggctgagcgtcacgttattttggatgtgttcttaatgttagtttctggcgtacttaagactgaagtaaccatagtgaaggtgttggatgcttgggttgaatt

SEQ ID NO: 16805 - protein, 244 aa, Zea mays subsp. mays
  peptide (1)..(244): Ceres Seq. ID no. 12350232
  misc_feature (1)..(100): Homolog of NCBI NO: 23894296 NR Description: hypothetical protein; similar to S. cerevisiae
  misc_feature (45)..(175): Homolog of NCBI NO: 38344630 NR Description: OSJNBb0003A12.16 [Oryza sativa (japonica
  misc_feature (102)..(194): Homolog of NCBI NO: 5441894 NR Description: EST AU030111(E50640) corresponds to a region of
  misc_feature (1)..(153): Homolog of NCBI NO: 28411875 NR Description: OSJNBa0016N23.27 [Oryza sativa (japonica
  misc_feature (1)..(154): Homolog of NCBI NO: 15232359 NR Description: hypothetical protein; protein id: At3g20760.1
  misc_feature (1)..(154): Homolog of NCBI NO: 9294403 NR Description: gene_id:MOE17.7~unknown protein [Arabidopsis
  misc_feature (1)..(194): Homolog of NCBI NO: 15223745 NR Description: hypothetical protein; protein id: At1g51130.1
MIGPMTTEVKPRRVCIRKKRTARPHGNACPEQLADPSEKTKSDTDKNMSAIFDLLRRRKSARLEHIILNRTSFAQTVENIFALSFLVKDGRVEIKVNDQGHHFVYPRNAPVASAVASGDVVYNHFVFRFDFKDWKLMKGVVPEGEELMPHRSSQTIANTGGNNPTQSEAPLATPSTTIRKLCRNRGLILQDELIATGAYGVMEQEMLAMGTNDAMEDEMVAAMGVTEAMGEKRKYKRKRLFQDV

SEQ ID NO: 16806 - protein, 240 aa, Zea mays subsp. mays
  peptide (1)..(240): Ceres Seq. ID no. 12350233
  misc_feature (1)..(96): Homolog of NCBI NO: 23894296 NR Description: hypothetical protein; similar to S. cerevisiae
  misc_feature (41)..(171): Homolog of NCBI NO: 38344630 NR Description: OSJNBb0003A12.16 [Oryza sativa (japonica
  misc_feature (98)..(190): Homolog of NCBI NO: 5441894 NR Description: EST AU030111(E50640) corresponds to a region of
  misc_feature (1)..(149): Homolog of NCBI NO: 28411875 NR Description: OSJNBa0016N23.27 [Oryza sativa (japonica
  misc_feature (1)..(150): Homolog of NCBI NO: 15232359 NR Description: hypothetical protein; protein id: At3g20760.1
  misc_feature (1)..(150): Homolog of NCBI NO: 9294403 NR Description: gene_id:MOE17.7~unknown protein [Arabidopsis
  misc_feature (1)..(190): Homolog of NCBI NO: 15223745 NR Description: hypothetical protein; protein id: At1g51130.1
MTTEVKPRRVCIRKKRTARPHGNACPEQLADPSEKTKSDTDKNMSAIFDLLRRRKSARLEHIILNRTSFAQTVENIFALSFLVKDGRVEIKVNDQGHHFVYPRNAPVASAVASGDVVYNHFVFRFDFKDWKLMKGVVPEGEELMPHRSSQTIANTGGNNPTQSEAPLATPSTTIRKLCRNRGLILQDELIATGAYGVMEQEMLAMGTNDAMEDEMVAAMGVTEAMGEKRKYKRKRLFQDV

SEQ ID NO: 16807 - protein, 197 aa, Zea mays subsp. mays
  peptide (1)..(197): Ceres Seq. ID no. 12350234
  misc_feature (1)..(53): Homolog of NCBI NO: 23894296 NR Description: hypothetical protein; similar to S. cerevisiae
  misc_feature (1)..(128): Homolog of NCBI NO: 38344630 NR Description: OSJNBb0003A12.16 [Oryza sativa (japonica
  misc_feature (55)..(147): Homolog of NCBI NO: 5441894 NR Description: EST AU030111(E50640) corresponds to a region of
  misc_feature (1)..(106): Homolog of NCBI NO: 28411875 NR Description: OSJNBa0016N23.27 [Oryza sativa (japonica
  misc_feature (1)..(107): Homolog of NCBI NO: 15232359 NR Description: hypothetical protein; protein id: At3g20760.1
  misc_feature (1)..(107): Homolog of NCBI NO: 9294403 NR Description: gene_id:MOE17.7~unknown protein [Arabidopsis
  misc_feature (1)..(147): Homolog of NCBI NO: 15223745 NR Description: hypothetical protein; protein id: At1g51130.1
MSAIFDLLRRRKSARLEHIILNRTSFAQTVENIFALSFLVKDGRVEIKVNDQGHHFVYPRNAPVASAVASGDVVYNHFVFRFDFKDWKLMKGVVPEGEELMPHRSSQTIANTGGNNPTQSEAPLATPSTTIRKLCRNRGLILQDELIATGAYGVMEQEMLAMGTNDAMEDEMVAAMGVTEAMGEKRKYKRKRLFQDV

SEQ ID NO: 16808 - DNA, 1657 bp, Zea mays subsp. mays
  misc_feature (1)..(1657): Ceres Seq. ID no. 12415416
  misc_feature: MA Experiment ID: 108528 Result: Up-regulated in Transcription
  misc_feature: MA Experiment 108528 PARAMETER Experiment Name: Zm_Imbibed_Seeds_P Parameter: Age (day) Value: 5 vs. 2
  misc_feature: MA Experiment 108528 PARAMETER Experiment Name: Zm_Imbibed_Seeds_P Parameter: Organism Value: Zea mays
  misc_feature: MA Experiment 108528 PARAMETER Experiment Name: Zm_Imbibed_Seeds_P Parameter: Plant Line Value: 35A19
  misc_feature: MA Experiment 108528 PARAMETER Experiment Name: Zm_Imbibed_Seeds_P Parameter: Tissue Value: Aerial vs. Embryo
  misc_feature: MA Experiment ID: 108530 Result: Up-regulated in Transcription
  misc_feature: MA Experiment 108530 PARAMETER Experiment Name: Zm_Imbibed_Seeds_P Parameter: Age (day) Value: 6 vs. 2
  misc_feature: MA Experiment 108530 PARAMETER Experiment Name: Zm_Imbibed_Seeds_P Parameter: Organism Value: Zea mays
  misc_feature: MA Experiment 108530 PARAMETER Experiment Name: Zm_Imbibed_Seeds_P Parameter: Plant Line Value: 35A19
  misc_feature: MA Experiment 108530 PARAMETER Experiment Name: Zm_Imbibed_Seeds_P Parameter: Tissue Value: Aerial vs. Embryo
  misc_feature: MA Experiment ID: 108547 Result: Up-regulated in Transcription
  misc_feature: MA Experiment 108547 PARAMETER Experiment Name: Zm_Imbibed_Seeds_P Parameter: Age (day) Value: 4 vs. 2
  misc_feature: MA Experiment 108547 PARAMETER Experiment Name: Zm_Imbibed_Seeds_P Parameter: Organism Value: Zea mays
  misc_feature: MA Experiment 108547 PARAMETER Experiment Name: Zm_Imbibed_Seeds_P Parameter: Plant Line Value: 35A19
  misc_feature: MA Experiment 108547 PARAMETER Experiment Name: Zm_Imbibed_Seeds_P Parameter: Tissue Value: Aerial vs. Embryo
  misc_feature: MA Experiment ID: 108689 Result: Up-regulated in Transcription
  misc_feature: MA Experiment 108689 PARAMETER Experiment Name: Zm_Drought_Roots_P Parameter: Age (day) Value: 9
  misc_feature: MA Experiment 108689 PARAMETER Experiment Name: Zm_Drought_Roots_P Parameter: Organism Value: Zea mays
  misc_feature: MA Experiment 108689 PARAMETER Experiment Name: Zm_Drought_Roots_P Parameter: Plant Line Value: 35A19
  misc_feature: MA Experiment 108689 PARAMETER Experiment Name: Zm_Drought_Roots_P Parameter: Timepoint (hr) Value: 24
  misc_feature: MA Experiment 108689 PARAMETER Experiment Name: Zm_Drought_Roots_P Parameter: Tissue Value: Roots
  misc_feature: MA Experiment 108689 PARAMETER Experiment Name: Zm_Drought_Roots_P Parameter: Treatment Value: Drought vs. No Drought
  misc_feature: MA Experiment ID: 20000534 Result: Down-regulated in Transcription
  misc_feature: MA Experiment 20000534 PARAMETER Experiment Name: Zm_Hybrid_Pollen_P Parameter: Age (day) Value: 8
  misc_feature: MA Experiment 20000534 PARAMETER Experiment Name: Zm_Hybrid_Pollen_P Parameter: Organism Value: Zea mays
  misc_feature: MA Experiment 20000534 PARAMETER Experiment Name: Zm_Hybrid_Pollen_P Parameter: Plant Line Value: 35A19
  misc_feature: MA Experiment 20000534 PARAMETER Experiment Name: Zm_Hybrid_Pollen_P Parameter: Tissue Value: Pollen vs. Aerial
aaaaccaagcaatccgcctcatcccagctcgtcacgatgctcgcgaccgcctcgccgcaccttcaggcggccgcgcgccgcctcttcctggctgtacccgtgaatcagggctgcagtagcatccgcctcccgcgcagatgcttcggccggtacgcgtcggtgcgcgcggcgtcggtgaccgccccgcccgcgaaggagggggcggacgacctggggttcctggagatgtcgtccgggacgcggcgacggtactacatgcttgggggcaagggtggggtcgggaagacgagctgcgcggcgtcgttggccgtgcggttcgccaacaacggccacccgaccctcgtcgtctccaccgaccctgcgcactcgctcagcgattccttcgcacaggatttgagtggcgggacgctcgtgcaggtcgagggccctgattcacctctgtttgcgcttgagataaatcctgaaaaggcccgggaggagtttcggacagtaagtcaaaaaaatggaggaacaggagtaaaagatttcatggatagcatgggccttggggtgcttgttgagcagcttggagagttaaaattgggggaattgttggacacaccaccacctggcttggatgaagcaattgcaatttctaaggttatgcaattccttgaagcacaagaatacagcatgtttagtcgcattgtatttgacactgcccctacgggccatacactccggttattatccttgccagatttcttggatgcgtccattgggaaaatcttgaagctgaggagtaagattgcttctgcaacatcagctattaaatcagtatttggacaagaggtccaacagcaggatgcagcgaacaaattagagcaactcagagaaaggatggtcaaagtaagaaagcttttccgcgacacggaatcaacagagtttataatcgtgacaatcccaacggtgatggcaatcagtgagtcatcaagactgcattcttcgttgcaaaaggaaagtgttcctgtaaggagactcattgtgaaccaagttctgccaccttcaacatcggactgtaaattctgttctataaaaagaaaggatcaaacgcgtgcattggatatgatacggactgacccagagttaaaaggtttgaacattatccaagcacctcttgtggacatggagattagaggtgttccggctctcaattttttgggtgatatactgtggaagtaacttcagttatgggaaacatgatcgcttataagggtgcttaattggccaatatcactgttagcctgctgcacaattgcactgctctgcaactagcaatctgtgggctcttctggttgtttccagctaacaattgcacaataagcttaagttgtttccagctacaatacagcacaacacattctccatggtgcgttaaatctgagtagaaagcaccaaattggagggttttgctgcactcctgcactagcatttgatgacctgttactcttggcagtgatgcagattggatttagccccaaattaggctaattgaagtgaaatgctgtaatatttatccttttatcaattatccccaagattaatagcaacacttgtggccttttggttcggcgactttgtaaaactcttcgtttcttatgtgccatctcaattttgt

SEQ ID NO: 16809 - protein, 406 aa, Zea mays subsp. mays
  peptide (1)..(406): Ceres Seq. ID no. 12415417
  misc_feature (82)..(379): Pfam Name: Anion-transporting ATPase Pfam Description: Anion-transporting ATPase
  misc_feature (172)..(404): Homolog of NCBI NO: 4757796 NR Description: arsA arsenite transporter, ATP-binding, homolog 1
  misc_feature (74)..(405): Homolog of NCBI NO: 20095116 NR Description: Arsenite transporting ATPase [Methanopyrus
  misc_feature (74)..(405): Homolog of NCBI NO: 15669329 NR Description: arsenical pump-driving ATPase (arsA)
  misc_feature (84)..(405): Homolog of NCBI NO: 15679508 NR Description: arsenical pump-driving ATPase
  misc_feature (50)..(220): Homolog of NCBI NO: 6056208 NR Description: putative ATPase [Arabidopsis thaliana]
  misc_feature (204)..(406): Homolog of NCBI NO: 6056208 NR Description: putative ATPase [Arabidopsis thaliana]
  misc_feature (66)..(406): Homolog of NCBI NO: 9759337 NR Description: arsenite translocating ATPase-like protein
  misc_feature (46)..(406): Homolog of NCBI NO: 30697424 NR Description: ATPase - like protein [Arabidopsis thaliana]
  misc_feature (68)..(379): Homolog of NCBI NO: 5824321 NR Description: ATPase [Solanum tuberosum]
  misc_feature (50)..(406): Homolog of NCBI NO: 30681260 NR Description: ATPase -related [Arabidopsis thaliana]
KTKQSASSQLVTMLATASPHLQAAARRLFLAVPVNQGCSSIRLPRRCFGRYASVRAASVTAPPAKEGADDLGFLEMSSGTRRRYYMLGGKGGVGKTSCAASLAVRFANNGHPTLVVSTDPAHSLSDSFAQDLSGGTLVQVEGPDSPLFALEINPEKAREEFRTVSQKNGGTGVKDFMDSMGLGVLVEQLGELKLGELLDTPPPGLDEAIAISKVMQFLEAQEYSMFSRIVFDTAPTGHTLRLLSLPDFLDASIGKILKLRSKIASATSAIKSVFGQEVQQQDAANKLEQLRERMVKVRKLFRDTESTEFIIVTIPTVMAISESSRLHSSLQKESVPVRRLIVNQVLPPSTSDCKFCSIKRKDQTRALDMIRTDPELKGLNIIQAPLVDMEIRGVPALNFLGDILWK

SEQ ID NO: 16810 - protein, 394 aa, Zea mays subsp. mays
  peptide (1)..(394): Ceres Seq. ID no. 12415418
  misc_feature (70)..(367): Pfam Name: Anion-transporting ATPase Pfam Description: Anion-transporting ATPase
  misc_feature (62)..(393): Homolog of NCBI NO: 20095116 NR Description: Arsenite transporting ATPase [Methanopyrus
  misc_feature (62)..(393): Homolog of NCBI NO: 15669329 NR Description: arsenical pump-driving ATPase (arsA)
  misc_feature (72)..(393): Homolog of NCBI NO: 15679508 NR Description: arsenical pump-driving ATPase
  misc_feature (38)..(208): Homolog of NCBI NO: 6056208 NR Description: putative ATPase [Arabidopsis thaliana]
  misc_feature (192)..(394): Homolog of NCBI NO: 6056208 NR Description: putative ATPase [Arabidopsis thaliana]
  misc_feature (160)..(392): Homolog of NCBI NO: 4757796 NR Description: arsA arsenite transporter, ATP-binding, homolog 1
  misc_feature (54)..(394): Homolog of NCBI NO: 9759337 NR Description: arsenite translocating ATPase-like protein
  misc_feature (34)..(394): Homolog of NCBI NO: 30697424 NR Description: ATPase - like protein [Arabidopsis thaliana]
  misc_feature (56)..(367): Homolog of NCBI NO: 5824321 NR Description: ATPase [Solanum tuberosum]
  misc_feature (38)..(394): Homolog of NCBI NO: 30681260 NR Description: ATPase -related [Arabidopsis thaliana]
MLATASPHLQAAARRLFLAVPVNQGCSSIRLPRRCFGRYASVRAASVTAPPAKEGADDLGFLEMSSGTRRRYYMLGGKGGVGKTSCAASLAVRFANNGHPTLVVSTDPAHSLSDSFAQDLSGGTLVQVEGPDSPLFALEINPEKAREEFRTVSQKNGGTGVKDFMDSMGLGVLVEQLGELKLGELLDTPPPGLDEAIAISKVMQFLEAQEYSMFSRIVFDTAPTGHTLRLLSLPDFLDASIGKILKLRSKIASATSAIKSVFGQEVQQQDAANKLEQLRERMVKVRKLFRDTESTEFIIVTIPTVMAISESSRLHSSLQKESVPVRRLIVNQVLPPSTSDCKFCSIKRKDQTRALDMIRTDPELKGLNIIQAPLVDMEIRGVPALNFLGDILWK

SEQ ID NO: 16811 - protein, 331 aa, Zea mays subsp. mays
  peptide (1)..(331): Ceres Seq. ID no. 12415419
  misc_feature (7)..(304): Pfam Name: Anion-transporting ATPase Pfam Description: Anion-transporting ATPase
  misc_feature (97)..(329): Homolog of NCBI NO: 4757796 NR Description: arsA arsenite transporter, ATP-binding, homolog 1
  misc_feature (1)..(330): Homolog of NCBI NO: 20095116 NR Description: Arsenite transporting ATPase [Methanopyrus
  misc_feature (1)..(330): Homolog of NCBI NO: 15669329 NR Description: arsenical pump-driving ATPase (arsA)
  misc_feature (9)..(330): Homolog of NCBI NO: 15679508 NR Description: arsenical pump-driving ATPase
  misc_feature (1)..(145): Homolog of NCBI NO: 6056208 NR Description: putative ATPase [Arabidopsis thaliana]
  misc_feature (129)..(331): Homolog of NCBI NO: 6056208 NR Description: putative ATPase [Arabidopsis thaliana]
  misc_feature (1)..(331): Homolog of NCBI NO: 9759337 NR Description: arsenite translocating ATPase-like protein
  misc_feature (1)..(331): Homolog of NCBI NO: 30697424 NR Description: ATPase - like protein [Arabidopsis thaliana]
  misc_feature (1)..(304): Homolog of NCBI NO: 5824321 NR Description: ATPase [Solanum tuberosum]
  misc_feature (1)..(331): Homolog of NCBI NO: 30681260 NR Description: ATPase -related [Arabidopsis thaliana]
MSSGTRRRYYMLGGKGGVGKTSCAASLAVRFANNGHPTLVVSTDPAHSLSDSFAQDLSGGTLVQVEGPDSPLFALEINPEKAREEFRTVSQKNGGTGVKDFMDSMGLGVLVEQLGELKLGELLDTPPPGLDEAIAISKVMQFLEAQEYSMFSRIVFDTAPTGHTLRLLSLPDFLDASIGKILKLRSKIASATSAIKSVFGQEVQQQDAANKLEQLRERMVKVRKLFRDTESTEFIIVTIPTVMAISESSRLHSSLQKESVPVRRLIVNQVLPPSTSDCKFCSIKRKDQTRALDMIRTDPELKGLNIIQAPLVDMEIRGVPALNFLGDILWK

SEQ ID NO: 16812 - DNA, 1761 bp, Zea mays subsp. mays; identical to SEQ ID NO: 6671
  misc_feature (1)..(1761): Ceres Seq. ID no. 12382163
  misc_feature: MA Experiment ID: 108515 Result: Down-regulated in Transcription
  misc_feature: MA Experiment 108515 PARAMETER Experiment Name: Zm_2mM_SA_P Parameter: Age (day) Value: 8
  misc_feature: MA Experiment 108515 PARAMETER Experiment Name: Zm_2mM_SA_P Parameter: Organism Value: Zea mays
  misc_feature: MA Experiment 108515 PARAMETER Experiment Name: Zm_2mM_SA_P Parameter: Plant Line Value: 35A19
  misc_feature: MA Experiment 108515 PARAMETER Experiment Name: Zm_2mM_SA_P Parameter: Timepoint (hr) Value: 12
  misc_feature: MA Experiment 108515 PARAMETER Experiment Name: Zm_2mM_SA_P Parameter: Tissue Value: Aerial
  misc_feature: MA Experiment 108515 PARAMETER Experiment Name: Zm_2mM_SA_P Parameter: Treatment Value: 2mM SA vs. No Treatment
  misc_feature: MA Experiment ID: 108522 Result: Down-regulated in Transcription
  misc_feature: MA Experiment 108522 PARAMETER Experiment Name: Zm_42deg_Heat_P Parameter: Age (day) Value: 8
  misc_feature: MA Experiment 108522 PARAMETER Experiment Name: Zm_42deg_Heat_P Parameter: Organism Value: Zea mays
  misc_feature: MA Experiment 108522 PARAMETER Experiment Name: Zm_42deg_Heat_P Parameter: Plant Line Value: 35A19
  misc_feature: MA Experiment 108522 PARAMETER Experiment Name: Zm_42deg_Heat_P Parameter: Temperature (deg C) Value: 42 vs. 22
  misc_feature: MA Experiment 108522 PARAMETER Experiment Name: Zm_42deg_Heat_P Parameter: Timepoint (hr) Value: 1
  misc_feature: MA Experiment 108522 PARAMETER Experiment Name: Zm_42deg_Heat_P Parameter: Tissue Value: Aerial
  misc_feature: MA Experiment ID: 108523 Result: Down-regulated in Transcription
  misc_feature: MA Experiment 108523 PARAMETER Experiment Name: Zm_42deg_Heat_P Parameter: Age (day) Value: 8
  misc_feature: MA Experiment 108523 PARAMETER Experiment Name: Zm_42deg_Heat_P Parameter: Organism Value: Zea mays
  misc_feature: MA Experiment 108523 PARAMETER Experiment Name: Zm_42deg_Heat_P Parameter: Plant Line Value: 35A19
  misc_feature: MA Experiment 108523 PARAMETER Experiment Name: Zm_42deg_Heat_P Parameter: Temperature (deg C) Value: 42 vs. 22
  misc_feature: MA Experiment 108523 PARAMETER Experiment Name: Zm_42deg_Heat_P Parameter: Timepoint (hr) Value: 6
  misc_feature: MA Experiment 108523 PARAMETER Experiment Name: Zm_42deg_Heat_P Parameter: Tissue Value: Aerial
  misc_feature: MA Experiment ID: 108526 Result: Down-regulated in Transcription
  misc_feature: MA Experiment 108526 PARAMETER Experiment Name: Zm_5mM_NO_P Parameter: Age (day) Value: 8
  misc_feature: MA Experiment 108526 PARAMETER Experiment Name: Zm_5mM_NO_P Parameter: Organism Value: Zea mays
  misc_feature: MA Experiment 108526 PARAMETER Experiment Name: Zm_5mM_NO_P Parameter: Plant Line Value: 35A19
  misc_feature: MA Experiment 108526 PARAMETER Experiment Name: Zm_5mM_NO_P Parameter: Timepoint (hr) Value: 1
  misc_feature: MA Experiment 108526 PARAMETER Experiment Name: Zm_5mM_NO_P Parameter: Tissue Value: Aerial
  misc_feature: MA Experiment 108526 PARAMETER Experiment Name: Zm_5mM_NO_P Parameter: Treatment Value: 5mM NO vs. No Treatment
  misc_feature: MA Experiment ID: 108527 Result: Down-regulated in Transcription
  misc_feature: MA Experiment 108527 PARAMETER Experiment Name: Zm_5mM_NO_P Parameter: Age (day) Value: 8
  misc_feature: MA Experiment 108527 PARAMETER Experiment Name: Zm_5mM_NO_P Parameter: Organism Value: Zea mays
  misc_feature: MA Experiment 108527 PARAMETER Experiment Name: Zm_5mM_NO_P Parameter: Plant Line Value: 35A19
  misc_feature: MA Experiment 108527 PARAMETER Experiment Name: Zm_5mM_NO_P Parameter: Timepoint (hr) Value: 6
  misc_feature: MA Experiment 108527 PARAMETER Experiment Name: Zm_5mM_NO_P Parameter: Tissue Value: Aerial
  misc_feature: MA Experiment 108527 PARAMETER Experiment Name: Zm_5mM_NO_P Parameter: Treatment Value: 5mM NO vs. No Treatment
  misc_feature: MA Experiment ID: 108528 Result: Up-regulated in Transcription
  misc_feature: MA Experiment 108528 PARAMETER Experiment Name: Zm_Imbibed_Seeds_P Parameter: Age (day) Value: 5 vs. 2
  misc_feature: MA Experiment 108528 PARAMETER Experiment Name: Zm_Imbibed_Seeds_P Parameter: Organism Value: Zea mays
  misc_feature: MA Experiment 108528 PARAMETER Experiment Name: Zm_Imbibed_Seeds_P Parameter: Plant Line Value: 35A19
  misc_feature: MA Experiment 108528 PARAMETER Experiment Name: Zm_Imbibed_Seeds_P Parameter: Tissue Value: Aerial vs. Embryo
  misc_feature: MA Experiment ID: 108529 Result: Up-regulated in Transcription
  misc_feature: MA Experiment 108529 PARAMETER Experiment Name: Zm_Imbibed_Seeds_P Parameter: Age (day) Value: 5 vs. 2
  misc_feature: MA Experiment 108529 PARAMETER Experiment Name: Zm_Imbibed_Seeds_P Parameter: Organism Value: Zea mays
  misc_feature: MA Experiment 108529 PARAMETER Experiment Name: Zm_Imbibed_Seeds_P Parameter: Plant Line Value: 35A19
  misc_feature: MA Experiment 108529 PARAMETER Experiment Name: Zm_Imbibed_Seeds_P Parameter: Tissue Value: Roots vs. Embryo
  misc_feature: MA Experiment ID: 108530 Result: Up-regulated in Transcription
  misc_feature: MA Experiment 108530 PARAMETER Experiment Name: Zm_Imbibed_Seeds_P Parameter: Age (day) Value: 6 vs. 2
  misc_feature: MA Experiment 108530 PARAMETER Experiment Name: Zm_Imbibed_Seeds_P Parameter: Organism Value: Zea mays
  misc_feature: MA Experiment 108530 PARAMETER Experiment Name: Zm_Imbibed_Seeds_P Parameter: Plant Line Value: 35A19
  misc_feature: MA Experiment 108530 PARAMETER Experiment Name: Zm_Imbibed_Seeds_P Parameter: Tissue Value: Aerial vs. Embryo
  misc_feature: MA Experiment ID: 108535 Result: Down-regulated in Transcription
  misc_feature: MA Experiment 108535 PARAMETER Experiment Name: Zm_Meristem_P Parameter: Age (day) Value: 8
  misc_feature: MA Experiment 108535 PARAMETER Experiment Name: Zm_Meristem_P Parameter: Organism Value: Zea mays
  misc_feature: MA Experiment 108535 PARAMETER Experiment Name: Zm_Meristem_P Parameter: Plant Line Value: 35A19
  misc_feature: MA Experiment 108535 PARAMETER Experiment Name: Zm_Meristem_P Parameter: Tissue Value: Root Meristem vs. Above Root Meristem
  misc_feature: MA Experiment ID: 108543 Result: Up-regulated in Transcription
  misc_feature: MA Experiment ID: 108545 Result: Up-regulated in Transcription
  misc_feature: MA Experiment 108545 PARAMETER Experiment Name: Zm_Imbibed_Seeds_P Parameter: Age (day) Value: 3 vs. 2
  misc_feature: MA Experiment 108545 PARAMETER Experiment Name: Zm_Imbibed_Seeds_P Parameter: Organism Value: Zea mays
  misc_feature: MA Experiment 108545 PARAMETER Experiment Name: Zm_Imbibed_Seeds_P Parameter: Plant Line Value: 35A19
  misc_feature: MA Experiment 108545 PARAMETER Experiment Name: Zm_Imbibed_Seeds_P Parameter: Tissue Value: Aerial vs. Embryo
  misc_feature: MA Experiment ID: 108546 Result: Up-regulated in Transcription
  misc_feature: MA Experiment 108546 PARAMETER Experiment Name: Zm_Imbibed_Seeds_P Parameter: Age (day) Value: 3 vs. 2
  misc_feature: MA Experiment 108546 PARAMETER Experiment Name: Zm_Imbibed_Seeds_P Parameter: Organism Value: Zea mays
  misc_feature: MA Experiment 108546 PARAMETER Experiment Name: Zm_Imbibed_Seeds_P Parameter: Plant Line Value: 35A19
  misc_feature: MA Experiment 108546 PARAMETER Experiment Name: Zm_Imbibed_Seeds_P Parameter: Tissue Value: Roots vs. Embryo
  misc_feature: MA Experiment ID: 108547 Result: Up-regulated in Transcription
  misc_feature: MA Experiment 108547 PARAMETER Experiment Name: Zm_Imbibed_Seeds_P Parameter: Age (day) Value: 4 vs. 2
  misc_feature: MA Experiment 108547 PARAMETER Experiment Name: Zm_Imbibed_Seeds_P Parameter: Organism Value: Zea mays
  misc_feature: MA Experiment 108547 PARAMETER Experiment Name: Zm_Imbibed_Seeds_P Parameter: Plant Line Value: 35A19
  misc_feature: MA Experiment 108547 PARAMETER Experiment Name: Zm_Imbibed_Seeds_P Parameter: Tissue Value: Aerial vs. Embryo
  misc_feature: MA Experiment ID: 108559 Result: Down-regulated in Transcription
  misc_feature: MA Experiment 108559 PARAMETER Experiment Name: Zm_5mM_NO_P Parameter: Age (day) Value: 8
  misc_feature: MA Experiment 108559 PARAMETER Experiment Name: Zm_5mM_NO_P Parameter: Organism Value: Zea mays
  misc_feature: MA Experiment 108559 PARAMETER Experiment Name: Zm_5mM_NO_P Parameter: Plant Line Value: 35A19
  misc_feature: MA Experiment 108559 PARAMETER Experiment Name: Zm_5mM_NO_P Parameter: Timepoint (hr) Value: 12
  misc_feature: MA Experiment 108559 PARAMETER Experiment Name: Zm_5mM_NO_P Parameter: Tissue Value: Aerial
  misc_feature: MA Experiment 108559 PARAMETER Experiment Name: Zm_5mM_NO_P Parameter: Treatment Value: 5mM NO vs. No Treatment
  misc_feature: MA Experiment ID: 108687 Result: Down-regulated in Transcription
  misc_feature: MA Experiment 108687 PARAMETER Experiment Name: Zm_Embryos-Flowers__P Parameter: Tissue Value: Embryo vs. Aerial+
  misc_feature: MA Experiment ID: 108689 Result: Up-regulated in Transcription
  misc_feature: MA Experiment 108689 PARAMETER Experiment Name: Zm_Drought_Roots_P Parameter: Age (day) Value: 9
  misc_feature: MA Experiment 108689 PARAMETER Experiment Name: Zm_Drought_Roots_P Parameter: Organism Value: Zea mays
  misc_feature: MA Experiment 108689 PARAMETER Experiment Name: Zm_Drought_Roots_P Parameter: Plant Line Value: 35A19
  misc_feature: MA Experiment 108689 PARAMETER Experiment Name: Zm_Drought_Roots_P Parameter: Timepoint (hr) Value: 24
  misc_feature: MA Experiment 108689 PARAMETER Experiment Name: Zm_Drought_Roots_P Parameter: Tissue Value: Roots
  misc_feature: MA Experiment 108689 PARAMETER Experiment Name: Zm_Drought_Roots_P Parameter: Treatment Value: Drought vs. No Drought
  misc_feature: MA Experiment ID: 20000477 Result: Down-regulated in Transcription
  misc_feature: MA Experiment 20000477 PARAMETER Experiment Name: Zm_5mM_SA_P Parameter: Age (day) Value: 10
  misc_feature: MA Experiment 20000477 PARAMETER Experiment Name: Zm_5mM_SA_P Parameter: Organism Value: Zea mays
  misc_feature: MA Experiment 20000477 PARAMETER Experiment Name: Zm_5mM_SA_P Parameter: Plant Line Value: 35A19
  misc_feature: MA Experiment 20000477 PARAMETER Experiment Name: Zm_5mM_SA_P Parameter: Timepoint (hr) Value: 48
  misc_feature: MA Experiment 20000477 PARAMETER Experiment Name: Zm_5mM_SA_P Parameter: Tissue Value: Aerial
  misc_feature: MA Experiment 20000477 PARAMETER Experiment Name: Zm_5mM_SA_P Parameter: Treatment Value: 5mM SA vs. No Treatment
  misc_feature: MA Experiment ID: 20000478 Result: Down-regulated in Transcription
  misc_feature: MA Experiment 20000478 PARAMETER Experiment Name: Zm_5mM_SA_P Parameter: Age (day) Value: 11
  misc_feature: MA Experiment 20000478 PARAMETER Experiment Name: Zm_5mM_SA_P Parameter: Organism Value: Zea mays
  misc_feature: MA Experiment 20000478 PARAMETER Experiment Name: Zm_5mM_SA_P Parameter: Plant Line Value: 35A19
  misc_feature: MA Experiment 20000478 PARAMETER Experiment Name: Zm_5mM_SA_P Parameter: Timepoint (hr) Value: 72
  misc_feature: MA Experiment 20000478 PARAMETER Experiment Name: Zm_5mM_SA_P Parameter: Tissue Value: Aerial
  misc_feature: MA Experiment 20000478 PARAMETER Experiment Name: Zm_5mM_SA_P Parameter: Treatment Value: 5mM SA vs. No Treatment
  misc_feature: MA Experiment ID: 20000487 Result: Down-regulated in Transcription
  misc_feature: MA Experiment 20000487 PARAMETER Experiment Name: Zm_50mM_NH4NO3_L_to_H_P Parameter: Organism Value: Zea mays
  misc_feature: MA Experiment 20000487 PARAMETER Experiment Name: Zm_50mM_NH4NO3_L_to_H_P Parameter: Timepoint (hr) Value: 4
  misc_feature: MA Experiment 20000487 PARAMETER Experiment Name: Zm_50mM_NH4NO3_L_to_H_P Parameter: Tissue Value: Leaves
  misc_feature: MA Experiment 20000487 PARAMETER Experiment Name: Zm_50mM_NH4NO3_L_to_H_P Parameter: Treatment Value: 50mM NH4NO3 vs. 100mM Mannitol
  misc_feature: MA Experiment ID: 20000535 Result: Down-regulated in Transcription
  misc_feature: MA Experiment 20000535 PARAMETER Experiment Name: Zm_Hybrid_Seed_Dev_P Parameter: DAP Value: 30 vs. 12
  misc_feature: MA Experiment 20000535 PARAMETER Experiment Name: Zm_Hybrid_Seed_Dev_P Parameter: Organism Value: Zea mays
  misc_feature: MA Experiment 20000535 PARAMETER Experiment Name: Zm_Hybrid_Seed_Dev_P Parameter: Plant Line Value: 35A19
  misc_feature: MA Experiment 20000535 PARAMETER Experiment Name: Zm_Hybrid_Seed_Dev_P Parameter: Tissue Value: Embryo vs. Unfert Floret

SEQ ID NO: 16813 - protein, 443 aa, Zea mays subsp. mays; identical to SEQ ID NO: 6672
  peptide (1)..(443): Ceres Seq. ID no. 12382164
  misc_feature (17)..(272): Pfam Name: Protein kinase domain Pfam Description: Protein kinase domain

SEQ ID NO: 16814 - protein, 439 aa, Zea mays subsp. mays; identical to SEQ ID NO: 6673
  peptide (1)..(439): Ceres Seq. ID no. 12382165
  misc_feature (13)..(268): Pfam Name: Protein kinase domain Pfam Description: Protein kinase domain

SEQ ID NO: 16815 - protein, 386 aa, Zea mays subsp. mays; identical to SEQ ID NO: 6674
  peptide (1)..(386): Ceres Seq. ID no. 12382166
  misc_feature (1)..(215): Pfam Name: Protein kinase domain Pfam Description: Protein kinase domain

SEQ ID NO: 16816 - DNA, 1405 bp, Zea mays subsp. mays
  misc_feature (1)..(1405): Ceres Seq. ID no. 12367813
  misc_feature: MA Experiment ID: 108528 Result: Up-regulated in Transcription
  misc_feature: MA Experiment 108528 PARAMETER Experiment Name: Zm_Imbibed_Seeds_P Parameter: Age (day) Value: 5 vs. 2
  misc_feature: MA Experiment 108528 PARAMETER Experiment Name: Zm_Imbibed_Seeds_P Parameter: Organism Value: Zea mays
  misc_feature: MA Experiment 108528 PARAMETER Experiment Name: Zm_Imbibed_Seeds_P Parameter: Plant Line Value: 35A19
  misc_feature: MA Experiment 108528 PARAMETER Experiment Name: Zm_Imbibed_Seeds_P Parameter: Tissue Value: Aerial vs. Embryo
  misc_feature: MA Experiment ID: 108530 Result: Up-regulated in Transcription
  misc_feature: MA Experiment 108530 PARAMETER Experiment Name: Zm_Imbibed_Seeds_P Parameter: Age (day) Value: 6 vs. 2
  misc_feature: MA Experiment 108530 PARAMETER Experiment Name: Zm_Imbibed_Seeds_P Parameter: Organism Value: Zea mays
  misc_feature: MA Experiment 108530 PARAMETER Experiment Name: Zm_Imbibed_Seeds_P Parameter: Plant Line Value: 35A19
  misc_feature: MA Experiment 108530 PARAMETER Experiment Name: Zm_Imbibed_Seeds_P Parameter: Tissue Value: Aerial vs. Embryo
  misc_feature: MA Experiment ID: 108532 Result: Up-regulated in Transcription
  misc_feature: MA Experiment 108532 PARAMETER Experiment Name: Zm_20uM_KNO3_H-to-L_P Parameter: Age (day) Value: 11
  misc_feature: MA Experiment 108532 PARAMETER Experiment Name: Zm_20uM_KNO3_H-to-L_P Parameter: Organism Value: Zea mays
  misc_feature: MA Experiment 108532 PARAMETER Experiment Name: Zm_20uM_KNO3_H-to-L_P Parameter: Plant Line Value: 35A19
  misc_feature: MA Experiment 108532 PARAMETER Experiment Name: Zm_20uM_KNO3_H-to-L_P Parameter: Timepoint (hr) Value: 16
  misc_feature: MA Experiment 108532 PARAMETER Experiment Name: Zm_20uM_KNO3_H-to-L_P Parameter: Tissue Value: Roots
  misc_feature: MA Experiment 108532 PARAMETER Experiment Name: Zm_20uM_KNO3_H-to-L_P Parameter: Treatment Value: 20uM KNO3 vs. 60mM KNO3
  misc_feature: MA Experiment ID: 108536 Result: Up-regulated in Transcription
  misc_feature: MA Experiment 108536 PARAMETER Experiment Name: Zm_Meristem_P Parameter: Age (day) Value: 8
  misc_feature: MA Experiment 108536 PARAMETER Experiment Name: Zm_Meristem_P Parameter: Organism Value: Zea mays
  misc_feature: MA Experiment 108536 PARAMETER Experiment Name: Zm_Meristem_P Parameter: Plant Line Value: 35A19
  misc_feature: MA Experiment 108536 PARAMETER Experiment Name: Zm_Meristem_P Parameter: Tissue Value: Shoot Meristem vs. Above Shoot Meristem
  misc_feature: MA Experiment ID: 108543 Result: Down-regulated in Transcription
  misc_feature: MA Experiment ID: 108544 Result: Up-regulated in Transcription
  misc_feature: MA Experiment ID: 108545 Result: Up-regulated in Transcription
  misc_feature: MA Experiment 108545 PARAMETER Experiment Name: Zm_Imbibed_Seeds_P Parameter: Age (day) Value: 3 vs. 2
  misc_feature: MA Experiment 108545 PARAMETER Experiment Name: Zm_Imbibed_Seeds_P Parameter: Organism Value: Zea mays
  misc_feature: MA Experiment 108545 PARAMETER Experiment Name: Zm_Imbibed_Seeds_P Parameter: Plant Line Value: 35A19
  misc_feature: MA Experiment 108545 PARAMETER Experiment Name: Zm_Imbibed_Seeds_P Parameter: Tissue Value: Aerial vs. Embryo
  misc_feature: MA Experiment ID: 108547 Result: Up-regulated in Transcription
  misc_feature: MA Experiment 108547 PARAMETER Experiment Name: Zm_Imbibed_Seeds_P Parameter: Age (day) Value: 4 vs. 2
  misc_feature: MA Experiment 108547 PARAMETER Experiment Name: Zm_Imbibed_Seeds_P Parameter: Organism Value: Zea mays
  misc_feature: MA Experiment 108547 PARAMETER Experiment Name: Zm_Imbibed_Seeds_P Parameter: Plant Line Value: 35A19
  misc_feature: MA Experiment 108547 PARAMETER Experiment Name: Zm_Imbibed_Seeds_P Parameter: Tissue Value: Aerial vs. Embryo
  misc_feature: MA Experiment ID: 108559 Result: Down-regulated in Transcription
  misc_feature: MA Experiment 108559 PARAMETER Experiment Name: Zm_5mM_NO_P Parameter: Age (day) Value: 8
  misc_feature: MA Experiment 108559 PARAMETER Experiment Name: Zm_5mM_NO_P Parameter: Organism Value: Zea mays
  misc_feature: MA Experiment 108559 PARAMETER Experiment Name: Zm_5mM_NO_P Parameter: Plant Line Value: 35A19
  misc_feature: MA Experiment 108559 PARAMETER Experiment Name: Zm_5mM_NO_P Parameter: Timepoint (hr) Value: 12
  misc_feature: MA Experiment 108559 PARAMETER Experiment Name: Zm_5mM_NO_P Parameter: Tissue Value: Aerial
  misc_feature: MA Experiment 108559 PARAMETER Experiment Name: Zm_5mM_NO_P Parameter: Treatment Value: 5mM NO vs. No Treatment
  misc_feature: MA Experiment ID: 108688 Result: Down-regulated in Transcription
  misc_feature: MA Experiment 108688 PARAMETER Experiment Name: Zm_Embryos-Flowers__P Parameter: Tissue Value: Immature Flowers vs. Aerial+
  misc_feature: MA Experiment ID: 20000487 Result: Up-regulated in Transcription
  misc_feature: MA Experiment 20000487 PARAMETER Experiment Name: Zm_50mM_NH4NO3_L_to_H_P Parameter: Organism Value: Zea mays
  misc_feature: MA Experiment 20000487 PARAMETER Experiment Name: Zm_50mM_NH4NO3_L_to_H_P Parameter: Timepoint (hr) Value: 4
  misc_feature: MA Experiment 20000487 PARAMETER Experiment Name: Zm_50mM_NH4NO3_L_to_H_P Parameter: Tissue Value: Leaves
  misc_feature: MA Experiment 20000487 PARAMETER Experiment Name: Zm_50mM_NH4NO3_L_to_H_P Parameter: Treatment Value: 50mM NH4NO3 vs. 100mM Mannitol
  misc_feature: MA Experiment ID: 20000488 Result: Up-regulated in Transcription
  misc_feature: MA Experiment 20000488 PARAMETER Experiment Name: Zm_50mM_NH4NO3_L_to_H_P Parameter: Organism Value: Zea mays
  misc_feature: MA Experiment 20000488 PARAMETER Experiment Name: Zm_50mM_NH4NO3_L_to_H_P Parameter: Timepoint (hr) Value: 8
  misc_feature: MA Experiment 20000488 PARAMETER Experiment Name: Zm_50mM_NH4NO3_L_to_H_P Parameter: Tissue Value: Leaves
  misc_feature: MA Experiment 20000488 PARAMETER Experiment Name: Zm_50mM_NH4NO3_L_to_H_P Parameter: Treatment Value: 50mM NH4NO3 vs. 100mM Mannitol
  misc_feature: MA Experiment ID: 20001612 Result: Up-regulated in Transcription
  misc_feature: MA Experiment 20001612 PARAMETER Experiment Name: Zm_50ppm_KNO3_L-to-H_P Parameter: Age (day) Value: 19
  misc_feature: MA Experiment 20001612 PARAMETER Experiment Name: Zm_50ppm_KNO3_L-to-H_P Parameter: Organism Value: Zea mays
  misc_feature: MA Experiment 20001612 PARAMETER Experiment Name: Zm_50ppm_KNO3_L-to-H_P Parameter: Plant Line Value: 35A19
  misc_feature: MA Experiment 20001612 PARAMETER Experiment Name: Zm_50ppm_KNO3_L-to-H_P Parameter: Timepoint (hr) Value: 8
  misc_feature: MA Experiment 20001612 PARAMETER Experiment Name: Zm_50ppm_KNO3_L-to-H_P Parameter: Tissue Value: Roots
  misc_feature: MA Experiment 20001612 PARAMETER Experiment Name: Zm_50ppm_KNO3_L-to-H_P Parameter: Treatment Value: 50ppm KNO3 vs. 50ppm KCl
  misc_feature: MA Experiment ID: 20001613 Result: Up-regulated in Transcription
  misc_feature: MA Experiment 20001613 PARAMETER Experiment Name: Zm_50ppm_KNO3_L-to-H_P Parameter: Age (day) Value: 20
  misc_feature: MA Experiment 20001613 PARAMETER Experiment Name: Zm_50ppm_KNO3_L-to-H_P Parameter: Organism Value: Zea mays
  misc_feature: MA Experiment 20001613 PARAMETER Experiment Name: Zm_50ppm_KNO3_L-to-H_P Parameter: Plant Line Value: 35A19
  misc_feature: MA Experiment 20001613 PARAMETER Experiment Name: Zm_50ppm_KNO3_L-to-H_P Parameter: Timepoint (hr) Value: 24
  misc_feature: MA Experiment 20001613 PARAMETER Experiment Name: Zm_50ppm_KNO3_L-to-H_P Parameter: Tissue Value: Roots
  misc_feature: MA Experiment 20001613 PARAMETER Experiment Name: Zm_50ppm_KNO3_L-to-H_P Parameter: Treatment Value: 50ppm KNO3 vs. 50ppm KCl
  misc_feature: MA Experiment ID: 20001614 Result: Up-regulated in Transcription
  misc_feature: MA Experiment 20001614 PARAMETER Experiment Name: Zm_50ppm_KNO3_L-to-H_P Parameter: Age (day) Value: 21
  misc_feature: MA Experiment 20001614 PARAMETER Experiment Name: Zm_50ppm_KNO3_L-to-H_P Parameter: Organism Value: Zea mays
  misc_feature: MA Experiment 20001614 PARAMETER Experiment Name: Zm_50ppm_KNO3_L-to-H_P Parameter: Plant Line Value: 35A19
  misc_feature: MA Experiment 20001614 PARAMETER Experiment Name: Zm_50ppm_KNO3_L-to-H_P Parameter: Timepoint (hr) Value: 48
  misc_feature: MA Experiment 20001614 PARAMETER Experiment Name: Zm_50ppm_KNO3_L-to-H_P Parameter: Tissue Value: Roots
  misc_feature: MA Experiment 20001614 PARAMETER Experiment Name: Zm_50ppm_KNO3_L-to-H_P Parameter: Treatment Value: 50ppm KNO3 vs. 50ppm KCl
aaaacgaagcaaaagcaaccgtcgagcttgcaacgccttacgcctccacactcaacagtcatggtcgtcatgggcaaggagcagcaacaacacgaggaggaggaggtgcaagggaaggtcgtccaagaagaagtgcaagtcgttcaagagacggtggtgccggtgccgtcggaggaggacaaggaggccgaggcggcgctggtgcacaagatctccagcctggccgccgccatcgcgaagctgccatccctgagcccgtcgccggaggtgaacgcgctcttcaccgagctcgtgacggcgtgcatcccgcgcagcagcgtggacgtggagcggctgggcccggagctgcaggagatgcgcggcgggctgatccgcctctgcgccgacgcggaggcgctgctggaggcgcactactccgacctgctggcctccttcggacaacccgctggagcacctgtcgctcttcccgtacatcaacaactacatcctgctgagccagctggagcacggcctgctggcgcggcacgtgccgggcccagcgccggcgcgcgtggccttcgtcggctccggcccgctcccgctgagctccctggtgctcgcggcgcgccaccttccgggcgcctccttcgacaactacgacatctgcggggaggccaacgaccgggcgcggcgcctggtgcgcggcgacggcgcgctccaggcgcgcatggcgttccgcacctcggacgtggcggacgtgacccgggagctggcgtcgtacgacgccgtgttcctggcggcgctggtgggcatggcggccgaggagaaggcccgcgtggtggcgcacctcgggaggcacatggcccccggcgccgcgctggtggtgcggagcgcgcacggcgcgcgcgggttcctgtaccccgtggtggaccccgaggagatccggcgcggcggattcgacgtgctcgccgtgcaccacccggagggggaggtgatcaactccgtgatcatcgcgcgcaagcccgttgccgtcgacgcgcacgccaccggcggggtggggcacgcgcacgcgcacgcgcacggcgccgtgctcagccggccctgcctctgctgcgagatggaggcccgggcgcaccagaagatggaggaggtggccgtcgagcagctgccgtcctaggcaggcgcacaccggcgtcctcgctttcttgtccgtccggccgcccatttgattttcggagttgcatctatctcatctaatatccatccatccatccatccatctatagcagtattatgtatgcatccacatggtaataatctggctgaccgcatccgcatatggtcgtctcatcgtccatctataccttgaaagctactaattaattactgagttattattactactgtttttactactactacgtac

SEQ ID NO: 16817 - protein, 411 aa, Zea mays subsp. mays
  peptide (1)..(411): Ceres Seq. ID no. 12367814
  misc_feature (60)..(148): Pfam Name: Nicotianamine synthase protein Pfam Description: Nicotianamine synthase protein
  misc_feature (59)..(148): Homolog of NCBI NO: 27151639 NR Description: Probable nicotianamine synthase 4
  misc_feature (57)..(148): Homolog of NCBI NO: 27151640 NR Description: Probable nicotianamine synthase 2
  misc_feature (58)..(148): Homolog of NCBI NO: 27151630 NR Description: Probable nicotianamine synthase 2
  misc_feature (58)..(148): Homolog of NCBI NO: 27151634 NR Description: Probable nicotianamine synthase 1
  misc_feature (59)..(148): Homolog of NCBI NO: 27151642 NR Description: Nicotianamine synthase 1
  misc_feature (65)..(148): Homolog of NCBI NO: 20387262 NR Description: ZmNAS3 [Zea mays]
  misc_feature (40)..(148): Homolog of NCBI NO: 20387262 NR Description: ZmNAS3 [Zea mays]
  misc_feature (65)..(148): Homolog of NCBI NO: 19911064 NR Description: ZmNAS2 [Zea mays]
  misc_feature (64)..(148): Homolog of NCBI NO: 27151636 NR Description: Nicotianamine synthase 9
  misc_feature (21)..(148): Homolog of NCBI NO: 20387260 NR Description: nicotianamine synthase 1 [Zea mays]
KTKQKQPSSLQRLTPPHSTVMVVMGKEQQQHEEEEVQGKVVQEEVQVVQETVVPVPSEEDKEAEAALVHKISSLAAAIAKLPSLSPSPEVNALFTELVTACIPRSSVDVERLGPELQEMRGGLIRLCADAEALLEAHYSDLLASFGQPAGAPVALPVHQQLHPAEPAGARPAGAARAGPSAGARGLRRLRPAPAELPGARGAPPSGRLLRQLRHLRGGQRPGAAPGARRRRAPGAHGVPHLGRGGRDPGAGVVRRRVPGGAGGHGGRGEGPRGGAPREAHGPRRRAGGAERARRARVPVPRGGPRGDPARRIRRARRAPPGGGGDQLRDHRAQARCRRRARHRRGGARARARARRRAQPALPLLRDGGPGAPEDGGGGRRAAAVLGRRTPASSLSCPSGRPFDFRSCIYLI

SEQ ID NO: 16818 - protein, 391 aa, Zea mays subsp. mays
  peptide (1)..(391): Ceres Seq. ID no. 12367815
  misc_feature (40)..(128): Pfam Name: Nicotianamine synthase protein Pfam Description: Nicotianamine synthase protein
  misc_feature (39)..(128): Homolog of NCBI NO: 27151639 NR Description: Probable nicotianamine synthase 4
  misc_feature (37)..(128): Homolog of NCBI NO: 27151640 NR Description: Probable nicotianamine synthase 2
  misc_feature (38)..(128): Homolog of NCBI NO: 27151630 NR Description: Probable nicotianamine synthase 2
  misc_feature (38)..(128): Homolog of NCBI NO: 27151634 NR Description: Probable nicotianamine synthase 1
  misc_feature (39)..(128): Homolog of NCBI NO: 27151642 NR Description: Nicotianamine synthase 1
  misc_feature (45)..(128): Homolog of NCBI NO: 20387262 NR Description: ZmNAS3 [Zea mays]
  misc_feature (20)..(128): Homolog of NCBI NO: 20387262 NR Description: ZmNAS3 [Zea mays]
  misc_feature (45)..(128): Homolog of NCBI NO: 19911064 NR Description: ZmNAS2 [Zea mays]
  misc_feature (44)..(128): Homolog of NCBI NO: 27151636 NR Description: Nicotianamine synthase 9
  misc_feature (1)..(128): Homolog of NCBI NO: 20387260 NR Description: nicotianamine synthase 1 [Zea mays]
MVVMGKEQQQHEEEEVQGKVVQEEVQVVQETVVPVPSEEDKEAEAALVHKISSLAAAIAKLPSLSPSPEVNALFTELVTACIPRSSVDVERLGPELQEMRGGLIRLCADAEALLEAHYSDLLASFGQPAGAPVALPVHQQLHPAEPAGARPAGAARAGPSAGARGLRRLRPAPAELPGARGAPPSGRLLRQLRHLRGGQRPGAAPGARRRRAPGAHGVPHLGRGGRDPGAGVVRRRVPGGAGGHGGRGEGPRGGAPREAHGPRRRAGGAERARRARVPVPRGGPRGDPARRIRRARRAPPGGGGDQLRDHRAQARCRRRARHRRGGARARARARRRAQPALPLLRDGGPGAPEDGGGGRRAAAVLGRRTPASSLSCPSGRPFDFRSCIYLI

SEQ ID NO: 16819 - protein, 388 aa, Zea mays subsp. mays
  peptide (1)..(388): Ceres Seq. ID no. 12367816
  misc_feature (37)..(125): Pfam Name: Nicotianamine synthase protein Pfam Description: Nicotianamine synthase protein
  misc_feature (36)..(125): Homolog of NCBI NO: 27151639 NR Description: Probable nicotianamine synthase 4
  misc_feature (34)..(125): Homolog of NCBI NO: 27151640 NR Description: Probable nicotianamine synthase 2
  misc_feature (35)..(125): Homolog of NCBI NO: 27151630 NR Description: Probable nicotianamine synthase 2
  misc_feature (35)..(125): Homolog of NCBI NO: 27151634 NR Description: Probable nicotianamine synthase 1
  misc_feature (36)..(125): Homolog of NCBI NO: 27151642 NR Description: Nicotianamine synthase 1
  misc_feature (42)..(125): Homolog of NCBI NO: 20387262 NR Description: ZmNAS3 [Zea mays]
  misc_feature (17)..(125): Homolog of NCBI NO: 20387262 NR Description: ZmNAS3 [Zea mays]
  misc_feature (42)..(125): Homolog of NCBI NO: 19911064 NR Description: ZmNAS2 [Zea mays]
  misc_feature (41)..(125): Homolog of NCBI NO: 27151636 NR Description: Nicotianamine synthase 9
  misc_feature (1)..(125): Homolog of NCBI NO: 20387260 NR Description: nicotianamine synthase 1 [Zea mays]
MGKEQQQHEEEEVQGKVVQEEVQVVQETVVPVPSEEDKEAEAALVHKISSLAAAIAKLPSLSPSPEVNALFTELVTACIPRSSVDVERLGPELQEMRGGLIRLCADAEALLEAHYSDLLASFGQPAGAPVALPVHQQLHPAEPAGARPAGAARAGPSAGARGLRRLRPAPAELPGARGAPPSGRLLRQLRHLRGGQRPGAAPGARRRRAPGAHGVPHLGRGGRDPGAGVVRRRVPGGAGGHGGRGEGPRGGAPREAHGPRRRAGGAERARRARVPVPRGGPRGDPARRIRRARRAPPGGGGDQLRDHRAQARCRRRARHRRGGARARARARRRAQPALPLLRDGGPGAPEDGGGGRRAAAVLGRRTPASSLSCPSGRPFDFRSCIYLI

SEQ ID NO: 16820 - DNA, 1258 bp, Zea mays subsp. mays
  misc_feature (1)..(1258): Ceres Seq. ID no. 12355337
  misc_feature: MA Experiment ID: 108530 Result: Down-regulated in Transcription
  misc_feature: MA Experiment 108530 PARAMETER Experiment Name: Zm_Imbibed_Seeds_P Parameter: Age (day) Value: 6 vs. 2
  misc_feature: MA Experiment 108530 PARAMETER Experiment Name: Zm_Imbibed_Seeds_P Parameter: Organism Value: Zea mays
  misc_feature: MA Experiment 108530 PARAMETER Experiment Name: Zm_Imbibed_Seeds_P Parameter: Plant Line Value: 35A19
  misc_feature: MA Experiment 108530 PARAMETER Experiment Name: Zm_Imbibed_Seeds_P Parameter: Tissue Value: Aerial vs. Embryo
  misc_feature: MA Experiment ID: 20000108 Result: Up-regulated in Transcription
  misc_feature: MA Experiment 20000108 PARAMETER Experiment Name: Zm_Root-Tips_P Parameter: Age (day) Value: 12
  misc_feature: MA Experiment 20000108 PARAMETER Experiment Name: Zm_Root-Tips_P Parameter: Organism Value: Zea mays
  misc_feature: MA Experiment 20000108 PARAMETER Experiment Name: Zm_Root-Tips_P Parameter: Tissue Value: Root tips vs. Root mid region    35
  misc_feature: MA Experiment 20000108 PARAMETER Experiment Name: Zm_Root-Tips_P Parameter: Tissue Value: Root tips vs. Root mid region   Sequence Listing-Misc Features (4)
  misc_feature: MA Experiment ID: 20000488 Result: Down-regulated in Transcription
  misc_feature: MA Experiment 20000488 PARAMETER Experiment Name: Zm_50mM_NH4NO3_L_to_H_P Parameter: Organism Value: Zea mays
  misc_feature: MA Experiment 20000488 PARAMETER Experiment Name: Zm_50mM_NH4NO3_L_to_H_P Parameter: Timepoint (hr) Value: 8
  misc_feature: MA Experiment 20000488 PARAMETER Experiment Name: Zm_50mM_NH4NO3_L_to_H_P Parameter: Tissue Value: Leaves
  misc_feature: MA Experiment 20000488 PARAMETER Experiment Name: Zm_50mM_NH4NO3_L_to_H_P Parameter: Treatment Value: 50mM NH4NO3 vs. 100mM Mannitol
ctgtcagtgctcgccgcgcggatctagggggaggggggccgtgcccggcgcggacgccgggatgccgatctgcgcgccgtcgtccgactcctcggcctcggcctcgtcgggcttgggcgcccgcgtctgggtgctccacgggctagcgctcggcgcggcggccgcggccgctgccgttgcgtacctgtaccggcggccgaccgggttccgcagccgcgcggtggggatcatacccgcgcgcttcgcctccacgcgcttcgagggcaagccgctcgttcccatcctcggcaagcccatgatccagagaacatgggaaagagttatgctagcttcttcgttggaccatgttgttgtggcaacggatgatgagagaattgcagaatgctgtcgaggatttggagctgatgttataatgacatcagcatcttgcaaaaacggatctgaacgctgctgtgaggcactaaagaagcttgataagcactatgatattgttgtcaatattcaaggagatgagcctctcattgaaccagagataatagatggtgtagttatgtcactgcagcgagctcctgatgcagtcttcagcacagctgttacttcactgaaaccagaagatgcattcgatacaaacagggtgaagtgttttgtggataatctgggctacgcaatatacttttcaagagggctgattccattcaataaatcagggaacgccaatccaaaatatccatatcttcttcatcttggaatcgcgggctttgattcaaaatttttgaagatatatccagaacttccaccaacaccattacaaatggaagaggacctagagcaactaaaagttcttgaaaatggctataggatgaaggtgatcaaagtggaccatgatgcccatggtgtggatgcacccgaggacgttgagaaaatcgaagcactgatgcgaacgagaaacattcagtagaaaacgaagagaaagcaagtgctttgcattgctatcggcgttggcttggtgggatacttttggttgtgctttcccgtcttctgaatagcatgataccaagtgaagttggtgcatcacttcttgaagttttgtgcttgctaaaacgttcagtgattggatatgtcacttgcattagtcctcaatcagcagttcagcgcgcaggtggattgtatctgtacttcagtagttagtagcattactttcagtcttctttacattgaaaaacaaatcgtttctggagatgaagcaattggacagtgc

SEQ ID NO: 16821 - protein, 318 aa, Zea mays subsp. mays
  peptide (1)..(318): Ceres Seq. ID no. 12355338
  misc_feature (74)..(289): Pfam Name: Cytidylyltransferase Pfam Description: Cytidylyltransferase
  misc_feature (74)..(318): Homolog of NCBI NO: 19704142 NR Description: 3-deoxy-manno-octulosonate cytidylyltransferase
  misc_feature (68)..(308): Homolog of NCBI NO: 39996994 NR Description: 3-deoxy-D-manno-octulosonate cytidylyltransferase
  misc_feature (69)..(309): Homolog of NCBI NO: 29840354 NR Description: 3-deoxy-D-manno-octulosonate cytidylyltransferase
  misc_feature (71)..(309): Homolog of NCBI NO: 15604902 NR Description: CMP-2-keto-3-deoxyoctulosonic acid synthetase
  misc_feature (71)..(309): Homolog of NCBI NO: 1361311 NR Description: CMP-2-keto-3-deoxyoctulosonic acid synthetase
  misc_feature (71)..(309): Homolog of NCBI NO: 15835072 NR Description: 3-deoxy-manno-octulosonate cytidylyltransferase
  misc_feature (71)..(309): Homolog of NCBI NO: 14194887 NR Description: 3-DEOXY-MANNO-OCTULOSONATE CYTIDYLYLTRANSFERASE
  misc_feature (31)..(317): Homolog of NCBI NO: 30695393 NR Description: CMP-KDO synthetase -related [Arabidopsis
  misc_feature (77)..(312): Homolog of NCBI NO: 7688437 NR Description: CMP-KDO synthetase [Zea mays]
  misc_feature (21)..(318): Homolog of NCBI NO: 7688435 NR Description: CMP-KDO synthetase [Zea mays]
CQCSPRGSRGRGAVPGADAGMPICAPSSDSSASASSGLGARVWVLHGLALGAAAAAAAVAYLYRRPTGFRSRAVGIIPARFASTRFEGKPLVPILGKPMIQRTWERVMLASSLDHVVVATDDERIAECCRGFGADVIMTSASCKNGSERCCEALKKLDKHYDIVVNIQGDEPLIEPEIIDGVVMSLQRAPDAVFSTAVTSLKPEDAFDTNRVKCFVDNLGYAIYFSRGLIPFNKSGNANPKYPYLLHLGIAGFDSKFLKIYPELPPTPLQMEEDLEQLKVLENGYRMKVIKVDHDAHGVDAPEDVEKIEALMRTRNIQ

SEQ ID NO: 16822 - protein, 298 aa, Zea mays subsp. mays
  peptide (1)..(298): Ceres Seq. ID no. 12355339
  misc_feature (54)..(269): Pfam Name: Cytidylyltransferase Pfam Description: Cytidylyltransferase
  misc_feature (54)..(298): Homolog of NCBI NO: 19704142 NR Description: 3-deoxy-manno-octulosonate cytidylyltransferase
  misc_feature (48)..(288): Homolog of NCBI NO: 39996994 NR Description: 3-deoxy-D-manno-octulosonate cytidylyltransferase
  misc_feature (49)..(289): Homolog of NCBI NO: 29840354 NR Description: 3-deoxy-D-manno-octulosonate cytidylyltransferase
  misc_feature (51)..(289): Homolog of NCBI NO: 15604902 NR Description: CMP-2-keto-3-deoxyoctulosonic acid synthetase
  misc_feature (51)..(289): Homolog of NCBI NO: 1361311 NR Description: CMP-2-keto-3-deoxyoctulosonic acid synthetase
  misc_feature (51)..(289): Homolog of NCBI NO: 15835072 NR Description: 3-deoxy-manno-octulosonate cytidylyltransferase
  misc_feature (51)..(289): Homolog of NCBI NO: 14194887 NR Description: 3-DEOXY-MANNO-OCTULOSONATE CYTIDYLYLTRANSFERASE
  misc_feature (11)..(297): Homolog of NCBI NO: 30695393 NR Description: CMP-KDO synthetase -related [Arabidopsis
  misc_feature (57)..(292): Homolog of NCBI NO: 7688437 NR Description: CMP-KDO synthetase [Zea mays]
  misc_feature (1)..(298): Homolog of NCBI NO: 7688435 NR Description: CMP-KDO synthetase [Zea mays]
MPICAPSSDSSASASSGLGARVWVLHGLALGAAAAAAAVAYLYRRPTGFRSRAVGIIPARFASTRFEGKPLVPILGKPMIQRTWERVMLASSLDHVVVATDDERIAECCRGFGADVIMTSASCKNGSERCCEALKKLDKHYDIVVNIQGDEPLIEPEIIDGVVMSLQRAPDAVFSTAVTSLKPEDAFDTNRVKCFVDNLGYAIYFSRGLIPFNKSGNANPKYPYLLHLGIAGFDSKFLKIYPELPPTPLQMEEDLEQLKVLENGYRMKVIKVDHDAHGVDAPEDVEKIEALMRTRNIQ

SEQ ID NO: 16823 - protein, 220 aa, Zea mays subsp. mays
  peptide (1)..(220): Ceres Seq. ID no. 12355340
  misc_feature (1)..(191): Pfam Name: Cytidylyltransferase Pfam Description: Cytidylyltransferase
  misc_feature (1)..(220): Homolog of NCBI NO: 19704142 NR Description: 3-deoxy-manno-octulosonate cytidylyltransferase
  misc_feature (1)..(210): Homolog of NCBI NO: 39996994 NR Description: 3-deoxy-D-manno-octulosonate cytidylyltransferase
  misc_feature (1)..(211): Homolog of NCBI NO: 29840354 NR Description: 3-deoxy-D-manno-octulosonate cytidylyltransferase
  misc_feature (1)..(211): Homolog of NCBI NO: 15604902 NR Description: CMP-2-keto-3-deoxyoctulosonic acid synthetase
  misc_feature (1)..(211): Homolog of NCBI NO: 1361311 NR Description: CMP-2-keto-3-deoxyoctulosonic acid synthetase
  misc_feature (1)..(211): Homolog of NCBI NO: 15835072 NR Description: 3-deoxy-manno-octulosonate cytidylyltransferase
  misc_feature (1)..(211): Homolog of NCBI NO: 14194887 NR Description: 3-DEOXY-MANNO-OCTULOSONATE CYTIDYLYLTRANSFERASE
  misc_feature (1)..(219): Homolog of NCBI NO: 30695393 NR Description: CMP-KDO synthetase -related [Arabidopsis
  misc_feature (1)..(214): Homolog of NCBI NO: 7688437 NR Description: CMP-KDO synthetase [Zea mays]
  misc_feature (1)..(220): Homolog of NCBI NO: 7688435 NR Description: CMP-KDO synthetase [Zea mays]
MIQRTWERVMLASSLDHVVVATDDERIAECCRGFGADVIMTSASCKNGSERCCEALKKLDKHYDIVVNIQGDEPLIEPEIIDGVVMSLQRAPDAVFSTAVTSLKPEDAFDTNRVKCFVDNLGYAIYFSRGLIPFNKSGNANPKYPYLLHLGIAGFDSKFLKIYPELPPTPLQMEEDLEQLKVLENGYRMKVIKVDHDAHGVDAPEDVEKIEALMRTRNIQ

SEQ ID NO: 16824 - DNA, 1517 bp, Zea mays subsp. mays
  misc_feature (1)..(1517): Ceres Seq. ID no. 12357252
  misc_feature: MA Experiment ID: 108528 Result: Up-regulated in Transcription
  misc_feature: MA Experiment 108528 PARAMETER Experiment Name: Zm_Imbibed_Seeds_P Parameter: Age (day) Value: 5 vs. 2
  misc_feature: MA Experiment 108528 PARAMETER Experiment Name: Zm_Imbibed_Seeds_P Parameter: Organism Value: Zea mays
  misc_feature: MA Experiment 108528 PARAMETER Experiment Name: Zm_Imbibed_Seeds_P Parameter: Plant Line Value: 35A19
  misc_feature: MA Experiment 108528 PARAMETER Experiment Name: Zm_Imbibed_Seeds_P Parameter: Tissue Value: Aerial vs. Embryo
  misc_feature: MA Experiment ID: 108529 Result: Up-regulated in Transcription
  misc_feature: MA Experiment 108529 PARAMETER Experiment Name: Zm_Imbibed_Seeds_P Parameter: Age (day) Value: 5 vs. 2
  misc_feature: MA Experiment 108529 PARAMETER Experiment Name: Zm_Imbibed_Seeds_P Parameter: Organism Value: Zea mays
  misc_feature: MA Experiment 108529 PARAMETER Experiment Name: Zm_Imbibed_Seeds_P Parameter: Plant Line Value: 35A19
  misc_feature: MA Experiment 108529 PARAMETER Experiment Name: Zm_Imbibed_Seeds_P Parameter: Tissue Value: Roots vs. Embryo
  misc_feature: MA Experiment ID: 108530 Result: Up-regulated in Transcription
  misc_feature: MA Experiment 108530 PARAMETER Experiment Name: Zm_Imbibed_Seeds_P Parameter: Age (day) Value: 6 vs. 2
  misc_feature: MA Experiment 108530 PARAMETER Experiment Name: Zm_Imbibed_Seeds_P Parameter: Organism Value: Zea mays
  misc_feature: MA Experiment 108530 PARAMETER Experiment Name: Zm_Imbibed_Seeds_P Parameter: Plant Line Value: 35A19
  misc_feature: MA Experiment 108530 PARAMETER Experiment Name: Zm_Imbibed_Seeds_P Parameter: Tissue Value: Aerial vs. Embryo
  misc_feature: MA Experiment ID: 108534 Result: Up-regulated in Transcription
  misc_feature: MA Experiment 108534 PARAMETER Experiment Name: Zm_4deg_Cold_P Parameter: Age (hr) Value: 8
  misc_feature: MA Experiment 108534 PARAMETER Experiment Name: Zm_4deg_Cold_P Parameter: Organism Value: Zea mays
  misc_feature: MA Experiment 108534 PARAMETER Experiment Name: Zm_4deg_Cold_P Parameter: Plant Line Value: 35A19
  misc_feature: MA Experiment 108534 PARAMETER Experiment Name: Zm_4deg_Cold_P Parameter: Temperature (deg C) Value: 4 vs. 22
  misc_feature: MA Experiment 108534 PARAMETER Experiment Name: Zm_4deg_Cold_P Parameter: Timepoint (hr) Value: 6
  misc_feature: MA Experiment 108534 PARAMETER Experiment Name: Zm_4deg_Cold_P Parameter: Tissue Value: Aerial
  misc_feature: MA Experiment ID: 108535 Result: Down-regulated in Transcription
  misc_feature: MA Experiment 108535 PARAMETER Experiment Name: Zm_Meristem_P Parameter: Age (day) Value: 8
  misc_feature: MA Experiment 108535 PARAMETER Experiment Name: Zm_Meristem_P Parameter: Organism Value: Zea mays
  misc_feature: MA Experiment 108535 PARAMETER Experiment Name: Zm_Meristem_P Parameter: Plant Line Value: 35A19
  misc_feature: MA Experiment 108535 PARAMETER Experiment Name: Zm_Meristem_P Parameter: Tissue Value: Root Meristem vs. Above Root Meristem
  misc_feature: MA Experiment ID: 108543 Result: Up-regulated in Transcription
  misc_feature: MA Experiment ID: 108544 Result: Up-regulated in Transcription
  misc_feature: MA Experiment ID: 108547 Result: Up-regulated in Transcription
  misc_feature: MA Experiment 108547 PARAMETER Experiment Name: Zm_Imbibed_Seeds_P Parameter: Age (day) Value: 4 vs. 2
  misc_feature: MA Experiment 108547 PARAMETER Experiment Name: Zm_Imbibed_Seeds_P Parameter: Organism Value: Zea mays
  misc_feature: MA Experiment 108547 PARAMETER Experiment Name: Zm_Imbibed_Seeds_P Parameter: Plant Line Value: 35A19
  misc_feature: MA Experiment 108547 PARAMETER Experiment Name: Zm_Imbibed_Seeds_P Parameter: Tissue Value: Aerial vs. Embryo
  misc_feature: MA Experiment ID: 108556 Result: Up-regulated in Transcription
  misc_feature: MA Experiment 108556 PARAMETER Experiment Name: Zm_Drought_P Parameter: Age (day) Value: 9
  misc_feature: MA Experiment 108556 PARAMETER Experiment Name: Zm_Drought_P Parameter: Organism Value: Zea mays
  misc_feature: MA Experiment 108556 PARAMETER Experiment Name: Zm_Drought_P Parameter: Plant Line Value: 35A19
  misc_feature: MA Experiment 108556 PARAMETER Experiment Name: Zm_Drought_P Parameter: Timepoint (hr) Value: 24
  misc_feature: MA Experiment 108556 PARAMETER Experiment Name: Zm_Drought_P Parameter: Tissue Value: Aerial
  misc_feature: MA Experiment 108556 PARAMETER Experiment Name: Zm_Drought_P Parameter: Treatment Value: Drought vs. No Drought
  misc_feature: MA Experiment ID: 20000108 Result: Down-regulated in Transcription
  misc_feature: MA Experiment 20000108 PARAMETER Experiment Name: Zm_Root-Tips_P Parameter: Age (day) Value: 12
  misc_feature: MA Experiment 20000108 PARAMETER Experiment Name: Zm_Root-Tips_P Parameter: Organism Value: Zea mays
  misc_feature: MA Experiment 20000108 PARAMETER Experiment Name: Zm_Root-Tips_P Parameter: Tissue Value: Root tips vs. Root mid region    35
  misc_feature: MA Experiment 20000108 PARAMETER Experiment Name: Zm_Root-Tips_P Parameter: Tissue Value: Root tips vs. Root mid region   Sequence Listing-Misc Features (4)
  misc_feature: MA Experiment ID: 20000492 Result: Down-regulated in Transcription
  misc_feature: MA Experiment 20000492 PARAMETER Experiment Name: Zm_Hybrid_Seed_Dev_P Parameter: DAP Value: 12
  misc_feature: MA Experiment 20000492 PARAMETER Experiment Name: Zm_Hybrid_Seed_Dev_P Parameter: Organism Value: Zea mays
  misc_feature: MA Experiment 20000492 PARAMETER Experiment Name: Zm_Hybrid_Seed_Dev_P Parameter: Plant Line Value: 35A19
  misc_feature: MA Experiment 20000492 PARAMETER Experiment Name: Zm_Hybrid_Seed_Dev_P Parameter: Tissue Value: Fert Kernel vs. Unfert Floret
  misc_feature: MA Experiment ID: 20000535 Result: Down-regulated in Transcription
  misc_feature: MA Experiment 20000535 PARAMETER Experiment Name: Zm_Hybrid_Seed_Dev_P Parameter: DAP Value: 30 vs. 12
  misc_feature: MA Experiment 20000535 PARAMETER Experiment Name: Zm_Hybrid_Seed_Dev_P Parameter: Organism Value: Zea mays
  misc_feature: MA Experiment 20000535 PARAMETER Experiment Name: Zm_Hybrid_Seed_Dev_P Parameter: Plant Line Value: 35A19
  misc_feature: MA Experiment 20000535 PARAMETER Experiment Name: Zm_Hybrid_Seed_Dev_P Parameter: Tissue Value: Embryo vs. Unfert Floret
aaactctgtgcgccttggtgtgaccggtggtctctgtgctcccaagctgagcagcagcaatcgccgttccggaggccggagcacagagacgagacccgccgagcagtttgggtttttttttttttttgatgatttggtgcacctacctaaagaagcctttggcatcgagtacgcctagtaccaccaccaccaccaaagaagccttgagcatgcagggttgctgccagtaaaacgaagatctacatggtgcttgagtttgtcaacggcggcgagctcttcgacaagatcgctatcaaggggaaactgtccgaacacgagggcaggaggctcttccagcagctaatcgacggcgtcagctattgccatgacagaggtgtctaccaccgagacctcaagccagagaatgtccttgttgatcggaagggcaccatcaagatctctgacttcggcctcagcgctctacctcaacatctcgggagtgacggacttctgcacacaacatgtggcagccccaactacatagctcctgaggttctgcaaaacagaggctatgacggctccttgtcagatctctggtcgtgtggggtgatcctctacgtgatgcttgttggctgccttcccttcgacgacaggaacctcgtcgttctttatcagaagattttcaagggagactgtcagatccccaagtggctttcgcctgccgcgcaggaccttctcaagaggatcctccaaccgaatccgatgaagaggatcaacgtcgcggggatcagggagcacgagtggttcaagaaggactacgtgcctgctgttccgcacgatgatgacgaagacgtccttcctagtccagctccctcgataaagccaatcgatgagccgggcgcaagagaagtgttctcctatcaacgcttttcagttgatcgggatggcctcttcccttgacctttctggtttcttcgaggaagaggatgcagcgcaaagaaagattcggttcacttcgacgcacccacccaaggatctatttgacaagatcgagagcgttgtcatggagatgggattcaaagtccataggggggcaggcaagctcaaggtcttgaagaatagcaagtgttccaggaacccgtcatcattgttggtgtgcaccgaggtgtttgagctcggtccatcattatatgtcgtagagcttaggaaatcccacggagactctacgttgtatagacagctgtgcgaaaggctctccgatgagctaggtgcctgcaagacagaccagatcgcgaggactgaatcatcgagtgacgacctctcgagcgtcgatggcgaagcgttccctctatctgggttctgatcatattgctttccctgtgttgttttgggaacaggggatgaggaacatgctcgttcctgatgcaattctagattaggatcatgaatatagtgtacaaagccagcggcggcggcggtgcaaattagccaccgggttgaatataaataatatatatatatgatatgttgcatcttcg

SEQ ID NO: 16825 - protein, 231 aa, Zea mays subsp. mays
  peptide (1)..(231): Ceres Seq. ID no. 12357253
  misc_feature (1)..(181): Pfam Name: Protein kinase domain Pfam Description: Protein kinase domain
  misc_feature (1)..(215): Homolog of NCBI NO: 9294138 NR Description: serine/threonine kinase [Arabidopsis thaliana]
  misc_feature (1)..(215): Homolog of NCBI NO: 20260556 NR Description: unknown protein [Arabidopsis thaliana]
  misc_feature (1)..(215): Homolog of NCBI NO: 11066952 NR Description: CBL-interacting protein kinase 1 [Arabidopsis
  misc_feature (1)..(197): Homolog of NCBI NO: 25387053 NR Description: hypothetical protein F11A17.18 [imported] -
  misc_feature (14)..(197): Homolog of NCBI NO: 8778506 NR Description: F21D18.2 [Arabidopsis thaliana]
  misc_feature (1)..(197): Homolog of NCBI NO: 15221136 NR Description: serine threonine kinase, putative
  misc_feature (1)..(15): Homolog of NCBI NO: 8778506 NR Description: F21D18.2 [Arabidopsis thaliana]
  misc_feature (1)..(215): Homolog of NCBI NO: 18401539 NR Description: expressed protein
  misc_feature (1)..(196): Homolog of NCBI NO: 23237825 NR Description: putative serine/threonine kinase
  misc_feature (1)..(210): Homolog of NCBI NO: 34894358 NR Description: unnamed protein product [Oryza sativa (japonica
MVLEFVNGGELFDKIAIKGKLSEHEGRRLFQQLIDGVSYCHDRGVYHRDLKPENVLVDRKGTIKISDFGLSALPQHLGSDGLLHTTCGSPNYIAPEVLQNRGYDGSLSDLWSCGVILYVMLVGCLPFDDRNLVVLYQKIFKGDCQIPKWLSPAAQDLLKRILQPNPMKRINVAGIREHEWFKKDYVPAVPHDDDEDVLPSPAPSIKPIDEPGAREVFSYQRFSVDRDGLFP

SEQ ID NO: 16826 - protein, 157 aa, Zea mays subsp. mays
  peptide (1)..(157): Ceres Seq. ID no. 12357254
  misc_feature (1)..(126): Homolog of NCBI NO: 34393400 NR Description: putative CBL-interacting protein kinase 23
  misc_feature (1)..(118): Homolog of NCBI NO: 25387053 NR Description: hypothetical protein F11A17.18 [imported] -
  misc_feature (1)..(128): Homolog of NCBI NO: 8778506 NR Description: F21D18.2 [Arabidopsis thaliana]
  misc_feature (1)..(128): Homolog of NCBI NO: 15221136 NR Description: serine threonine kinase, putative
  misc_feature (11)..(119): Homolog of NCBI NO: 9294138 NR Description: serine/threonine kinase [Arabidopsis thaliana]
  misc_feature (11)..(133): Homolog of NCBI NO: 20260556 NR Description: unknown protein [Arabidopsis thaliana]
  misc_feature (11)..(133): Homolog of NCBI NO: 11066952 NR Description: CBL-interacting protein kinase 1 [Arabidopsis
  misc_feature (11)..(133): Homolog of NCBI NO: 18401539 NR Description: expressed protein
  misc_feature (9)..(144): Homolog of NCBI NO: 23237825 NR Description: putative serine/threonine kinase
  misc_feature (1)..(157): Homolog of NCBI NO: 34894358 NR Description: unnamed protein product [Oryza sativa (japonica
MSRAQEKCSPINAFQLIGMASSLDLSGFFEEEDAAQRKIRFTSTHPPKDLFDKIESVVMEMGFKVHRGAGKLKVLKNSKCSRNPSSLLVCTEVFELGPSLYVVELRKSHGDSTLYRQLCERLSDELGACKTDQIARTESSSDDLSSVDGEAFPLSGF

SEQ ID NO: 16827 - protein, 139 aa, Zea mays subsp. mays
  peptide (1)..(139): Ceres Seq. ID no. 12357255
  misc_feature (1)..(108): Homolog of NCBI NO: 34393400 NR Description: putative CBL-interacting protein kinase 23
  misc_feature (1)..(100): Homolog of NCBI NO: 25387053 NR Description: hypothetical protein F11A17.18 [imported] -
  misc_feature (1)..(110): Homolog of NCBI NO: 8778506 NR Description: F21D18.2 [Arabidopsis thaliana]
  misc_feature (1)..(110): Homolog of NCBI NO: 15221136 NR Description: serine threonine kinase, putative
  misc_feature (1)..(101): Homolog of NCBI NO: 9294138 NR Description: serine/threonine kinase [Arabidopsis thaliana]
  misc_feature (1)..(115): Homolog of NCBI NO: 20260556 NR Description: unknown protein [Arabidopsis thaliana]
  misc_feature (1)..(115): Homolog of NCBI NO: 11066952 NR Description: CBL-interacting protein kinase 1 [Arabidopsis
  misc_feature (1)..(115): Homolog of NCBI NO: 18401539 NR Description: expressed protein
  misc_feature (1)..(126): Homolog of NCBI NO: 23237825 NR Description: putative serine/threonine kinase
  misc_feature (1)..(139): Homolog of NCBI NO: 34894358 NR Description: unnamed protein product [Oryza sativa (japonica
MASSLDLSGFFEEEDAAQRKIRFTSTHPPKDLFDKIESVVMEMGFKVHRGAGKLKVLKNSKCSRNPSSLLVCTEVFELGPSLYVVELRKSHGDSTLYRQLCERLSDELGACKTDQIARTESSSDDLSSVDGEAFPLSGF

SEQ ID NO: 16828 - DNA, 1393 bp, Zea mays subsp. mays
  misc_feature (1)..(1393): Ceres Seq. ID no. 12357291
  misc_feature: MA Experiment ID: 108689 Result: Up-regulated in Transcription
  misc_feature: MA Experiment 108689 PARAMETER Experiment Name: Zm_Drought_Roots_P Parameter: Age (day) Value: 9
  misc_feature: MA Experiment 108689 PARAMETER Experiment Name: Zm_Drought_Roots_P Parameter: Organism Value: Zea mays
  misc_feature: MA Experiment 108689 PARAMETER Experiment Name: Zm_Drought_Roots_P Parameter: Plant Line Value: 35A19
  misc_feature: MA Experiment 108689 PARAMETER Experiment Name: Zm_Drought_Roots_P Parameter: Timepoint (hr) Value: 24
  misc_feature: MA Experiment 108689 PARAMETER Experiment Name: Zm_Drought_Roots_P Parameter: Tissue Value: Roots
  misc_feature: MA Experiment 108689 PARAMETER Experiment Name: Zm_Drought_Roots_P Parameter: Treatment Value: Drought vs. No Drought
  misc_feature: MA Experiment ID: 20000108 Result: Up-regulated in Transcription
  misc_feature: MA Experiment 20000108 PARAMETER Experiment Name: Zm_Root-Tips_P Parameter: Age (day) Value: 12
  misc_feature: MA Experiment 20000108 PARAMETER Experiment Name: Zm_Root-Tips_P Parameter: Organism Value: Zea mays
  misc_feature: MA Experiment 20000108 PARAMETER Experiment Name: Zm_Root-Tips_P Parameter: Tissue Value: Root tips vs. Root mid region    35
  misc_feature: MA Experiment 20000108 PARAMETER Experiment Name: Zm_Root-Tips_P Parameter: Tissue Value: Root tips vs. Root mid region   Sequence Listing-Misc Features (4)
ctgccacctgaaatcccccgaacctatacttttccttcccccgatccaggcggttctcttcccagaagccagcccagaatggcggcatccgacgcgctgcagtccatcgtttacagccgtgggtcgctccgcctcctcgatcagaggaagctgccgctcgagatggagtacatcgacgtcaagagttccgccgatggctggaatgcaataagagacatggttgtccgtggtgctccagcaatagccatagcagcggcactagcattagccgttgaagtttctgatttagattttattggtacgcctgaagaagcagcttcttttgtttcaaagaaattggaataccttgtatccagccgaccaactgcagtgaacctatctgatgctgcaacaaagctccaaactttggtatcaaaggcagctgaaactgcaaaagattccaagtctatctttcaggtctacattgaggccgcagagacgatgcttgttgatgatgtggcagataataaagctattggctcacatggagctgtatttcttcaaaggcagcttgcaaattcaaaaaagatatctgttctaacccattgtaatactggcagtcttgcaactgctggttatggaactgcccttggggttatacgcgctcttcattcggggggagttttagagaaggccttttgcaccgaaactcgtccatttaaccagggatccagacttacagctttcgagttagttcatgaaaaaatacctgcaacactgatagcagattctgctgctgctgcgttgatgaaacaagggcatgttcaggctgtcattgttggtgctgatcgaatagcagcaaatggtgacacagccaacaagattggcacatacaacctcgccatctccgcgaagcatcatagtgtccagttctatgtgtcagcgccggtaacttccattgatctctccctcccatctggggatgagatagtcatagaagaaagatcaccaaaggagttgctgaactctgaaggtggtctgggaaagcaagttgctgcatccggtatatcagtctggaacccagctttcgatgttactccagcaaatctgatcactgcaatcataacagaaaagggtgtgatcacaaaaactgatgctgatggatctttcgacatcaaaggattccttctgcccgcaaaataatactctagcgtggcttccattctgaatgacaaatgtctggatcgacactgttgtattctgttttctctattatacacaataataaagtcatgtcctcataggattttggtgtaagttttatggataggagatcgacgctagggtgtgtacccatagcggcgcgtatgagccgtgttttcacacgagtgggcaagtgaaaaagagatgtggc

SEQ ID NO: 16829 - protein, 393 aa, Zea mays subsp. mays
  peptide (1)..(393): Ceres Seq. ID no. 12357292
  misc_feature (60)..(378): Pfam Name: Initiation factor 2 subunit family Pfam Description: Initiation factor 2 subunit family
  misc_feature (33)..(374): Homolog of NCBI NO: 19577378 NR Description: putative translation initiation factor [Anopheles
  misc_feature (33)..(374): Homolog of NCBI NO: 31242175 NR Description: ENSANGP00000023010 [Anopheles gambiae]
  misc_feature (32)..(373): Homolog of NCBI NO: 21357667 NR Description: CG11334-PB [Drosophila melanogaster]
  misc_feature (33)..(386): Homolog of NCBI NO: 40740852 NR Description: hypothetical protein AN4290.2 [Aspergillus
  misc_feature (73)..(388): Homolog of NCBI NO: 20466258 NR Description: putative translation initiation factor eIF-2B
  misc_feature (33)..(371): Homolog of NCBI NO: 25315908 NR Description: hypothetical protein At2g05830 [imported] -
  misc_feature (33)..(388): Homolog of NCBI NO: 21593194 NR Description: putative translation initiation factor eIF-2B
  misc_feature (33)..(388): Homolog of NCBI NO: 18396170 NR Description: putative translation initiation factor eIF-2B
  misc_feature (33)..(389): Homolog of NCBI NO: 15216226 NR Description: CIG2 [Nicotiana tabacum]
  misc_feature (27)..(393): Homolog of NCBI NO: 12407304 NR Description: IDI2 [Hordeum vulgare subsp. vulgare]
LPPEIPRTYTFPSPDPGGSLPRSQPRMAASDALQSIVYSRGSLRLLDQRKLPLEMEYIDVKSSADGWNAIRDMVVRGAPAIAIAAALALAVEVSDLDFIGTPEEAASFVSKKLEYLVSSRPTAVNLSDAATKLQTLVSKAAETAKDSKSIFQVYIEAAETMLVDDVADNKAIGSHGAVFLQRQLANSKKISVLTHCNTGSLATAGYGTALGVIRALHSGGVLEKAFCTETRPFNQGSRLTAFELVHEKIPATLIADSAAAALMKQGHVQAVIVGADRIAANGDTANKIGTYNLAISAKHHSVQFYVSAPVTSIDLSLPSGDEIVIEERSPKELLNSEGGLGKQVAASGISVWNPAFDVTPANLITAIITEKGVITKTDADGSFDIKGFLLPAK

SEQ ID NO: 16830 - protein, 367 aa, Zea mays subsp. mays
  peptide (1)..(367): Ceres Seq. ID no. 12357293
  misc_feature (34)..(352): Pfam Name: Initiation factor 2 subunit family Pfam Description: Initiation factor 2 subunit family
  misc_feature (7)..(348): Homolog of NCBI NO: 19577378 NR Description: putative translation initiation factor [Anopheles
  misc_feature (7)..(348): Homolog of NCBI NO: 31242175 NR Description: ENSANGP00000023010 [Anopheles gambiae]
  misc_feature (6)..(347): Homolog of NCBI NO: 21357667 NR Description: CG11334-PB [Drosophila melanogaster]
  misc_feature (7)..(360): Homolog of NCBI NO: 40740852 NR Description: hypothetical protein AN4290.2 [Aspergillus
  misc_feature (47)..(362): Homolog of NCBI NO: 20466258 NR Description: putative translation initiation factor eIF-2B
  misc_feature (7)..(345): Homolog of NCBI NO: 25315908 NR Description: hypothetical protein At2g05830 [imported] -
  misc_feature (7)..(362): Homolog of NCBI NO: 21593194 NR Description: putative translation initiation factor eIF-2B
  misc_feature (7)..(362): Homolog of NCBI NO: 18396170 NR Description: putative translation initiation factor eIF-2B
  misc_feature (7)..(363): Homolog of NCBI NO: 15216226 NR Description: CIG2 [Nicotiana tabacum]
  misc_feature (1)..(367): Homolog of NCBI NO: 12407304 NR Description: IDI2 [Hordeum vulgare subsp. vulgare]
MAASDALQSIVYSRGSLRLLDQRKLPLEMEYIDVKSSADGWNAIRDMVVRGAPAIAIAAALALAVEVSDLDFIGTPEEAASFVSKKLEYLVSSRPTAVNLSDAATKLQTLVSKAAETAKDSKSIFQVYIEAAETMLVDDVADNKAIGSHGAVFLQRQLANSKKISVLTHCNTGSLATAGYGTALGVIRALHSGGVLEKAFCTETRPFNQGSRLTAFELVHEKIPATLIADSAAAALMKQGHVQAVIVGADRIAANGDTANKIGTYNLAISAKHHSVQFYVSAPVTSIDLSLPSGDEIVIEERSPKELLNSEGGLGKQVAASGISVWNPAFDVTPANLITAIITEKGVITKTDADGSFDIKGFLLPAK

SEQ ID NO: 16831 - protein, 339 aa, Zea mays subsp. mays
  peptide (1)..(339): Ceres Seq. ID no. 12357294
  misc_feature (6)..(324): Pfam Name: Initiation factor 2 subunit family Pfam Description: Initiation factor 2 subunit family
  misc_feature (1)..(320): Homolog of NCBI NO: 19577378 NR Description: putative translation initiation factor [Anopheles
  misc_feature (1)..(320): Homolog of NCBI NO: 31242175 NR Description: ENSANGP00000023010 [Anopheles gambiae]
  misc_feature (1)..(319): Homolog of NCBI NO: 21357667 NR Description: CG11334-PB [Drosophila melanogaster]
  misc_feature (1)..(332): Homolog of NCBI NO: 40740852 NR Description: hypothetical protein AN4290.2 [Aspergillus
  misc_feature (19)..(334): Homolog of NCBI NO: 20466258 NR Description: putative translation initiation factor eIF-2B
  misc_feature (1)..(317): Homolog of NCBI NO: 25315908 NR Description: hypothetical protein At2g05830 [imported] -
  misc_feature (1)..(334): Homolog of NCBI NO: 21593194 NR Description: putative translation initiation factor eIF-2B
  misc_feature (1)..(334): Homolog of NCBI NO: 18396170 NR Description: putative translation initiation factor eIF-2B
  misc_feature (1)..(335): Homolog of NCBI NO: 15216226 NR Description: CIG2 [Nicotiana tabacum]
  misc_feature (1)..(339): Homolog of NCBI NO: 12407304 NR Description: IDI2 [Hordeum vulgare subsp. vulgare]
MEYIDVKSSADGWNAIRDMVVRGAPAIAIAAALALAVEVSDLDFIGTPEEAASFVSKKLEYLVSSRPTAVNLSDAATKLQTLVSKAAETAKDSKSIFQVYIEAAETMLVDDVADNKAIGSHGAVFLQRQLANSKKISVLTHCNTGSLATAGYGTALGVIRALHSGGVLEKAFCTETRPFNQGSRLTAFELVHEKIPATLIADSAAAALMKQGHVQAVIVGADRIAANGDTANKIGTYNLAISAKHHSVQFYVSAPVTSIDLSLPSGDEIVIEERSPKELLNSEGGLGKQVAASGISVWNPAFDVTPANLITAIITEKGVITKTDADGSFDIKGFLLPAK

SEQ ID NO: 16832 - DNA, 1352 bp, Zea mays subsp. mays
  misc_feature (1)..(1352): Ceres Seq. ID no. 12415473
  misc_feature: MA Experiment ID: 108528 Result: Up-regulated in Transcription
  misc_feature: MA Experiment 108528 PARAMETER Experiment Name: Zm_Imbibed_Seeds_P Parameter: Age (day) Value: 5 vs. 2
  misc_feature: MA Experiment 108528 PARAMETER Experiment Name: Zm_Imbibed_Seeds_P Parameter: Organism Value: Zea mays
  misc_feature: MA Experiment 108528 PARAMETER Experiment Name: Zm_Imbibed_Seeds_P Parameter: Plant Line Value: 35A19
  misc_feature: MA Experiment 108528 PARAMETER Experiment Name: Zm_Imbibed_Seeds_P Parameter: Tissue Value: Aerial vs. Embryo
  misc_feature: MA Experiment ID: 108529 Result: Down-regulated in Transcription
  misc_feature: MA Experiment 108529 PARAMETER Experiment Name: Zm_Imbibed_Seeds_P Parameter: Age (day) Value: 5 vs. 2
  misc_feature: MA Experiment 108529 PARAMETER Experiment Name: Zm_Imbibed_Seeds_P Parameter: Organism Value: Zea mays
  misc_feature: MA Experiment 108529 PARAMETER Experiment Name: Zm_Imbibed_Seeds_P Parameter: Plant Line Value: 35A19
  misc_feature: MA Experiment 108529 PARAMETER Experiment Name: Zm_Imbibed_Seeds_P Parameter: Tissue Value: Roots vs. Embryo
  misc_feature: MA Experiment ID: 108530 Result: Up-regulated in Transcription
  misc_feature: MA Experiment 108530 PARAMETER Experiment Name: Zm_Imbibed_Seeds_P Parameter: Age (day) Value: 6 vs. 2
  misc_feature: MA Experiment 108530 PARAMETER Experiment Name: Zm_Imbibed_Seeds_P Parameter: Organism Value: Zea mays
  misc_feature: MA Experiment 108530 PARAMETER Experiment Name: Zm_Imbibed_Seeds_P Parameter: Plant Line Value: 35A19
  misc_feature: MA Experiment 108530 PARAMETER Experiment Name: Zm_Imbibed_Seeds_P Parameter: Tissue Value: Aerial vs. Embryo
  misc_feature: MA Experiment ID: 108532 Result: Up-regulated in Transcription
  misc_feature: MA Experiment 108532 PARAMETER Experiment Name: Zm_20uM_KNO3_H-to-L_P Parameter: Age (day) Value: 11
  misc_feature: MA Experiment 108532 PARAMETER Experiment Name: Zm_20uM_KNO3_H-to-L_P Parameter: Organism Value: Zea mays
  misc_feature: MA Experiment 108532 PARAMETER Experiment Name: Zm_20uM_KNO3_H-to-L_P Parameter: Plant Line Value: 35A19
  misc_feature: MA Experiment 108532 PARAMETER Experiment Name: Zm_20uM_KNO3_H-to-L_P Parameter: Timepoint (hr) Value: 16
  misc_feature: MA Experiment 108532 PARAMETER Experiment Name: Zm_20uM_KNO3_H-to-L_P Parameter: Tissue Value: Roots
  misc_feature: MA Experiment 108532 PARAMETER Experiment Name: Zm_20uM_KNO3_H-to-L_P Parameter: Treatment Value: 20uM KNO3 vs. 60mM KNO3
  misc_feature: MA Experiment ID: 108535 Result: Down-regulated in Transcription
  misc_feature: MA Experiment 108535 PARAMETER Experiment Name: Zm_Meristem_P Parameter: Age (day) Value: 8
  misc_feature: MA Experiment 108535 PARAMETER Experiment Name: Zm_Meristem_P Parameter: Organism Value: Zea mays
  misc_feature: MA Experiment 108535 PARAMETER Experiment Name: Zm_Meristem_P Parameter: Plant Line Value: 35A19
  misc_feature: MA Experiment 108535 PARAMETER Experiment Name: Zm_Meristem_P Parameter: Tissue Value: Root Meristem vs. Above Root Meristem
  misc_feature: MA Experiment ID: 108536 Result: Up-regulated in Transcription
  misc_feature: MA Experiment 108536 PARAMETER Experiment Name: Zm_Meristem_P Parameter: Age (day) Value: 8
  misc_feature: MA Experiment 108536 PARAMETER Experiment Name: Zm_Meristem_P Parameter: Organism Value: Zea mays
  misc_feature: MA Experiment 108536 PARAMETER Experiment Name: Zm_Meristem_P Parameter: Plant Line Value: 35A19
  misc_feature: MA Experiment 108536 PARAMETER Experiment Name: Zm_Meristem_P Parameter: Tissue Value: Shoot Meristem vs. Above Shoot Meristem
  misc_feature: MA Experiment ID: 108544 Result: Up-regulated in Transcription
  misc_feature: MA Experiment ID: 108545 Result: Down-regulated in Transcription
  misc_feature: MA Experiment 108545 PARAMETER Experiment Name: Zm_Imbibed_Seeds_P Parameter: Age (day) Value: 3 vs. 2
  misc_feature: MA Experiment 108545 PARAMETER Experiment Name: Zm_Imbibed_Seeds_P Parameter: Organism Value: Zea mays
  misc_feature: MA Experiment 108545 PARAMETER Experiment Name: Zm_Imbibed_Seeds_P Parameter: Plant Line Value: 35A19
  misc_feature: MA Experiment 108545 PARAMETER Experiment Name: Zm_Imbibed_Seeds_P Parameter: Tissue Value: Aerial vs. Embryo
  misc_feature: MA Experiment ID: 108546 Result: Down-regulated in Transcription
  misc_feature: MA Experiment 108546 PARAMETER Experiment Name: Zm_Imbibed_Seeds_P Parameter: Age (day) Value: 3 vs. 2
  misc_feature: MA Experiment 108546 PARAMETER Experiment Name: Zm_Imbibed_Seeds_P Parameter: Organism Value: Zea mays
  misc_feature: MA Experiment 108546 PARAMETER Experiment Name: Zm_Imbibed_Seeds_P Parameter: Plant Line Value: 35A19
  misc_feature: MA Experiment 108546 PARAMETER Experiment Name: Zm_Imbibed_Seeds_P Parameter: Tissue Value: Roots vs. Embryo
  misc_feature: MA Experiment ID: 108559 Result: Down-regulated in Transcription
  misc_feature: MA Experiment 108559 PARAMETER Experiment Name: Zm_5mM_NO_P Parameter: Age (day) Value: 8
  misc_feature: MA Experiment 108559 PARAMETER Experiment Name: Zm_5mM_NO_P Parameter: Organism Value: Zea mays
  misc_feature: MA Experiment 108559 PARAMETER Experiment Name: Zm_5mM_NO_P Parameter: Plant Line Value: 35A19
  misc_feature: MA Experiment 108559 PARAMETER Experiment Name: Zm_5mM_NO_P Parameter: Timepoint (hr) Value: 12
  misc_feature: MA Experiment 108559 PARAMETER Experiment Name: Zm_5mM_NO_P Parameter: Tissue Value: Aerial
  misc_feature: MA Experiment 108559 PARAMETER Experiment Name: Zm_5mM_NO_P Parameter: Treatment Value: 5mM NO vs. No Treatment
  misc_feature: MA Experiment ID: 108599 Result: Up-regulated in Transcription
  misc_feature: MA Experiment 108599 PARAMETER Experiment Name: Zm_RT1_P Parameter: Age (day) Value: 11
  misc_feature: MA Experiment 108599 PARAMETER Experiment Name: Zm_RT1_P Parameter: Organism Value: Zea mays
  misc_feature: MA Experiment 108599 PARAMETER Experiment Name: Zm_RT1_P Parameter: Plant Line Value: rt1 mut vs. rt1 wt
  misc_feature: MA Experiment 108599 PARAMETER Experiment Name: Zm_RT1_P Parameter: Tissue Value: Roots
  misc_feature: MA Experiment ID: 108687 Result: Down-regulated in Transcription
  misc_feature: MA Experiment 108687 PARAMETER Experiment Name: Zm_Embryos-Flowers__P Parameter: Tissue Value: Embryo vs. Aerial+
  misc_feature: MA Experiment ID: 108689 Result: Up-regulated in Transcription
  misc_feature: MA Experiment 108689 PARAMETER Experiment Name: Zm_Drought_Roots_P Parameter: Age (day) Value: 9
  misc_feature: MA Experiment 108689 PARAMETER Experiment Name: Zm_Drought_Roots_P Parameter: Organism Value: Zea mays
  misc_feature: MA Experiment 108689 PARAMETER Experiment Name: Zm_Drought_Roots_P Parameter: Plant Line Value: 35A19
  misc_feature: MA Experiment 108689 PARAMETER Experiment Name: Zm_Drought_Roots_P Parameter: Timepoint (hr) Value: 24
  misc_feature: MA Experiment 108689 PARAMETER Experiment Name: Zm_Drought_Roots_P Parameter: Tissue Value: Roots
  misc_feature: MA Experiment 108689 PARAMETER Experiment Name: Zm_Drought_Roots_P Parameter: Treatment Value: Drought vs. No Drought
  misc_feature: MA Experiment ID: 20000535 Result: Down-regulated in Transcription
  misc_feature: MA Experiment 20000535 PARAMETER Experiment Name: Zm_Hybrid_Seed_Dev_P Parameter: DAP Value: 30 vs. 12
  misc_feature: MA Experiment 20000535 PARAMETER Experiment Name: Zm_Hybrid_Seed_Dev_P Parameter: Organism Value: Zea mays
  misc_feature: MA Experiment 20000535 PARAMETER Experiment Name: Zm_Hybrid_Seed_Dev_P Parameter: Plant Line Value: 35A19
  misc_feature: MA Experiment 20000535 PARAMETER Experiment Name: Zm_Hybrid_Seed_Dev_P Parameter: Tissue Value: Embryo vs. Unfert Floret
aggcaggcaggcagccaagaggcaagaggcaagaggtccctcagtcgctaggcgctagctcccggcttaactagtaggcagccatgaatttcggtgggaatggcaacgcgacgatccggtgcaagtactgcagggccagcctgagcgtgatccccggcgagcgcgccatccagtgcgcgcaatgcaactgcgtgacgcgcatccggcgggccgaccgcatcccgctggcgcggccggcgcacgtgccgccggcgttccagcgcgcccggggcaagaagcgcgccgtcctggtcggcatcacgtacgccggcatgcgccaaggctgtggcgacctgaggggccccgtcaacgacgtcaagtgcatgaggaacctcctctgccagcgcttcggcttccccggcgaatgcatcatcatgctcactgacgaccagagggacccgttcaggctgcccacgaaggagaacatccggatggcgatgcactggctggtgcagggctgcagctacggcgactccctggtgttccacttctcgggcatcggcgcgcaggtggcggacgacgacggcgacgaggcggacgggtacgacgaggccatctgcccgctggacgcgttccagagcgggcccatcctggacgacgagatcaacgaggtcatcgtgcgcccgctggtgcacggcgccaggctgcacgccgtggtggacgcctgctacagcgccacggtcctggacctcccctacctgtgccgcatgtccaggaacgggttctggcagtgggaggacgagtgcccgccgtcgggcgcctggaagggcaccagcggaggccacgccgtgctcatcagcggatacagcgagggcaaaggcaacttcgccatgatgcccgacgcccacgcgtcggtcgtcggggccatgacgcacagcttcgtccggacgctggagtgccagccgcgcggggtcacctacggccacctgctcagctccatgagggccatcatgaagaaccgcggcgggggctgcgatctgcagggggccatcggcgcacccatccgcaccgtcgccaacttcagcggcgtgcaggagcctaacctgtcctcttcggagacgtttgacatttaccgcaagcagttcgtcctgtagacaccacgccacaccagtgtttgccccgccggccgcttgtaatgaattgccgtcgtagtatcagaataatcaattatctatcggccatgatatgatatgatatatcaagaaagaaggaactaatacctagagtacttcgttcatctgtattagcagtgaacctctcaatgaaataactaagcatgttcaatgtcctctttttattagagagagacaggg

SEQ ID NO: 16833 - protein, 349 aa, Zea mays subsp. mays
  peptide (1)..(349): Ceres Seq. ID no. 12415474
  misc_feature (65)..(253): Pfam Name: Caspase domain Pfam Description: Caspase domain
  misc_feature (47)..(283): Homolog of NCBI NO: 7485453 NR Description: hypothetical protein F13M23.250 - Arabidopsis
  misc_feature (63)..(299): Homolog of NCBI NO: 11358463 NR Description: hypothetical protein [imported] - Arabidopsis
  misc_feature (47)..(349): Homolog of NCBI NO: 30686772 NR Description: expressed protein [Arabidopsis thaliana]
  misc_feature (63)..(349): Homolog of NCBI NO: 37788549 NR Description: metacaspase 3 [Arabidopsis thaliana]
  misc_feature (63)..(349): Homolog of NCBI NO: 15237654 NR Description: expressed protein
  misc_feature (47)..(339): Homolog of NCBI NO: 32482814 NR Description: metacaspase 2 [Arabidopsis thaliana]
  misc_feature (51)..(349): Homolog of NCBI NO: 37536924 NR Description: hypothetical protein [Oryza sativa (japonica
  misc_feature (11)..(349): Homolog of NCBI NO: 30678252 NR Description: expressed protein [Arabidopsis thaliana]
  misc_feature (226)..(349): Homolog of NCBI NO: 3258570 NR Description: Unknown protein [Arabidopsis thaliana]
  misc_feature (11)..(253): Homolog of NCBI NO: 3258570 NR Description: Unknown protein [Arabidopsis thaliana]
MNFGGNGNATIRCKYCRASLSVIPGERAIQCAQCNCVTRIRRADRIPLARPAHVPPAFQRARGKKRAVLVGITYAGMRQGCGDLRGPVNDVKCMRNLLCQRFGFPGECIIMLTDDQRDPFRLPTKENIRMAMHWLVQGCSYGDSLVFHFSGIGAQVADDDGDEADGYDEAICPLDAFQSGPILDDEINEVIVRPLVHGARLHAVVDACYSATVLDLPYLCRMSRNGFWQWEDECPPSGAWKGTSGGHAVLISGYSEGKGNFAMMPDAHASVVGAMTHSFVRTLECQPRGVTYGHLLSSMRAIMKNRGGGCDLQGAIGAPIRTVANFSGVQEPNLSSSETFDIYRKQFVL

SEQ ID NO: 16834 - protein, 273 aa, Zea mays subsp. mays
  peptide (1)..(273): Ceres Seq. ID no. 12415475
  misc_feature (1)..(177): Pfam Name: Caspase domain Pfam Description: Caspase domain
  misc_feature (1)..(207): Homolog of NCBI NO: 7485453 NR Description: hypothetical protein F13M23.250 - Arabidopsis
  misc_feature (1)..(223): Homolog of NCBI NO: 11358463 NR Description: hypothetical protein [imported] - Arabidopsis
  misc_feature (1)..(273): Homolog of NCBI NO: 30686772 NR Description: expressed protein [Arabidopsis thaliana]
  misc_feature (1)..(273): Homolog of NCBI NO: 37788549 NR Description: metacaspase 3 [Arabidopsis thaliana]
  misc_feature (1)..(273): Homolog of NCBI NO: 15237654 NR Description: expressed protein
  misc_feature (1)..(263): Homolog of NCBI NO: 32482814 NR Description: metacaspase 2 [Arabidopsis thaliana]
  misc_feature (1)..(273): Homolog of NCBI NO: 37536924 NR Description: hypothetical protein [Oryza sativa (japonica
  misc_feature (1)..(273): Homolog of NCBI NO: 30678252 NR Description: expressed protein [Arabidopsis thaliana]
  misc_feature (150)..(273): Homolog of NCBI NO: 3258570 NR Description: Unknown protein [Arabidopsis thaliana]
  misc_feature (1)..(177): Homolog of NCBI NO: 3258570 NR Description: Unknown protein [Arabidopsis thaliana]
MRQGCGDLRGPVNDVKCMRNLLCQRFGFPGECIIMLTDDQRDPFRLPTKENIRMAMHWLVQGCSYGDSLVFHFSGIGAQVADDDGDEADGYDEAICPLDAFQSGPILDDEINEVIVRPLVHGARLHAVVDACYSATVLDLPYLCRMSRNGFWQWEDECPPSGAWKGTSGGHAVLISGYSEGKGNFAMMPDAHASVVGAMTHSFVRTLECQPRGVTYGHLLSSMRAIMKNRGGGCDLQGAIGAPIRTVANFSGVQEPNLSSSETFDIYRKQFVL

SEQ ID NO: 16835 - protein, 256 aa, Zea mays subsp. mays
  peptide (1)..(256): Ceres Seq. ID no. 12415476
  misc_feature (1)..(160): Pfam Name: Caspase domain Pfam Description: Caspase domain
  misc_feature (1)..(190): Homolog of NCBI NO: 7485453 NR Description: hypothetical protein F13M23.250 - Arabidopsis
  misc_feature (1)..(206): Homolog of NCBI NO: 11358463 NR Description: hypothetical protein [imported] - Arabidopsis
  misc_feature (1)..(256): Homolog of NCBI NO: 30686772 NR Description: expressed protein [Arabidopsis thaliana]
  misc_feature (1)..(256): Homolog of NCBI NO: 37788549 NR Description: metacaspase 3 [Arabidopsis thaliana]
  misc_feature (1)..(256): Homolog of NCBI NO: 15237654 NR Description: expressed protein
  misc_feature (1)..(246): Homolog of NCBI NO: 32482814 NR Description: metacaspase 2 [Arabidopsis thaliana]
  misc_feature (1)..(256): Homolog of NCBI NO: 37536924 NR Description: hypothetical protein [Oryza sativa (japonica
  misc_feature (1)..(256): Homolog of NCBI NO: 30678252 NR Description: expressed protein [Arabidopsis thaliana]
  misc_feature (133)..(256): Homolog of NCBI NO: 3258570 NR Description: Unknown protein [Arabidopsis thaliana]
  misc_feature (1)..(160): Homolog of NCBI NO: 3258570 NR Description: Unknown protein [Arabidopsis thaliana]
MRNLLCQRFGFPGECIIMLTDDQRDPFRLPTKENIRMAMHWLVQGCSYGDSLVFHFSGIGAQVADDDGDEADGYDEAICPLDAFQSGPILDDEINEVIVRPLVHGARLHAVVDACYSATVLDLPYLCRMSRNGFWQWEDECPPSGAWKGTSGGHAVLISGYSEGKGNFAMMPDAHASVVGAMTHSFVRTLECQPRGVTYGHLLSSMRAIMKNRGGGCDLQGAIGAPIRTVANFSGVQEPNLSSSETFDIYRKQFVL

SEQ ID NO: 16836 - DNA, 931 bp, Zea mays subsp. mays
  misc_feature (1)..(931): Ceres Seq. ID no. 12415503
  misc_feature: MA Experiment ID: 108544 Result: Down-regulated in Transcription
  misc_feature: MA Experiment ID: 108689 Result: Down-regulated in Transcription
  misc_feature: MA Experiment 108689 PARAMETER Experiment Name: Zm_Drought_Roots_P Parameter: Age (day) Value: 9
  misc_feature: MA Experiment 108689 PARAMETER Experiment Name: Zm_Drought_Roots_P Parameter: Organism Value: Zea mays
  misc_feature: MA Experiment 108689 PARAMETER Experiment Name: Zm_Drought_Roots_P Parameter: Plant Line Value: 35A19
  misc_feature: MA Experiment 108689 PARAMETER Experiment Name: Zm_Drought_Roots_P Parameter: Timepoint (hr) Value: 24
  misc_feature: MA Experiment 108689 PARAMETER Experiment Name: Zm_Drought_Roots_P Parameter: Tissue Value: Roots
  misc_feature: MA Experiment 108689 PARAMETER Experiment Name: Zm_Drought_Roots_P Parameter: Treatment Value: Drought vs. No Drought
  misc_feature: MA Experiment ID: 20000626 Result: Up-regulated in Transcription
  misc_feature: MA Experiment 20000626 PARAMETER Experiment Name: Zm_Herbicide-Treatments_P Parameter: Timepoint (hr) Value: 12
  misc_feature: MA Experiment 20000626 PARAMETER Experiment Name: Zm_Herbicide-Treatments_P Parameter: Tissue Value: Aerial
  misc_feature: MA Experiment 20000626 PARAMETER Experiment Name: Zm_Herbicide-Treatments_P Parameter: Treatment Value: Roundup vs. No Treatment
gttctggtgttccgctctgccgagtcgatgagaaatagccgccgggttcacagttcacttgcagtcgcagtcgcagtcgcagttgctggttgctttgctccccacatttgtcgacggtcgccgtcgccggttcctcgtgcaacgcaccgcgctaacgatggccgagacggtgggcttcgcgagcggcgacgcggcggcgtggcgcgcagcgctggccgcgtacgaccgccgtctcgcggccctagacaaacccgacctcgtggccgtggactccttttaccgccacgacctgcccgcgctcctgcgctgccgtgacccggatcctttcctcgccaagcccgagctggtgcgcctcctccagtggaagctctctcgcggcaagtggagaccgaggctgatggatttcgtcaagggcttggacgacgccgtggtggagtcggcgtcgcgcaaggcgttcgcggctttgcccgacctcagaagggccatcaccgagcttaccgtgctcaagggagtcggacccgccactgcgtccgccgtgctcgctgcgtatgcacctgatgtcgcaccgttcatgtctgacgagccttgggcaattcaaaggagtacactctgaagcagtaccttgcatttgctgataaattgcaggcaaaagcgaaggaactgagcataggagaagaaagtttcacaccctcagatgtcgagagagcactgtggagctcggcaattgcgtccaagtcaccaccaagcggtaacccaaagagggaatcaaagatgcatggcaagaggaaaagatgatttacaccgcgcttctttattgaggctaaaagggttttagtagctgcgggtcttagattcttagttgaacacttgtttttgtaacctgcggaatggaatcctttggtggagtataatttgaaatccttagttgacc

SEQ ID NO: 16837 - protein, 151 aa, Zea mays subsp. mays
  peptide (1)..(151): Ceres Seq. ID no. 12415504
  misc_feature (58)..(142): Homolog of NCBI NO: 40746364 NR Description: hypothetical protein AN1337.2 [Aspergillus
  misc_feature (31)..(142): Homolog of NCBI NO: 20129011 NR Description: CG2446-PC [Drosophila melanogaster]
  misc_feature (7)..(151): Homolog of NCBI NO: 30682101 NR Description: expressed protein [Arabidopsis thaliana]
  misc_feature (7)..(142): Homolog of NCBI NO: 18399536 NR Description: expressed protein
  misc_feature (7)..(142): Homolog of NCBI NO: 15795142 NR Description: gb|AAF48080.1~gene_id:MQC3.4~similar to unknown
MAETVGFASGDAAAWRAALAAYDRRLAALDKPDLVAVDSFYRHDLPALLRCRDPDPFLAKPELVRLLQWKLSRGKWRPRLMDFVKGLDDAVVESASRKAFAALPDLRRAITELTVLKGVGPATASAVLAAYAPDVAPFMSDEPWAIQRSTL

SEQ ID NO: 16838 - protein, 104 aa, Zea mays subsp. mays
  peptide (1)..(104): Ceres Seq. ID no. 12415505
VLVFRSAESMRNSRRVHSSLAVAVAVAVAGCFAPHICRRSPSPVPRATHRANDGRDGGLRERRRGGVARSAGRVRPPSRGPRQTRPRGRGLLLPPRPARAPALP

SEQ ID NO: 16839 - protein, 95 aa, Zea mays subsp. mays
  peptide (1)..(95): Ceres Seq. ID no. 12415506
MRNSRRVHSSLAVAVAVAVAGCFAPHICRRSPSPVPRATHRANDGRDGGLRERRRGGVARSAGRVRPPSRGPRQTRPRGRGLLLPPRPARAPALP

SEQ ID NO: 16840 - DNA, 1522 bp, Zea mays subsp. mays; identical to SEQ ID NO: 4590
  misc_feature (1)..(1522): Ceres Seq. ID no. 12341968
  misc_feature: MA Experiment ID: 108527 Result: Up-regulated in Transcription
  misc_feature: MA Experiment 108527 PARAMETER Experiment Name: Zm_5mM_NO_P Parameter: Age (day) Value: 8
  misc_feature: MA Experiment 108527 PARAMETER Experiment Name: Zm_5mM_NO_P Parameter: Organism Value: Zea mays
  misc_feature: MA Experiment 108527 PARAMETER Experiment Name: Zm_5mM_NO_P Parameter: Plant Line Value: 35A19
  misc_feature: MA Experiment 108527 PARAMETER Experiment Name: Zm_5mM_NO_P Parameter: Timepoint (hr) Value: 6
  misc_feature: MA Experiment 108527 PARAMETER Experiment Name: Zm_5mM_NO_P Parameter: Tissue Value: Aerial
  misc_feature: MA Experiment 108527 PARAMETER Experiment Name: Zm_5mM_NO_P Parameter: Treatment Value: 5mM NO vs. No Treatment
  misc_feature: MA Experiment ID: 108529 Result: Up-regulated in Transcription
  misc_feature: MA Experiment 108529 PARAMETER Experiment Name: Zm_Imbibed_Seeds_P Parameter: Age (day) Value: 5 vs. 2
  misc_feature: MA Experiment 108529 PARAMETER Experiment Name: Zm_Imbibed_Seeds_P Parameter: Organism Value: Zea mays
  misc_feature: MA Experiment 108529 PARAMETER Experiment Name: Zm_Imbibed_Seeds_P Parameter: Plant Line Value: 35A19
  misc_feature: MA Experiment 108529 PARAMETER Experiment Name: Zm_Imbibed_Seeds_P Parameter: Tissue Value: Roots vs. Embryo
  misc_feature: MA Experiment ID: 108540 Result: Down-regulated in Transcription
  misc_feature: MA Experiment 108540 PARAMETER Experiment Name: Zm_20percent_PEG_P Parameter: Age (day) Value: 8
  misc_feature: MA Experiment 108540 PARAMETER Experiment Name: Zm_20percent_PEG_P Parameter: Organism Value: Zea mays
  misc_feature: MA Experiment 108540 PARAMETER Experiment Name: Zm_20percent_PEG_P Parameter: Plant Line Value: 35A19
  misc_feature: MA Experiment 108540 PARAMETER Experiment Name: Zm_20percent_PEG_P Parameter: Timepoint (hr) Value: 6
  misc_feature: MA Experiment 108540 PARAMETER Experiment Name: Zm_20percent_PEG_P Parameter: Tissue Value: Aerial
  misc_feature: MA Experiment 108540 PARAMETER Experiment Name: Zm_20percent_PEG_P Parameter: Treatment Value: 20percent PEG vs. No Treatment
  misc_feature: MA Experiment ID: 108543 Result: Up-regulated in Transcription
  misc_feature: MA Experiment ID: 108546 Result: Up-regulated in Transcription
  misc_feature: MA Experiment 108546 PARAMETER Experiment Name: Zm_Imbibed_Seeds_P Parameter: Age (day) Value: 3 vs. 2
  misc_feature: MA Experiment 108546 PARAMETER Experiment Name: Zm_Imbibed_Seeds_P Parameter: Organism Value: Zea mays
  misc_feature: MA Experiment 108546 PARAMETER Experiment Name: Zm_Imbibed_Seeds_P Parameter: Plant Line Value: 35A19
  misc_feature: MA Experiment 108546 PARAMETER Experiment Name: Zm_Imbibed_Seeds_P Parameter: Tissue Value: Roots vs. Embryo
  misc_feature: MA Experiment ID: 108689 Result: Down-regulated in Transcription
  misc_feature: MA Experiment 108689 PARAMETER Experiment Name: Zm_Drought_Roots_P Parameter: Age (day) Value: 9
  misc_feature: MA Experiment 108689 PARAMETER Experiment Name: Zm_Drought_Roots_P Parameter: Organism Value: Zea mays
  misc_feature: MA Experiment 108689 PARAMETER Experiment Name: Zm_Drought_Roots_P Parameter: Plant Line Value: 35A19
  misc_feature: MA Experiment 108689 PARAMETER Experiment Name: Zm_Drought_Roots_P Parameter: Timepoint (hr) Value: 24
  misc_feature: MA Experiment 108689 PARAMETER Experiment Name: Zm_Drought_Roots_P Parameter: Tissue Value: Roots
  misc_feature: MA Experiment 108689 PARAMETER Experiment Name: Zm_Drought_Roots_P Parameter: Treatment Value: Drought vs. No Drought
  misc_feature: MA Experiment ID: 20000477 Result: Down-regulated in Transcription
  misc_feature: MA Experiment 20000477 PARAMETER Experiment Name: Zm_5mM_SA_P Parameter: Age (day) Value: 10
  misc_feature: MA Experiment 20000477 PARAMETER Experiment Name: Zm_5mM_SA_P Parameter: Organism Value: Zea mays
  misc_feature: MA Experiment 20000477 PARAMETER Experiment Name: Zm_5mM_SA_P Parameter: Plant Line Value: 35A19
  misc_feature: MA Experiment 20000477 PARAMETER Experiment Name: Zm_5mM_SA_P Parameter: Timepoint (hr) Value: 48
  misc_feature: MA Experiment 20000477 PARAMETER Experiment Name: Zm_5mM_SA_P Parameter: Tissue Value: Aerial
  misc_feature: MA Experiment 20000477 PARAMETER Experiment Name: Zm_5mM_SA_P Parameter: Treatment Value: 5mM SA vs. No Treatment
  misc_feature: MA Experiment ID: 20000479 Result: Down-regulated in Transcription
  misc_feature: MA Experiment 20000479 PARAMETER Experiment Name: Zm_Drought_P Parameter: Age (day) Value: 10
  misc_feature: MA Experiment 20000479 PARAMETER Experiment Name: Zm_Drought_P Parameter: Organism Value: Zea mays
  misc_feature: MA Experiment 20000479 PARAMETER Experiment Name: Zm_Drought_P Parameter: Plant Line Value: 35A19
  misc_feature: MA Experiment 20000479 PARAMETER Experiment Name: Zm_Drought_P Parameter: Timepoint (hr) Value: 48
  misc_feature: MA Experiment 20000479 PARAMETER Experiment Name: Zm_Drought_P Parameter: Tissue Value: Aerial
  misc_feature: MA Experiment 20000479 PARAMETER Experiment Name: Zm_Drought_P Parameter: Treatment Value: Drought vs. No Drought
  misc_feature: MA Experiment ID: 20000480 Result: Down-regulated in Transcription
  misc_feature: MA Experiment 20000480 PARAMETER Experiment Name: Zm_Drought_P Parameter: Age (day) Value: 11
  misc_feature: MA Experiment 20000480 PARAMETER Experiment Name: Zm_Drought_P Parameter: Organism Value: Zea mays
  misc_feature: MA Experiment 20000480 PARAMETER Experiment Name: Zm_Drought_P Parameter: Plant Line Value: 35A19
  misc_feature: MA Experiment 20000480 PARAMETER Experiment Name: Zm_Drought_P Parameter: Timepoint (hr) Value: 72
  misc_feature: MA Experiment 20000480 PARAMETER Experiment Name: Zm_Drought_P Parameter: Tissue Value: Aerial
  misc_feature: MA Experiment 20000480 PARAMETER Experiment Name: Zm_Drought_P Parameter: Treatment Value: Drought vs. No Drought
  misc_feature: MA Experiment ID: 20000492 Result: Down-regulated in Transcription
  misc_feature: MA Experiment 20000492 PARAMETER Experiment Name: Zm_Hybrid_Seed_Dev_P Parameter: DAP Value: 12
  misc_feature: MA Experiment 20000492 PARAMETER Experiment Name: Zm_Hybrid_Seed_Dev_P Parameter: Organism Value: Zea mays
  misc_feature: MA Experiment 20000492 PARAMETER Experiment Name: Zm_Hybrid_Seed_Dev_P Parameter: Plant Line Value: 35A19
  misc_feature: MA Experiment 20000492 PARAMETER Experiment Name: Zm_Hybrid_Seed_Dev_P Parameter: Tissue Value: Fert Kernel vs. Unfert Floret

SEQ ID NO: 16841 - protein, 466 aa, Zea mays subsp. mays; identical to SEQ ID NO: 4591
  peptide (1)..(466): Ceres Seq. ID no. 12341969
  misc_feature (48)..(466): Pfam Name: Caspase domain Pfam Description: Caspase domain
  misc_feature (48)..(466): Pfam Name: Caspase domain Pfam Description: Caspase domain
  misc_feature (48)..(466): Homolog of NCBI NO: 15219345 NR Description: hypothetical protein common family
  misc_feature (47)..(466): Homolog of NCBI NO: 15219342 NR Description: hypothetical protein common family; protein id:
  misc_feature (48)..(466): Homolog of NCBI NO: 40644374 NR Description: metacaspase type II [Picea abies]
  misc_feature (53)..(466): Homolog of NCBI NO: 23343885 NR Description: metacaspase 1 [Lycopersicon esculentum]
  misc_feature (260)..(466): Homolog of NCBI NO: 15219340 NR Description: hypothetical protein common family; protein id:
  misc_feature (48)..(466): Homolog of NCBI NO: 33304380 NR Description: metacaspase 7 [Arabidopsis thaliana]
  misc_feature (47)..(466): Homolog of NCBI NO: 15219342 NR Description: hypothetical protein common family; protein id:
  misc_feature (53)..(466): Homolog of NCBI NO: 23343885 NR Description: metacaspase 1 [Lycopersicon esculentum]
  misc_feature (260)..(466): Homolog of NCBI NO: 15219340 NR Description: hypothetical protein common family; protein id:
  misc_feature (47)..(217): Homolog of NCBI NO: 15219340 NR Description: hypothetical protein common family; protein id:
  misc_feature (46)..(466): Homolog of NCBI NO: 29367583 NR Description: latex-abundant protein-like protein
  misc_feature (45)..(466): Homolog of NCBI NO: 34908928 NR Description: putative latex-abundant protein
  misc_feature (47)..(466): Homolog of NCBI NO: 4235430 NR Description: latex-abundant protein [Hevea brasiliensis]
  misc_feature (48)..(466): Homolog of NCBI NO: 40644374 NR Description: metacaspase type II [Picea abies]
  misc_feature (48)..(466): Homolog of NCBI NO: 15219345 NR Description: hypothetical protein common family
  misc_feature (48)..(466): Homolog of NCBI NO: 33304380 NR Description: metacaspase 7 [Arabidopsis thaliana]
  misc_feature (47)..(217): Homolog of NCBI NO: 15219340 NR Description: hypothetical protein common family; protein id:
  misc_feature (47)..(466): Homolog of NCBI NO: 4235430 NR Description: latex-abundant protein [Hevea brasiliensis]
  misc_feature (45)..(466): Homolog of NCBI NO: 34908928 NR Description: putative latex-abundant protein
  misc_feature (46)..(466): Homolog of NCBI NO: 29367583 NR Description: latex-abundant protein-like protein

SEQ ID NO: 16842 - protein, 422 aa, Zea mays subsp. mays; identical to SEQ ID NO: 4592
  peptide (1)..(422): Ceres Seq. ID no. 12341970
  misc_feature (4)..(422): Pfam Name: Caspase domain Pfam Description: Caspase domain
  misc_feature (4)..(422): Pfam Name: Caspase domain Pfam Description: Caspase domain
  misc_feature (3)..(173): Homolog of NCBI NO: 15219340 NR Description: hypothetical protein common family; protein id:
  misc_feature (216)..(422): Homolog of NCBI NO: 15219340 NR Description: hypothetical protein common family; protein id:
  misc_feature (4)..(422): Homolog of NCBI NO: 33304380 NR Description: metacaspase 7 [Arabidopsis thaliana]
  misc_feature (4)..(422): Homolog of NCBI NO: 15219345 NR Description: hypothetical protein common family
  misc_feature (3)..(422): Homolog of NCBI NO: 15219342 NR Description: hypothetical protein common family; protein id:
  misc_feature (3)..(173): Homolog of NCBI NO: 15219340 NR Description: hypothetical protein common family; protein id:
  misc_feature (4)..(422): Homolog of NCBI NO: 33304380 NR Description: metacaspase 7 [Arabidopsis thaliana]
  misc_feature (3)..(422): Homolog of NCBI NO: 15219342 NR Description: hypothetical protein common family; protein id:
  misc_feature (2)..(422): Homolog of NCBI NO: 29367583 NR Description: latex-abundant protein-like protein
  misc_feature (1)..(422): Homolog of NCBI NO: 34908928 NR Description: putative latex-abundant protein
  misc_feature (3)..(422): Homolog of NCBI NO: 4235430 NR Description: latex-abundant protein [Hevea brasiliensis]
  misc_feature (9)..(422): Homolog of NCBI NO: 23343885 NR Description: metacaspase 1 [Lycopersicon esculentum]
  misc_feature (4)..(422): Homolog of NCBI NO: 40644374 NR Description: metacaspase type II [Picea abies]
  misc_feature (4)..(422): Homolog of NCBI NO: 15219345 NR Description: hypothetical protein common family
  misc_feature (216)..(422): Homolog of NCBI NO: 15219340 NR Description: hypothetical protein common family; protein id:
  misc_feature (4)..(422): Homolog of NCBI NO: 40644374 NR Description: metacaspase type II [Picea abies]
  misc_feature (9)..(422): Homolog of NCBI NO: 23343885 NR Description: metacaspase 1 [Lycopersicon esculentum]
  misc_feature (3)..(422): Homolog of NCBI NO: 4235430 NR Description: latex-abundant protein [Hevea brasiliensis]
  misc_feature (1)..(422): Homolog of NCBI NO: 34908928 NR Description: putative latex-abundant protein
  misc_feature (2)..(422): Homolog of NCBI NO: 29367583 NR Description: latex-abundant protein-like protein

SEQ ID NO: 16843 - protein, 393 aa, Zea mays subsp. mays; identical to SEQ ID NO: 4593
  peptide (1)..(393): Ceres Seq. ID no. 12341971
  misc_feature (1)..(393): Pfam Name: Caspase domain Pfam Description: Caspase domain
  misc_feature (1)..(393): Pfam Name: Caspase domain Pfam Description: Caspase domain
  misc_feature (1)..(144): Homolog of NCBI NO: 15219340 NR Description: hypothetical protein common family; protein id:
  misc_feature (187)..(393): Homolog of NCBI NO: 15219340 NR Description: hypothetical protein common family; protein id:
  misc_feature (1)..(393): Homolog of NCBI NO: 33304380 NR Description: metacaspase 7 [Arabidopsis thaliana]
  misc_feature (1)..(393): Homolog of NCBI NO: 15219345 NR Description: hypothetical protein common family
  misc_feature (1)..(393): Homolog of NCBI NO: 15219342 NR Description: hypothetical protein common family; protein id:
  misc_feature (1)..(144): Homolog of NCBI NO: 15219340 NR Description: hypothetical protein common family; protein id:
  misc_feature (1)..(393): Homolog of NCBI NO: 33304380 NR Description: metacaspase 7 [Arabidopsis thaliana]
  misc_feature (1)..(393): Homolog of NCBI NO: 15219342 NR Description: hypothetical protein common family; protein id:
  misc_feature (1)..(393): Homolog of NCBI NO: 29367583 NR Description: latex-abundant protein-like protein
  misc_feature (1)..(393): Homolog of NCBI NO: 34908928 NR Description: putative latex-abundant protein
  misc_feature (1)..(393): Homolog of NCBI NO: 4235430 NR Description: latex-abundant protein [Hevea brasiliensis]
  misc_feature (1)..(393): Homolog of NCBI NO: 23343885 NR Description: metacaspase 1 [Lycopersicon esculentum]
  misc_feature (1)..(393): Homolog of NCBI NO: 40644374 NR Description: metacaspase type II [Picea abies]
  misc_feature (1)..(393): Homolog of NCBI NO: 15219345 NR Description: hypothetical protein common family
  misc_feature (187)..(393): Homolog of NCBI NO: 15219340 NR Description: hypothetical protein common family; protein id:
  misc_feature (1)..(393): Homolog of NCBI NO: 40644374 NR Description: metacaspase type II [Picea abies]
  misc_feature (1)..(393): Homolog of NCBI NO: 23343885 NR Description: metacaspase 1 [Lycopersicon esculentum]
  misc_feature (1)..(393): Homolog of NCBI NO: 4235430 NR Description: latex-abundant protein [Hevea brasiliensis]
  misc_feature (1)..(393): Homolog of NCBI NO: 34908928 NR Description: putative latex-abundant protein
  misc_feature (1)..(393): Homolog of NCBI NO: 29367583 NR Description: latex-abundant protein-like protein

SEQ ID NO: 16844 - DNA, 1795 bp, Zea mays subsp. mays
  misc_feature (1)..(1795): Ceres Seq. ID no. 12358446
  misc_feature: MA Experiment ID: 108687 Result: Down-regulated in Transcription
  misc_feature: MA Experiment 108687 PARAMETER Experiment Name: Zm_Embryos-Flowers__P Parameter: Tissue Value: Embryo vs. Aerial+
atctggtcggcgtggatcggatcttcggtggtgtttctcgtcttcacggcgattagtggcggcgagccgaccacgtccccgcagcagcagtcagcggcggcttgacgcggtcggacgggtacctctagttggcatcagcgagtgggcgcggggcgccgcaagtctcaccgtccgctggtgtagaggccccgagtctcggcgctatggagtgtaggccgcgtgtctccgcttagggagggccaggggtcaacaaagggacttgtcaagtgacaacatcgcggccttcgggtgttggagcctgcttggaggtgtccggcctattggtgccgtaccacaggattggttcattatttgtgggagatctatatttgtcttaccattttgttcccgcttctagtccccaaatcttcacgggctttgccagatcgctggccatctccttggcagccgcttccgctgtcgccagccatcaccaacctgcgcctcatagtggagcccaggaaaggcggtgggactgagcgagggaagaggagatgactagcttgtcgatcacggtgatgacgctaacctgcatgaaggcgaacagccgagcgagagccccaacagctgggagaagcgccgggacatctgcgtcagcgtcatcaccagctactctcccaccatcctttgcacccagcaaggcttaagatggcaactggactacctacaacagtgcttgccgggttatgaacagtttggaatctcaagaaaaggctcacaggacaacactgatgaatactgcacaatattctatgaaaaggagaaggtggagcttactgaaggtggcactttttggttgtcggaatcaccatcggttccaggaagcatttcatggggagcaaaggcaccctgcattgcaacatgggcaacgtttcaactcaaaagactagaaccacctggattcagtttccagatcgtaaatacaaatcttgatgaagttagccctcgtgctcgacgaagaagtgctttacttacatggcaacatatagcatcgctgccacccaatttgcctgttatctattgtggaggcttcaatacacagaaggaatctatgactgggcggtttttgcttggcagatccagagaacatggtgttgttggtgatatgagagatgcttggccaaatgctcgagtgcgaaaaaatgtttcactaatacacacatatcatggatttaaaggggagaaacaaggtgccctggaatttcttaaattgatatttagagctctttgcctctgctgggatcgacagacacaggacttgcatatcgactggatcttgtttagaggacgcccattggttcctgcactttgtgaggtcattaatgacaatatagatggtgtttatccgtcgtcgcacttccctatctttgccgagtttttgcttccacgctcagtccgcctagctgagacaccttcatagctattgtgtcaattttttgttctatttttcccaatcttattttgattacggctgattgtttctttcgaccacttcaccatgatcttgcggtaacccccctttacaaccattgttgggtttctttctgttatcccattccgcaaaacaagacaatgcacatgtgcatccttgtatgtttcctgtcactagtccctattatgtgttcgccttagctttgttatcttcttaaagttcactttttccttatgtcattgatttttagactgtcatatataccgtgtatatatatggtatgaatatgttgtcatgtatagtcggccgatccttgtatatgtt

SEQ ID NO: 16845 - protein, 122 aa, Zea mays subsp. mays
  peptide (1)..(122): Ceres Seq. ID no. 12358447
  misc_feature (1)..(59): Pfam Name: Endonuclease/Exonuclease/phosphatase family Pfam Description: Endonuclease/Exonuclease/phosphatase family
  misc_feature (1)..(24): Homolog of NCBI NO: 16802368 NR Description: similar to unknown proteins [Listeria
  misc_feature (1)..(42): Homolog of NCBI NO: 29828020 NR Description: hypothetical protein [Streptomyces avermitilis
  misc_feature (1)..(49): Homolog of NCBI NO: 29348040 NR Description: conserved hypothetical protein with
  misc_feature (1)..(50): Homolog of NCBI NO: 23097914 NR Description: hypothetical protein [Oceanobacillus iheyensis
  misc_feature (72)..(113): Homolog of NCBI NO: 21241443 NR Description: conserved hypothetical protein
  misc_feature (72)..(113): Homolog of NCBI NO: 21232876 NR Description: conserved hypothetical protein
  misc_feature (1)..(59): Homolog of NCBI NO: 21232876 NR Description: conserved hypothetical protein
  misc_feature (11)..(121): Homolog of NCBI NO: 25372651 NR Description: hypothetical protein AT4g30900 [imported] -
  misc_feature (1)..(121): Homolog of NCBI NO: 22329036 NR Description: hypothetical protein
MTGRFLLGRSREHGVVGDMRDAWPNARVRKNVSLIHTYHGFKGEKQGALEFLKLIFRALCLCWDRQTQDLHIDWILFRGRPLVPALCEVINDNIDGVYPSSHFPIFAEFLLPRSVRLAETPS

SEQ ID NO: 16846 - protein, 104 aa, Zea mays subsp. mays
  peptide (1)..(104): Ceres Seq. ID no. 12358448
  misc_feature (1)..(24): Homolog of NCBI NO: 29828020 NR Description: hypothetical protein [Streptomyces avermitilis
  misc_feature (1)..(31): Homolog of NCBI NO: 29348040 NR Description: conserved hypothetical protein with
  misc_feature (1)..(32): Homolog of NCBI NO: 23097914 NR Description: hypothetical protein [Oceanobacillus iheyensis
  misc_feature (54)..(95): Homolog of NCBI NO: 21241443 NR Description: conserved hypothetical protein
  misc_feature (54)..(95): Homolog of NCBI NO: 21232876 NR Description: conserved hypothetical protein
  misc_feature (1)..(41): Homolog of NCBI NO: 21232876 NR Description: conserved hypothetical protein
  misc_feature (1)..(103): Homolog of NCBI NO: 25372651 NR Description: hypothetical protein AT4g30900 [imported] -
  misc_feature (1)..(103): Homolog of NCBI NO: 22329036 NR Description: hypothetical protein
MRDAWPNARVRKNVSLIHTYHGFKGEKQGALEFLKLIFRALCLCWDRQTQDLHIDWILFRGRPLVPALCEVINDNIDGVYPSSHFPIFAEFLLPRSVRLAETPS

SEQ ID NO: 16847 - protein, 70 aa, Zea mays subsp. mays
  peptide (1)..(70): Ceres Seq. ID no. 12358449
SGRRGSDLRWCFSSSRRLVAASRPRPRSSSQRRLDAVGRVPLVGISEWARGAASLTVRWCRGPESRRYGV

SEQ ID NO: 16848 - DNA, 1173 bp, Zea mays subsp. mays
  misc_feature (1)..(1173): Ceres Seq. ID no. 12566291
  misc_feature: MA Experiment ID: 108529 Result: Up-regulated in Transcription
  misc_feature: MA Experiment 108529 PARAMETER Experiment Name: Zm_Imbibed_Seeds_P Parameter: Age (day) Value: 5 vs. 2
  misc_feature: MA Experiment 108529 PARAMETER Experiment Name: Zm_Imbibed_Seeds_P Parameter: Organism Value: Zea mays
  misc_feature: MA Experiment 108529 PARAMETER Experiment Name: Zm_Imbibed_Seeds_P Parameter: Plant Line Value: 35A19
  misc_feature: MA Experiment 108529 PARAMETER Experiment Name: Zm_Imbibed_Seeds_P Parameter: Tissue Value: Roots vs. Embryo
  misc_feature: MA Experiment ID: 108535 Result: Down-regulated in Transcription
  misc_feature: MA Experiment 108535 PARAMETER Experiment Name: Zm_Meristem_P Parameter: Age (day) Value: 8
  misc_feature: MA Experiment 108535 PARAMETER Experiment Name: Zm_Meristem_P Parameter: Organism Value: Zea mays
  misc_feature: MA Experiment 108535 PARAMETER Experiment Name: Zm_Meristem_P Parameter: Plant Line Value: 35A19
  misc_feature: MA Experiment 108535 PARAMETER Experiment Name: Zm_Meristem_P Parameter: Tissue Value: Root Meristem vs. Above Root Meristem
gtgaccacgtcccacgccgagttccgctggccgctgtcgccgaaacacggcagcaggagcagtagcgtccgtcctgtccgcgcgcgttcccctccccgaccggcaggttccccggccattcatccgtttcccactgctcctccgtggctcagctctgctccctgtatcggtctgcccctctgccctcccggtctctcctcttcccgtcccgcccagcgcgtcccccaaggaagccccgacgccgcggcatggggatcgtggaggaggcgcacaacctgcgcgtggtgggcgaggggaagcgcggggtcatcgtgctggcgcacggcttcggcaccgaccagtccgtctggaagcatctggtgccgcacctcgtcgccgactaccgcgtcgtgctcttcgacaccatgggcgccggccccaccaacccggactacttcgacttctcccgctacgccacgctcgagggctacgcgctcgacctcctcgccatcctccaggagctcggcgtccagtcctgcatctacgtcggccactccgtctccgcgatcatcggcgcgctcgcgtccatctccaggcccgacctcttcaccaagctcgtgctcctctccgcgtccccaaggtacctcaacgatgtggactactatggcgggttcgagcaagatgagctggatgagctgtttgaggcgatgcaatcaaactacaaggcctggtgcttaggttttgcacccctgtgtgtcggaggagatatggaatcagtggcagttcaggagtttagcaggacactcttcaatatacgtccggacattgcacttaatgttgcccagacgatcttccagagcgatgtgcgcagcctcctcccgcacgttagtgtcccatgccacattgttcagagcaccaaggatctcgcggtgccagttgtggtgtctgagtacctgcacaggcaccttggtggcgactccatcgtggaggtgatgccctctgaaggccatcttccccagcttagctctccagacattgtaacccctgtcttactccggcacatccagcatgacatcgcaatctaggttggccagtcgttccaacaagacaatgagcactcgaagctgtctactgcctgtttgtatgatatcccgcttaattgttcaacgtaggattgcatctatttgatgctct

SEQ ID NO: 16849 - protein, 271 aa, Zea mays subsp. mays
  peptide (1)..(271): Ceres Seq. ID no. 12566292
  misc_feature (45)..(263): Pfam Name: alpha/beta hydrolase fold Pfam Description: alpha/beta hydrolase fold
  misc_feature (9)..(261): Homolog of NCBI NO: 34912326 NR Description: P0451D05.26 [Oryza sativa (japonica
  misc_feature (21)..(265): Homolog of NCBI NO: 22298700 NR Description: ORF_ID:tlr1157~hypothetical protein
  misc_feature (4)..(254): Homolog of NCBI NO: 22987307 NR Description: hypothetical protein [Burkholderia fungorum]
  misc_feature (7)..(253): Homolog of NCBI NO: 15230110 NR Description: unknown protein; protein id: At3g24420.1
  misc_feature (8)..(257): Homolog of NCBI NO: 24216360 NR Description: Predicted hydrolases or acyltransferases,
  misc_feature (6)..(263): Homolog of NCBI NO: 21593927 NR Description: unknown [Arabidopsis thaliana]
  misc_feature (6)..(263): Homolog of NCBI NO: 18396732 NR Description: expressed protein
  misc_feature (1)..(271): Homolog of NCBI NO: 15235567 NR Description: putative protein
  misc_feature (1)..(126): Homolog of NCBI NO: 40736991 NR Description: putative hydrolases [Oryza sativa (japonica
  misc_feature (125)..(271): Homolog of NCBI NO: 40736991 NR Description: putative hydrolases [Oryza sativa (japonica
MGIVEEAHNLRVVGEGKRGVIVLAHGFGTDQSVWKHLVPHLVADYRVVLFDTMGAGPTNPDYFDFSRYATLEGYALDLLAILQELGVQSCIYVGHSVSAIIGALASISRPDLFTKLVLLSASPRYLNDVDYYGGFEQDELDELFEAMQSNYKAWCLGFAPLCVGGDMESVAVQEFSRTLFNIRPDIALNVAQTIFQSDVRSLLPHVSVPCHIVQSTKDLAVPVVVSEYLHRHLGGDSIVEVMPSEGHLPQLSSPDIVTPVLLRHIQHDIAI

SEQ ID NO: 16850 - protein, 238 aa, Zea mays subsp. mays
  peptide (1)..(238): Ceres Seq. ID no. 12566293
  misc_feature (96)..(219): Pfam Name: Equine herpesvirus glycoprotein gp2 Pfam Description: Equine herpesvirus glycoprotein gp2
  misc_feature (18)..(222): Homolog of NCBI NO: 13592175 NR Description: ppg3 [Leishmania major]
  misc_feature (15)..(222): Homolog of NCBI NO: 5420387 NR Description: proteophosphoglycan [Leishmania major]
  misc_feature (12)..(222): Homolog of NCBI NO: 23017082 NR Description: hypothetical protein [Thermobifida fusca]
  misc_feature (18)..(215): Homolog of NCBI NO: 11359723 NR Description: proteophosphoglycan, membrane-associated
  misc_feature (22)..(238): Homolog of NCBI NO: 11359723 NR Description: proteophosphoglycan, membrane-associated
  misc_feature (11)..(238): Homolog of NCBI NO: 13592175 NR Description: ppg3 [Leishmania major]
  misc_feature (18)..(238): Homolog of NCBI NO: 13592175 NR Description: ppg3 [Leishmania major]
  misc_feature (18)..(238): Homolog of NCBI NO: 13592175 NR Description: ppg3 [Leishmania major]
  misc_feature (18)..(238): Homolog of NCBI NO: 5420387 NR Description: proteophosphoglycan [Leishmania major]
  misc_feature (18)..(238): Homolog of NCBI NO: 11359723 NR Description: proteophosphoglycan, membrane-associated
VTTSHAEFRWPLSPKHGSRSSSVRPVRARSPPRPAGSPAIHPFPTAPPWLSSAPCIGLPLCPPGLSSSRPAQRVPQGSPDAAAWGSWRRRTTCAWWARGSAGSSCWRTASAPTSPSGSIWCRTSSPTTASCSSTPWAPAPPTRTTSTSPATPRSRATRSTSSPSSRSSASSPASTSATPSPRSSARSRPSPGPTSSPSSCSSPRPQGTSTMWTTMAGSSKMSWMSCLRRCNQTTRPGA

SEQ ID NO: 16851 - protein, 219 aa, Zea mays subsp. mays
  peptide (1)..(219): Ceres Seq. ID no. 12566294
  misc_feature (1)..(211): Pfam Name: alpha/beta hydrolase fold Pfam Description: alpha/beta hydrolase fold
  misc_feature (1)..(209): Homolog of NCBI NO: 34912326 NR Description: P0451D05.26 [Oryza sativa (japonica
  misc_feature (1)..(213): Homolog of NCBI NO: 22298700 NR Description: ORF_ID:tlr1157~hypothetical protein
  misc_feature (1)..(202): Homolog of NCBI NO: 22987307 NR Description: hypothetical protein [Burkholderia fungorum]
  misc_feature (1)..(201): Homolog of NCBI NO: 15230110 NR Description: unknown protein; protein id: At3g24420.1
  misc_feature (1)..(205): Homolog of NCBI NO: 24216360 NR Description: Predicted hydrolases or acyltransferases,
  misc_feature (1)..(211): Homolog of NCBI NO: 21593927 NR Description: unknown [Arabidopsis thaliana]
  misc_feature (1)..(211): Homolog of NCBI NO: 18396732 NR Description: expressed protein
  misc_feature (1)..(219): Homolog of NCBI NO: 15235567 NR Description: putative protein
  misc_feature (1)..(74): Homolog of NCBI NO: 40736991 NR Description: putative hydrolases [Oryza sativa (japonica
  misc_feature (73)..(219): Homolog of NCBI NO: 40736991 NR Description: putative hydrolases [Oryza sativa (japonica
MGAGPTNPDYFDFSRYATLEGYALDLLAILQELGVQSCIYVGHSVSAIIGALASISRPDLFTKLVLLSASPRYLNDVDYYGGFEQDELDELFEAMQSNYKAWCLGFAPLCVGGDMESVAVQEFSRTLFNIRPDIALNVAQTIFQSDVRSLLPHVSVPCHIVQSTKDLAVPVVVSEYLHRHLGGDSIVEVMPSEGHLPQLSSPDIVTPVLLRHIQHDIAI

SEQ ID NO: 16852 - DNA, 1470 bp, Zea mays subsp. mays
  misc_feature (1)..(1470): Ceres Seq. ID no. 12354613
  misc_feature: MA Experiment ID: 108527 Result: Up-regulated in Transcription
  misc_feature: MA Experiment 108527 PARAMETER Experiment Name: Zm_5mM_NO_P Parameter: Age (day) Value: 8
  misc_feature: MA Experiment 108527 PARAMETER Experiment Name: Zm_5mM_NO_P Parameter: Organism Value: Zea mays
  misc_feature: MA Experiment 108527 PARAMETER Experiment Name: Zm_5mM_NO_P Parameter: Plant Line Value: 35A19
  misc_feature: MA Experiment 108527 PARAMETER Experiment Name: Zm_5mM_NO_P Parameter: Timepoint (hr) Value: 6
  misc_feature: MA Experiment 108527 PARAMETER Experiment Name: Zm_5mM_NO_P Parameter: Tissue Value: Aerial
  misc_feature: MA Experiment 108527 PARAMETER Experiment Name: Zm_5mM_NO_P Parameter: Treatment Value: 5mM NO vs. No Treatment
  misc_feature: MA Experiment ID: 108528 Result: Down-regulated in Transcription
  misc_feature: MA Experiment 108528 PARAMETER Experiment Name: Zm_Imbibed_Seeds_P Parameter: Age (day) Value: 5 vs. 2
  misc_feature: MA Experiment 108528 PARAMETER Experiment Name: Zm_Imbibed_Seeds_P Parameter: Organism Value: Zea mays
  misc_feature: MA Experiment 108528 PARAMETER Experiment Name: Zm_Imbibed_Seeds_P Parameter: Plant Line Value: 35A19
  misc_feature: MA Experiment 108528 PARAMETER Experiment Name: Zm_Imbibed_Seeds_P Parameter: Tissue Value: Aerial vs. Embryo
  misc_feature: MA Experiment ID: 108535 Result: Down-regulated in Transcription
  misc_feature: MA Experiment 108535 PARAMETER Experiment Name: Zm_Meristem_P Parameter: Age (day) Value: 8
  misc_feature: MA Experiment 108535 PARAMETER Experiment Name: Zm_Meristem_P Parameter: Organism Value: Zea mays
  misc_feature: MA Experiment 108535 PARAMETER Experiment Name: Zm_Meristem_P Parameter: Plant Line Value: 35A19
  misc_feature: MA Experiment 108535 PARAMETER Experiment Name: Zm_Meristem_P Parameter: Tissue Value: Root Meristem vs. Above Root Meristem
  misc_feature: MA Experiment ID: 108536 Result: Up-regulated in Transcription
  misc_feature: MA Experiment 108536 PARAMETER Experiment Name: Zm_Meristem_P Parameter: Age (day) Value: 8
  misc_feature: MA Experiment 108536 PARAMETER Experiment Name: Zm_Meristem_P Parameter: Organism Value: Zea mays
  misc_feature: MA Experiment 108536 PARAMETER Experiment Name: Zm_Meristem_P Parameter: Plant Line Value: 35A19
  misc_feature: MA Experiment 108536 PARAMETER Experiment Name: Zm_Meristem_P Parameter: Tissue Value: Shoot Meristem vs. Above Shoot Meristem
  misc_feature: MA Experiment ID: 108544 Result: Up-regulated in Transcription
  misc_feature: MA Experiment ID: 108545 Result: Down-regulated in Transcription
  misc_feature: MA Experiment 108545 PARAMETER Experiment Name: Zm_Imbibed_Seeds_P Parameter: Age (day) Value: 3 vs. 2
  misc_feature: MA Experiment 108545 PARAMETER Experiment Name: Zm_Imbibed_Seeds_P Parameter: Organism Value: Zea mays
  misc_feature: MA Experiment 108545 PARAMETER Experiment Name: Zm_Imbibed_Seeds_P Parameter: Plant Line Value: 35A19
  misc_feature: MA Experiment 108545 PARAMETER Experiment Name: Zm_Imbibed_Seeds_P Parameter: Tissue Value: Aerial vs. Embryo
  misc_feature: MA Experiment ID: 20000534 Result: Down-regulated in Transcription
  misc_feature: MA Experiment 20000534 PARAMETER Experiment Name: Zm_Hybrid_Pollen_P Parameter: Age (day) Value: 8
  misc_feature: MA Experiment 20000534 PARAMETER Experiment Name: Zm_Hybrid_Pollen_P Parameter: Organism Value: Zea mays
  misc_feature: MA Experiment 20000534 PARAMETER Experiment Name: Zm_Hybrid_Pollen_P Parameter: Plant Line Value: 35A19
  misc_feature: MA Experiment 20000534 PARAMETER Experiment Name: Zm_Hybrid_Pollen_P Parameter: Tissue Value: Pollen vs. Aerial
agaaaatgttcctcgcaaagtttggctgacggcacccaccgcccacagaagcgcacctctgttctttggtgtgtggccgtgtggattcaaaaccgctgaccggccgcttatttaagcccttgccccgccggttttctcttctcccgtcggcgctggtccacgcggctccaacacctgcctgcctgcctgattcttacaccaaccaaccacgcgcgccaagccgaattcgtcttccaccgatccgccccgcccgtttcccattgcttagcttgctatggcgcagcagcagccggtgcggcggattctgaaggtggcaccgccggggaagggggacggggaatccttccccacggtgcaggcggcggtcgacgcggtgccgctgggcaaccgggcgcgcgtcgtcatccgcctcgcgccgggggtctacagggagcctgtctacgtcgccaagaccaagaacttcatcaccgtcgcgggggcctcgcccgaggccaccgtcgtgtcatgggacaacaccgccacgcgcatcaggcactcgcagtcatccagggttataggaactggaacattcggctgtggtacgttcatcattgagggggaagatttcattgcagagaatatcacgtttgagaactcagctccccagggctctgggcaggccgttgcagtccgggtaaccgcagataggtgtgctttctacaactgccggttcctcggttggcaagacacattatacttacactacgggaaacagtacttaagagactgttatattgaaggccattgtgacttcatctttggtaactctgtcgcccttatggagcattgccatatccattgcaaagcagcgggatacatcactgctcatagccggaagtccacatcagaatctactggctatgtgttcttgaggtgtactattactggacatggagaagctggatacatgttcctaggtcggccatgggggccctttggaagggttgtctttgcgtacactttcatggatcgatgcatcaagccttctgggtggcacaactgggacaaatccgagaacgagcgaactgcttgcttttatgagtacaggtgctcagggccaggcgccctcccatcgaaccgggtcacatggtgtagacagttgctggatgttgaagcagagcagttccttgcgcacacttttatcgacccagacgtcgataggccatggctcctccagatgatggcgataagaataccagcctcagcatagtttgatcccggcagccgcaggtcctgcatggttcatgcctcctttctagcctatttaaataaactaagttggaggatgcattatatttgcataagtttgtaacgtttggtgaattagtatccactttcatctcactgtgggcggtggggatagggaatgagagagcttctcttgtaacgaaccccagcactaggctgaaatatatgcagattttattttgc

SEQ ID NO: 16853 - protein, 324 aa, Zea mays subsp. mays
  peptide (1)..(324): Ceres Seq. ID no. 12354614
  misc_feature (24)..(306): Pfam Name: Pectinesterase Pfam Description: Pectinesterase
  misc_feature (152)..(271): Homolog of NCBI NO: 10047449 NR Description: pectin methylesterase [Prunus armeniaca]
  misc_feature (13)..(299): Homolog of NCBI NO: 29349518 NR Description: putative pectinesterase precursor
  misc_feature (24)..(312): Homolog of NCBI NO: 15238111 NR Description: pectinesterase family
  misc_feature (1)..(312): Homolog of NCBI NO: 15240544 NR Description: pectinesterase family; protein id: At5g55590.1
  misc_feature (10)..(312): Homolog of NCBI NO: 34913006 NR Description: pectin methylesterase-like protein
  misc_feature (18)..(294): Homolog of NCBI NO: 21229599 NR Description: pectin methylesterase-like protein
  misc_feature (18)..(304): Homolog of NCBI NO: 15241163 NR Description: pectinesterase family
  misc_feature (1)..(304): Homolog of NCBI NO: 34909402 NR Description: putative pectin methylesterase
  misc_feature (9)..(324): Homolog of NCBI NO: 18406048 NR Description: pectinesterase family
  misc_feature (1)..(324): Homolog of NCBI NO: 37534214 NR Description: putative pectin methylesterase
MAQQQPVRRILKVAPPGKGDGESFPTVQAAVDAVPLGNRARVVIRLAPGVYREPVYVAKTKNFITVAGASPEATVVSWDNTATRIRHSQSSRVIGTGTFGCGTFIIEGEDFIAENITFENSAPQGSGQAVAVRVTADRCAFYNCRFLGWQDTLYLHYGKQYLRDCYIEGHCDFIFGNSVALMEHCHIHCKAAGYITAHSRKSTSESTGYVFLRCTITGHGEAGYMFLGRPWGPFGRVVFAYTFMDRCIKPSGWHNWDKSENERTACFYEYRCSGPGALPSNRVTWCRQLLDVEAEQFLAHTFIDPDVDRPWLLQMMAIRIPASA

SEQ ID NO: 16854 - DNA, 1673 bp, Zea mays subsp. mays
  misc_feature (1)..(1673): Ceres Seq. ID no. 12349655
  misc_feature: MA Experiment ID: 108523 Result: Down-regulated in Transcription
  misc_feature: MA Experiment 108523 PARAMETER Experiment Name: Zm_42deg_Heat_P Parameter: Age (day) Value: 8
  misc_feature: MA Experiment 108523 PARAMETER Experiment Name: Zm_42deg_Heat_P Parameter: Organism Value: Zea mays
  misc_feature: MA Experiment 108523 PARAMETER Experiment Name: Zm_42deg_Heat_P Parameter: Plant Line Value: 35A19
  misc_feature: MA Experiment 108523 PARAMETER Experiment Name: Zm_42deg_Heat_P Parameter: Temperature (deg C) Value: 42 vs. 22
  misc_feature: MA Experiment 108523 PARAMETER Experiment Name: Zm_42deg_Heat_P Parameter: Timepoint (hr) Value: 6
  misc_feature: MA Experiment 108523 PARAMETER Experiment Name: Zm_42deg_Heat_P Parameter: Tissue Value: Aerial
  misc_feature: MA Experiment ID: 108535 Result: Down-regulated in Transcription
  misc_feature: MA Experiment 108535 PARAMETER Experiment Name: Zm_Meristem_P Parameter: Age (day) Value: 8
  misc_feature: MA Experiment 108535 PARAMETER Experiment Name: Zm_Meristem_P Parameter: Organism Value: Zea mays
  misc_feature: MA Experiment 108535 PARAMETER Experiment Name: Zm_Meristem_P Parameter: Plant Line Value: 35A19
  misc_feature: MA Experiment 108535 PARAMETER Experiment Name: Zm_Meristem_P Parameter: Tissue Value: Root Meristem vs. Above Root Meristem
  misc_feature: MA Experiment ID: 108543 Result: Up-regulated in Transcription
  misc_feature: MA Experiment ID: 20000477 Result: Down-regulated in Transcription
  misc_feature: MA Experiment 20000477 PARAMETER Experiment Name: Zm_5mM_SA_P Parameter: Age (day) Value: 10
  misc_feature: MA Experiment 20000477 PARAMETER Experiment Name: Zm_5mM_SA_P Parameter: Organism Value: Zea mays
  misc_feature: MA Experiment 20000477 PARAMETER Experiment Name: Zm_5mM_SA_P Parameter: Plant Line Value: 35A19
  misc_feature: MA Experiment 20000477 PARAMETER Experiment Name: Zm_5mM_SA_P Parameter: Timepoint (hr) Value: 48
  misc_feature: MA Experiment 20000477 PARAMETER Experiment Name: Zm_5mM_SA_P Parameter: Tissue Value: Aerial
  misc_feature: MA Experiment 20000477 PARAMETER Experiment Name: Zm_5mM_SA_P Parameter: Treatment Value: 5mM SA vs. No Treatment
  misc_feature: MA Experiment ID: 20000478 Result: Down-regulated in Transcription
  misc_feature: MA Experiment 20000478 PARAMETER Experiment Name: Zm_5mM_SA_P Parameter: Age (day) Value: 11
  misc_feature: MA Experiment 20000478 PARAMETER Experiment Name: Zm_5mM_SA_P Parameter: Organism Value: Zea mays
  misc_feature: MA Experiment 20000478 PARAMETER Experiment Name: Zm_5mM_SA_P Parameter: Plant Line Value: 35A19
  misc_feature: MA Experiment 20000478 PARAMETER Experiment Name: Zm_5mM_SA_P Parameter: Timepoint (hr) Value: 72
  misc_feature: MA Experiment 20000478 PARAMETER Experiment Name: Zm_5mM_SA_P Parameter: Tissue Value: Aerial
  misc_feature: MA Experiment 20000478 PARAMETER Experiment Name: Zm_5mM_SA_P Parameter: Treatment Value: 5mM SA vs. No Treatment
  misc_feature: MA Experiment ID: 20000479 Result: Down-regulated in Transcription
  misc_feature: MA Experiment 20000479 PARAMETER Experiment Name: Zm_Drought_P Parameter: Age (day) Value: 10
  misc_feature: MA Experiment 20000479 PARAMETER Experiment Name: Zm_Drought_P Parameter: Organism Value: Zea mays
  misc_feature: MA Experiment 20000479 PARAMETER Experiment Name: Zm_Drought_P Parameter: Plant Line Value: 35A19
  misc_feature: MA Experiment 20000479 PARAMETER Experiment Name: Zm_Drought_P Parameter: Timepoint (hr) Value: 48
  misc_feature: MA Experiment 20000479 PARAMETER Experiment Name: Zm_Drought_P Parameter: Tissue Value: Aerial
  misc_feature: MA Experiment 20000479 PARAMETER Experiment Name: Zm_Drought_P Parameter: Treatment Value: Drought vs. No Drought
  misc_feature: MA Experiment ID: 20000492 Result: Down-regulated in Transcription
  misc_feature: MA Experiment 20000492 PARAMETER Experiment Name: Zm_Hybrid_Seed_Dev_P Parameter: DAP Value: 12
  misc_feature: MA Experiment 20000492 PARAMETER Experiment Name: Zm_Hybrid_Seed_Dev_P Parameter: Organism Value: Zea mays
  misc_feature: MA Experiment 20000492 PARAMETER Experiment Name: Zm_Hybrid_Seed_Dev_P Parameter: Plant Line Value: 35A19
  misc_feature: MA Experiment 20000492 PARAMETER Experiment Name: Zm_Hybrid_Seed_Dev_P Parameter: Tissue Value: Fert Kernel vs. Unfert Floret
  misc_feature: MA Experiment ID: 20000535 Result: Down-regulated in Transcription
  misc_feature: MA Experiment 20000535 PARAMETER Experiment Name: Zm_Hybrid_Seed_Dev_P Parameter: DAP Value: 30 vs. 12
  misc_feature: MA Experiment 20000535 PARAMETER Experiment Name: Zm_Hybrid_Seed_Dev_P Parameter: Organism Value: Zea mays
  misc_feature: MA Experiment 20000535 PARAMETER Experiment Name: Zm_Hybrid_Seed_Dev_P Parameter: Plant Line Value: 35A19
  misc_feature: MA Experiment 20000535 PARAMETER Experiment Name: Zm_Hybrid_Seed_Dev_P Parameter: Tissue Value: Embryo vs. Unfert Floret
atatatgcacatacatgcatggttaattaagttgcaacgacgacgacgaccatggagactgtgttcaagtggagagcaagaacaggaggcggagtctcgctgatccatctccttgtccggtgttttgcagtggcagctgccatcttgctgctggcagatgggaggcatgctcatgcagtagatcatcccgcacccgtggaggtacagacaggcagctgcagcgaggtggccgacgagcagcagtggcggatggtgaagaccaggggaaaccagttcgtcgtcggcgacgaccacgacgacaggccgttctacgtgaacggcttcaacacgtactggctgatgatcctcgccgtcgacccgtccaccaggggcaaggtcacggaggtgttccagcaggcggtggcggccggcctcacggtgtgccgcacctgggccttcaacgacggcggctggagggcgcttcagaagtcgccgtctgtctacgacgaggatgtcttcaaggcgctggatttcgtggtgagcgaggcgaggaagtacaggatcaggcttatactgtcactgatcaacaactgggacagctacggcggcaaggcgcagtacgtcaaatgggccggggacgacgccgccgccgacggcggccgcctcaacatcaccgcctccgttgacgatgacttcttttccgaccaaaccgtgaaggtctacttcaagaaccacgtcaagaacatgctgacgagggtgaacacgtacaccagtgtgatgtacaaggacgacccgaccatcttcgcgtgggagctcatgaatgagccgcgctgcacgtcggatccagccgggaacaagctgcaggagtggatccaagagatggcgttccatgtgaagtccatcgacccggaccacctgctggaagttggcggcttggcgcagagggcttctacgggccctcgtcgccgtcacggcttccggccaacccgaacgcctatgctggccaggtcggcaccgacttcatccgcaaccaccgcgtcctgggcgtcgacttcgcctccgtccacatctacccagacacctggatgccgggcgcgactctggaggcacggctctggttcgtggactcgtggatggaggcgcacatcgccgacgccgacggcacgctgggcatgccggtggtgttcacggagttcggggcgtccaccaccaaggcccggagcggctgcttcaacgcgaccacgagagaccagttcatccaggcggtgtacgcgcggctcctcaactccacgcggcgtggcggcgccggagcgggggctttgctctggcagatgctcccgctggggaccgactacatggacgatggctacggcgtcgtgcttcccagggcggcggccactgcccggatcatctcggcgcactccagggacctggccattttcaactcgaggtgcgcctggagctgccgctgggggtgcaggaggcgggggcacaagtcggaggatcctgatgttgatgatgacctgccgctcgtcgaggataaacaacgagaagcatagaattaatactactaatgagagataaatggccgtgcattgctacggagcaaaaatatttaaaaatgttgatagaaaaggcatatagataactctatttcatcatacaattgatacaaaagtagcagttaaattgcc

SEQ ID NO: 16855 - protein, 503 aa, Zea mays subsp. mays
  peptide (1)..(503): Ceres Seq. ID no. 12349656
  misc_feature (72)..(304): Pfam Name: Cellulase (glycosyl hydrolase family 5) Pfam Description: Cellulase (glycosyl hydrolase family 5)
  misc_feature (68)..(304): Homolog of NCBI NO: 23477717 NR Description: endo-beta-mannanase [Daucus carota]
  misc_feature (85)..(299): Homolog of NCBI NO: 37544517 NR Description: mannan endo-1,4-beta-mannosidase precursor
  misc_feature (68)..(286): Homolog of NCBI NO: 15235255 NR Description: glycosyl hydrolase family 5/cellulase
  misc_feature (12)..(286): Homolog of NCBI NO: 34909462 NR Description: putative (1-4)-beta-mannan endohydrolase
  misc_feature (66)..(286): Homolog of NCBI NO: 10129675 NR Description: (1-4)-beta-mannan endohydrolase [Coffea arabica]
  misc_feature (68)..(286): Homolog of NCBI NO: 29786430 NR Description: endo-beta-1,4-mannanase [Lactuca sativa]
  misc_feature (68)..(305): Homolog of NCBI NO: 34912090 NR Description: putative mannan endo-1,4-beta-mannosidase
  misc_feature (55)..(286): Homolog of NCBI NO: 15239973 NR Description: glycosyl hydrolase family 5/cellulase
  misc_feature (20)..(286): Homolog of NCBI NO: 10178872 NR Description: (1-4)-beta-mannan endohydrolase [Coffea arabica]
  misc_feature (23)..(304): Homolog of NCBI NO: 15241093 NR Description: glycosyl hydrolase family 5/cellulase
METVFKWRARTGGGVSLIHLLVRCFAVAAAILLLADGRHAHAVDHPAPVEVQTGSCSEVADEQQWRMVKTRGNQFVVGDDHDDRPFYVNGFNTYWLMILAVDPSTRGKVTEVFQQAVAAGLTVCRTWAFNDGGWRALQKSPSVYDEDVFKALDFVVSEARKYRIRLILSLINNWDSYGGKAQYVKWAGDDAAADGGRLNITASVDDDFFSDQTVKVYFKNHVKNMLTRVNTYTSVMYKDDPTIFAWELMNEPRCTSDPAGNKLQEWIQEMAFHVKSIDPDHLLEVGGLAQRASTGPRRRHGFRPTRTPMLARSAPTSSATTASWASTSPPSTSTQTPGCRARLWRHGSGSWTRGWRRTSPTPTARWACRWCSRSSGRPPPRPGAAASTRPRETSSSRRCTRGSSTPRGVAAPERGLCSGRCSRWGPTTWTMATASCFPGRRPLPGSSRRTPGTWPFSTRGAPGAAAGGAGGGGTSRRILMLMMTCRSSRINNEKHRINTTNER

SEQ ID NO: 16856 - protein, 437 aa, Zea mays subsp. mays
  peptide (1)..(437): Ceres Seq. ID no. 12349657
  misc_feature (6)..(238): Pfam Name: Cellulase (glycosyl hydrolase family 5) Pfam Description: Cellulase (glycosyl hydrolase family 5)
  misc_feature (2)..(238): Homolog of NCBI NO: 23477717 NR Description: endo-beta-mannanase [Daucus carota]
  misc_feature (19)..(233): Homolog of NCBI NO: 37544517 NR Description: mannan endo-1,4-beta-mannosidase precursor
  misc_feature (2)..(220): Homolog of NCBI NO: 15235255 NR Description: glycosyl hydrolase family 5/cellulase
  misc_feature (1)..(220): Homolog of NCBI NO: 34909462 NR Description: putative (1-4)-beta-mannan endohydrolase
  misc_feature (1)..(220): Homolog of NCBI NO: 10129675 NR Description: (1-4)-beta-mannan endohydrolase [Coffea arabica]
  misc_feature (2)..(220): Homolog of NCBI NO: 29786430 NR Description: endo-beta-1,4-mannanase [Lactuca sativa]
  misc_feature (2)..(239): Homolog of NCBI NO: 34912090 NR Description: putative mannan endo-1,4-beta-mannosidase
  misc_feature (1)..(220): Homolog of NCBI NO: 15239973 NR Description: glycosyl hydrolase family 5/cellulase
  misc_feature (1)..(220): Homolog of NCBI NO: 10178872 NR Description: (1-4)-beta-mannan endohydrolase [Coffea arabica]
  misc_feature (1)..(238): Homolog of NCBI NO: 15241093 NR Description: glycosyl hydrolase family 5/cellulase
MVKTRGNQFVVGDDHDDRPFYVNGFNTYWLMILAVDPSTRGKVTEVFQQAVAAGLTVCRTWAFNDGGWRALQKSPSVYDEDVFKALDFVVSEARKYRIRLILSLINNWDSYGGKAQYVKWAGDDAAADGGRLNITASVDDDFFSDQTVKVYFKNHVKNMLTRVNTYTSVMYKDDPTIFAWELMNEPRCTSDPAGNKLQEWIQEMAFHVKSIDPDHLLEVGGLAQRASTGPRRRHGFRPTRTPMLARSAPTSSATTASWASTSPPSTSTQTPGCRARLWRHGSGSWTRGWRRTSPTPTARWACRWCSRSSGRPPPRPGAAASTRPRETSSSRRCTRGSSTPRGVAAPERGLCSGRCSRWGPTTWTMATASCFPGRRPLPGSSRRTPGTWPFSTRGAPGAAAGGAGGGGTSRRILMLMMTCRSSRINNEKHRINTTNER

SEQ ID NO: 16857 - protein, 407 aa, Zea mays subsp. mays
  peptide (1)..(407): Ceres Seq. ID no. 12349658
  misc_feature (1)..(208): Pfam Name: Cellulase (glycosyl hydrolase family 5) Pfam Description: Cellulase (glycosyl hydrolase family 5)
  misc_feature (1)..(208): Homolog of NCBI NO: 23477717 NR Description: endo-beta-mannanase [Daucus carota]
  misc_feature (1)..(203): Homolog of NCBI NO: 37544517 NR Description: mannan endo-1,4-beta-mannosidase precursor
  misc_feature (1)..(190): Homolog of NCBI NO: 15235255 NR Description: glycosyl hydrolase family 5/cellulase
  misc_feature (1)..(190): Homolog of NCBI NO: 34909462 NR Description: putative (1-4)-beta-mannan endohydrolase
  misc_feature (1)..(190): Homolog of NCBI NO: 10129675 NR Description: (1-4)-beta-mannan endohydrolase [Coffea arabica]
  misc_feature (1)..(190): Homolog of NCBI NO: 29786430 NR Description: endo-beta-1,4-mannanase [Lactuca sativa]
  misc_feature (1)..(209): Homolog of NCBI NO: 34912090 NR Description: putative mannan endo-1,4-beta-mannosidase
  misc_feature (1)..(190): Homolog of NCBI NO: 15239973 NR Description: glycosyl hydrolase family 5/cellulase
  misc_feature (1)..(190): Homolog of NCBI NO: 10178872 NR Description: (1-4)-beta-mannan endohydrolase [Coffea arabica]
  misc_feature (1)..(208): Homolog of NCBI NO: 15241093 NR Description: glycosyl hydrolase family 5/cellulase
MILAVDPSTRGKVTEVFQQAVAAGLTVCRTWAFNDGGWRALQKSPSVYDEDVFKALDFVVSEARKYRIRLILSLINNWDSYGGKAQYVKWAGDDAAADGGRLNITASVDDDFFSDQTVKVYFKNHVKNMLTRVNTYTSVMYKDDPTIFAWELMNEPRCTSDPAGNKLQEWIQEMAFHVKSIDPDHLLEVGGLAQRASTGPRRRHGFRPTRTPMLARSAPTSSATTASWASTSPPSTSTQTPGCRARLWRHGSGSWTRGWRRTSPTPTARWACRWCSRSSGRPPPRPGAAASTRPRETSSSRRCTRGSSTPRGVAAPERGLCSGRCSRWGPTTWTMATASCFPGRRPLPGSSRRTPGTWPFSTRGAPGAAAGGAGGGGTSRRILMLMMTCRSSRINNEKHRINTTNER

SEQ ID NO: 16858 - DNA, 1026 bp, Zea mays subsp. mays
  misc_feature (1)..(1026): Ceres Seq. ID no. 12367960
  misc_feature: MA Experiment ID: 108527 Result: Up-regulated in Transcription
  misc_feature: MA Experiment 108527 PARAMETER Experiment Name: Zm_5mM_NO_P Parameter: Age (day) Value: 8
  misc_feature: MA Experiment 108527 PARAMETER Experiment Name: Zm_5mM_NO_P Parameter: Organism Value: Zea mays
  misc_feature: MA Experiment 108527 PARAMETER Experiment Name: Zm_5mM_NO_P Parameter: Plant Line Value: 35A19
  misc_feature: MA Experiment 108527 PARAMETER Experiment Name: Zm_5mM_NO_P Parameter: Timepoint (hr) Value: 6
  misc_feature: MA Experiment 108527 PARAMETER Experiment Name: Zm_5mM_NO_P Parameter: Tissue Value: Aerial
  misc_feature: MA Experiment 108527 PARAMETER Experiment Name: Zm_5mM_NO_P Parameter: Treatment Value: 5mM NO vs. No Treatment
  misc_feature: MA Experiment ID: 20000478 Result: Up-regulated in Transcription
  misc_feature: MA Experiment 20000478 PARAMETER Experiment Name: Zm_5mM_SA_P Parameter: Age (day) Value: 11
  misc_feature: MA Experiment 20000478 PARAMETER Experiment Name: Zm_5mM_SA_P Parameter: Organism Value: Zea mays
  misc_feature: MA Experiment 20000478 PARAMETER Experiment Name: Zm_5mM_SA_P Parameter: Plant Line Value: 35A19
  misc_feature: MA Experiment 20000478 PARAMETER Experiment Name: Zm_5mM_SA_P Parameter: Timepoint (hr) Value: 72
  misc_feature: MA Experiment 20000478 PARAMETER Experiment Name: Zm_5mM_SA_P Parameter: Tissue Value: Aerial
  misc_feature: MA Experiment 20000478 PARAMETER Experiment Name: Zm_5mM_SA_P Parameter: Treatment Value: 5mM SA vs. No Treatment
  misc_feature: MA Experiment ID: 20001610 Result: Up-regulated in Transcription
  misc_feature: MA Experiment 20001610 PARAMETER Experiment Name: Zm_50ppm_KNO3_L-to-H_P Parameter: Age (day) Value: 19
  misc_feature: MA Experiment 20001610 PARAMETER Experiment Name: Zm_50ppm_KNO3_L-to-H_P Parameter: Organism Value: Zea mays
  misc_feature: MA Experiment 20001610 PARAMETER Experiment Name: Zm_50ppm_KNO3_L-to-H_P Parameter: Plant Line Value: 35A19
  misc_feature: MA Experiment 20001610 PARAMETER Experiment Name: Zm_50ppm_KNO3_L-to-H_P Parameter: Timepoint (hr) Value: 2
  misc_feature: MA Experiment 20001610 PARAMETER Experiment Name: Zm_50ppm_KNO3_L-to-H_P Parameter: Tissue Value: Roots
  misc_feature: MA Experiment 20001610 PARAMETER Experiment Name: Zm_50ppm_KNO3_L-to-H_P Parameter: Treatment Value: 50ppm KNO3 vs. 50ppm KCl
ttatcttcctcacggcgcttgagacaaccaaagcagcctctctcaagcttgttgagcccttcaagctgtcagagccggtgcaggccgcctttgccaatggccttgccggtctgtcggcatccacatgttcgcaggctatttttgtcccaattgatgtgatcagccagaaattgatggttcaagggtattctggtaatgtcagatacaaaggtggagtagatgttgctcgcaaggtcataaaggctgatggcattaaggggctctacagaggatttggactgtctgttatgacctatgcaccatcgagtgctgtgtggtgggcgagttatggttctagccagcgcataatttggagtgcccttggccatttgcataacaaagaagaggctcctagccaattgaaaatagttggtgttcaagcatcaggggggatttttgctggtgctgtgacctcttttgttacgactcccatagatacaatcaagaccaggctgcaggttatggataatgaaaataagccaaaagctggggaagttgttaaaagattgatcgctgaagatggatggaaaggtttgtacagagggttgggtccaagatttttcagctcatcagcttggggtacctcaatgatagtatgctacgagtacctgaagcgcttgtgtgctaaagttgaagaggtctgacttctgttcttactattctggaagttttgtattagaagaagtgaaataatgctgtatgtctacaacattgacaccaccggaagcttcagttcttgctgacgtaggtgaaagcattcaacatggatgtttgatggtgtacttcatttggtgctagacaatagtctttacaaactttgcttctctgggctatatctcaaaaaatgtaggggcctatatttttttgctcatatgatgaatatgggtttggcggattattttaggtgagtataaacgatatcagatgtacacacttctcattcttttatacatgaaggctattttagcgaggctgtatgactgaagg

SEQ ID NO: 16859 - protein, 226 aa, Zea mays subsp. mays
  peptide (1)..(226): Ceres Seq. ID no. 12367961
  misc_feature (1)..(222): Homolog of NCBI NO: 37534064 NR Description: putative Tricarboxylate transport protein,
  misc_feature (3)..(224): Homolog of NCBI NO: 34894824 NR Description: P0554D10.15 [Oryza sativa (japonica
  misc_feature (129)..(225): Homolog of NCBI NO: 11358653 NR Description: probable mitochondrial carrier protein -
  misc_feature (1)..(117): Homolog of NCBI NO: 11358653 NR Description: probable mitochondrial carrier protein -
  misc_feature (1)..(225): Homolog of NCBI NO: 21553961 NR Description: putative mitochondrial carrier protein
  misc_feature (1)..(225): Homolog of NCBI NO: 18417739 NR Description: mitochondrial carrier protein family
  misc_feature (1)..(225): Homolog of NCBI NO: 12278522 NR Description: putative mitochondrial carrier protein
  misc_feature (1)..(225): Homolog of NCBI NO: 18496651 NR Description: putative mitochondrial carrier protein [Triticum
  misc_feature (1)..(226): Homolog of NCBI NO: 12061241 NR Description: 36I5.1 [Oryza sativa (japonica cultivar-group)]
  misc_feature (1)..(226): Homolog of NCBI NO: 21326111 NR Description: putative mitochondrial carrier protein [Sorghum
IFLTALETTKAASLKLVEPFKLSEPVQAAFANGLAGLSASTCSQAIFVPIDVISQKLMVQGYSGNVRYKGGVDVARKVIKADGIKGLYRGFGLSVMTYAPSSAVWWASYGSSQRIIWSALGHLHNKEEAPSQLKIVGVQASGGIFAGAVTSFVTTPIDTIKTRLQVMDNENKPKAGEVVKRLIAEDGWKGLYRGLGPRFFSSSAWGTSMIVCYEYLKRLCAKVEEV

SEQ ID NO: 16860 - protein, 169 aa, Zea mays subsp. mays
  peptide (1)..(169): Ceres Seq. ID no. 12367962
  misc_feature (1)..(165): Homolog of NCBI NO: 37534064 NR Description: putative Tricarboxylate transport protein,
  misc_feature (1)..(167): Homolog of NCBI NO: 34894824 NR Description: P0554D10.15 [Oryza sativa (japonica
  misc_feature (72)..(168): Homolog of NCBI NO: 11358653 NR Description: probable mitochondrial carrier protein -
  misc_feature (1)..(60): Homolog of NCBI NO: 11358653 NR Description: probable mitochondrial carrier protein -
  misc_feature (1)..(168): Homolog of NCBI NO: 21553961 NR Description: putative mitochondrial carrier protein
  misc_feature (1)..(168): Homolog of NCBI NO: 18417739 NR Description: mitochondrial carrier protein family
  misc_feature (1)..(168): Homolog of NCBI NO: 12278522 NR Description: putative mitochondrial carrier protein
  misc_feature (1)..(168): Homolog of NCBI NO: 18496651 NR Description: putative mitochondrial carrier protein [Triticum
  misc_feature (1)..(169): Homolog of NCBI NO: 12061241 NR Description: 36I5.1 [Oryza sativa (japonica cultivar-group)]
  misc_feature (1)..(169): Homolog of NCBI NO: 21326111 NR Description: putative mitochondrial carrier protein [Sorghum
MVQGYSGNVRYKGGVDVARKVIKADGIKGLYRGFGLSVMTYAPSSAVWWASYGSSQRIIWSALGHLHNKEEAPSQLKIVGVQASGGIFAGAVTSFVTTPIDTIKTRLQVMDNENKPKAGEVVKRLIAEDGWKGLYRGLGPRFFSSSAWGTSMIVCYEYLKRLCAKVEEV

SEQ ID NO: 16861 - protein, 131 aa, Zea mays subsp. mays
  peptide (1)..(131): Ceres Seq. ID no. 12367963
  misc_feature (1)..(127): Homolog of NCBI NO: 37534064 NR Description: putative Tricarboxylate transport protein,
  misc_feature (1)..(129): Homolog of NCBI NO: 34894824 NR Description: P0554D10.15 [Oryza sativa (japonica
  misc_feature (34)..(130): Homolog of NCBI NO: 11358653 NR Description: probable mitochondrial carrier protein -
  misc_feature (1)..(22): Homolog of NCBI NO: 11358653 NR Description: probable mitochondrial carrier protein -
  misc_feature (1)..(130): Homolog of NCBI NO: 21553961 NR Description: putative mitochondrial carrier protein
  misc_feature (1)..(130): Homolog of NCBI NO: 18417739 NR Description: mitochondrial carrier protein family
  misc_feature (1)..(130): Homolog of NCBI NO: 12278522 NR Description: putative mitochondrial carrier protein
  misc_feature (1)..(130): Homolog of NCBI NO: 18496651 NR Description: putative mitochondrial carrier protein [Triticum
  misc_feature (1)..(131): Homolog of NCBI NO: 12061241 NR Description: 36I5.1 [Oryza sativa (japonica cultivar-group)]
  misc_feature (1)..(131): Homolog of NCBI NO: 21326111 NR Description: putative mitochondrial carrier protein [Sorghum
MTYAPSSAVWWASYGSSQRIIWSALGHLHNKEEAPSQLKIVGVQASGGIFAGAVTSFVTTPIDTIKTRLQVMDNENKPKAGEVVKRLIAEDGWKGLYRGLGPRFFSSSAWGTSMIVCYEYLKRLCAKVEEV

SEQ ID NO: 16862 - DNA, 1046 bp, Zea mays subsp. mays
  misc_feature (1)..(1046): Ceres Seq. ID no. 12349639
  misc_feature: MA Experiment ID: 108522 Result: Up-regulated in Transcription
  misc_feature: MA Experiment 108522 PARAMETER Experiment Name: Zm_42deg_Heat_P Parameter: Age (day) Value: 8
  misc_feature: MA Experiment 108522 PARAMETER Experiment Name: Zm_42deg_Heat_P Parameter: Organism Value: Zea mays
  misc_feature: MA Experiment 108522 PARAMETER Experiment Name: Zm_42deg_Heat_P Parameter: Plant Line Value: 35A19
  misc_feature: MA Experiment 108522 PARAMETER Experiment Name: Zm_42deg_Heat_P Parameter: Temperature (deg C) Value: 42 vs. 22
  misc_feature: MA Experiment 108522 PARAMETER Experiment Name: Zm_42deg_Heat_P Parameter: Timepoint (hr) Value: 1
  misc_feature: MA Experiment 108522 PARAMETER Experiment Name: Zm_42deg_Heat_P Parameter: Tissue Value: Aerial
  misc_feature: MA Experiment ID: 108523 Result: Up-regulated in Transcription
  misc_feature: MA Experiment 108523 PARAMETER Experiment Name: Zm_42deg_Heat_P Parameter: Age (day) Value: 8
  misc_feature: MA Experiment 108523 PARAMETER Experiment Name: Zm_42deg_Heat_P Parameter: Organism Value: Zea mays
  misc_feature: MA Experiment 108523 PARAMETER Experiment Name: Zm_42deg_Heat_P Parameter: Plant Line Value: 35A19
  misc_feature: MA Experiment 108523 PARAMETER Experiment Name: Zm_42deg_Heat_P Parameter: Temperature (deg C) Value: 42 vs. 22
  misc_feature: MA Experiment 108523 PARAMETER Experiment Name: Zm_42deg_Heat_P Parameter: Timepoint (hr) Value: 6
  misc_feature: MA Experiment 108523 PARAMETER Experiment Name: Zm_42deg_Heat_P Parameter: Tissue Value: Aerial
  misc_feature: MA Experiment ID: 108527 Result: Up-regulated in Transcription
  misc_feature: MA Experiment 108527 PARAMETER Experiment Name: Zm_5mM_NO_P Parameter: Age (day) Value: 8
  misc_feature: MA Experiment 108527 PARAMETER Experiment Name: Zm_5mM_NO_P Parameter: Organism Value: Zea mays
  misc_feature: MA Experiment 108527 PARAMETER Experiment Name: Zm_5mM_NO_P Parameter: Plant Line Value: 35A19
  misc_feature: MA Experiment 108527 PARAMETER Experiment Name: Zm_5mM_NO_P Parameter: Timepoint (hr) Value: 6
  misc_feature: MA Experiment 108527 PARAMETER Experiment Name: Zm_5mM_NO_P Parameter: Tissue Value: Aerial
  misc_feature: MA Experiment 108527 PARAMETER Experiment Name: Zm_5mM_NO_P Parameter: Treatment Value: 5mM NO vs. No Treatment
  misc_feature: MA Experiment ID: 108556 Result: Up-regulated in Transcription
  misc_feature: MA Experiment 108556 PARAMETER Experiment Name: Zm_Drought_P Parameter: Age (day) Value: 9
  misc_feature: MA Experiment 108556 PARAMETER Experiment Name: Zm_Drought_P Parameter: Organism Value: Zea mays
  misc_feature: MA Experiment 108556 PARAMETER Experiment Name: Zm_Drought_P Parameter: Plant Line Value: 35A19
  misc_feature: MA Experiment 108556 PARAMETER Experiment Name: Zm_Drought_P Parameter: Timepoint (hr) Value: 24
  misc_feature: MA Experiment 108556 PARAMETER Experiment Name: Zm_Drought_P Parameter: Tissue Value: Aerial
  misc_feature: MA Experiment 108556 PARAMETER Experiment Name: Zm_Drought_P Parameter: Treatment Value: Drought vs. No Drought
  misc_feature: MA Experiment ID: 108559 Result: Up-regulated in Transcription
  misc_feature: MA Experiment 108559 PARAMETER Experiment Name: Zm_5mM_NO_P Parameter: Age (day) Value: 8
  misc_feature: MA Experiment 108559 PARAMETER Experiment Name: Zm_5mM_NO_P Parameter: Organism Value: Zea mays
  misc_feature: MA Experiment 108559 PARAMETER Experiment Name: Zm_5mM_NO_P Parameter: Plant Line Value: 35A19
  misc_feature: MA Experiment 108559 PARAMETER Experiment Name: Zm_5mM_NO_P Parameter: Timepoint (hr) Value: 12
  misc_feature: MA Experiment 108559 PARAMETER Experiment Name: Zm_5mM_NO_P Parameter: Tissue Value: Aerial
  misc_feature: MA Experiment 108559 PARAMETER Experiment Name: Zm_5mM_NO_P Parameter: Treatment Value: 5mM NO vs. No Treatment
  misc_feature: MA Experiment ID: 20000478 Result: Up-regulated in Transcription
  misc_feature: MA Experiment 20000478 PARAMETER Experiment Name: Zm_5mM_SA_P Parameter: Age (day) Value: 11
  misc_feature: MA Experiment 20000478 PARAMETER Experiment Name: Zm_5mM_SA_P Parameter: Organism Value: Zea mays
  misc_feature: MA Experiment 20000478 PARAMETER Experiment Name: Zm_5mM_SA_P Parameter: Plant Line Value: 35A19
  misc_feature: MA Experiment 20000478 PARAMETER Experiment Name: Zm_5mM_SA_P Parameter: Timepoint (hr) Value: 72
  misc_feature: MA Experiment 20000478 PARAMETER Experiment Name: Zm_5mM_SA_P Parameter: Tissue Value: Aerial
  misc_feature: MA Experiment 20000478 PARAMETER Experiment Name: Zm_5mM_SA_P Parameter: Treatment Value: 5mM SA vs. No Treatment
  misc_feature: MA Experiment ID: 20000479 Result: Up-regulated in Transcription
  misc_feature: MA Experiment 20000479 PARAMETER Experiment Name: Zm_Drought_P Parameter: Age (day) Value: 10
  misc_feature: MA Experiment 20000479 PARAMETER Experiment Name: Zm_Drought_P Parameter: Organism Value: Zea mays
  misc_feature: MA Experiment 20000479 PARAMETER Experiment Name: Zm_Drought_P Parameter: Plant Line Value: 35A19
  misc_feature: MA Experiment 20000479 PARAMETER Experiment Name: Zm_Drought_P Parameter: Timepoint (hr) Value: 48
  misc_feature: MA Experiment 20000479 PARAMETER Experiment Name: Zm_Drought_P Parameter: Tissue Value: Aerial
  misc_feature: MA Experiment 20000479 PARAMETER Experiment Name: Zm_Drought_P Parameter: Treatment Value: Drought vs. No Drought
  misc_feature: MA Experiment ID: 20000480 Result: Up-regulated in Transcription
  misc_feature: MA Experiment 20000480 PARAMETER Experiment Name: Zm_Drought_P Parameter: Age (day) Value: 11
  misc_feature: MA Experiment 20000480 PARAMETER Experiment Name: Zm_Drought_P Parameter: Organism Value: Zea mays
  misc_feature: MA Experiment 20000480 PARAMETER Experiment Name: Zm_Drought_P Parameter: Plant Line Value: 35A19
  misc_feature: MA Experiment 20000480 PARAMETER Experiment Name: Zm_Drought_P Parameter: Timepoint (hr) Value: 72
  misc_feature: MA Experiment 20000480 PARAMETER Experiment Name: Zm_Drought_P Parameter: Tissue Value: Aerial
  misc_feature: MA Experiment 20000480 PARAMETER Experiment Name: Zm_Drought_P Parameter: Treatment Value: Drought vs. No Drought
  misc_feature: MA Experiment ID: 20000626 Result: Up-regulated in Transcription
  misc_feature: MA Experiment 20000626 PARAMETER Experiment Name: Zm_Herbicide-Treatments_P Parameter: Timepoint (hr) Value: 12
  misc_feature: MA Experiment 20000626 PARAMETER Experiment Name: Zm_Herbicide-Treatments_P Parameter: Tissue Value: Aerial
  misc_feature: MA Experiment 20000626 PARAMETER Experiment Name: Zm_Herbicide-Treatments_P Parameter: Treatment Value: Roundup vs. No Treatment
  misc_feature: MA Experiment ID: 20000630 Result: Up-regulated in Transcription
  misc_feature: MA Experiment 20000630 PARAMETER Experiment Name: Zm_Herbicide-Treatments_P Parameter: Timepoint (hr) Value: 4
  misc_feature: MA Experiment 20000630 PARAMETER Experiment Name: Zm_Herbicide-Treatments_P Parameter: Tissue Value: Aerial
  misc_feature: MA Experiment 20000630 PARAMETER Experiment Name: Zm_Herbicide-Treatments_P Parameter: Treatment Value: Roundup vs. No Treatment
cattcaccgcaacaacacacaacggcagagaccaagaagccgtgaccgtgggagagctccgagcgccagccgcgtgcggcgtgtccatactccatacacggaggaagaggaacagaggaagagcaggaggagatgtacttccgtccgccgcccaagggcccggagtggtacgccagcgatgcggagacggggcaggcggcgcggccgctgtacccaatgatgctggaggacccgcgtctgcggtgggcctttatccggaaggtctacagcatcctctccatccagatgctgctcaccgtcgccgtagctgccgtcgtcgtgttcgttcgccccgtcgctctcttcttcgtctccacgcccggcggcttcgggctctacatcttcctcctcatcctcccgttcatagtgctttgccctctgtactactactaccagcaccacccggtgaacctgctgctgctcggcctcttcaccgtggccatcagcttcgccgtcggcctcacctgcgccttcaccaaaggggaggtgatcctcgagtcggcggtcctcacggcggcggtggtgctgagcctcacggcgtacacgttctgggcggcgaagcgcggccacgacttcagcttcctgggcccgttcctgttcgccgccgtcatgatcctcatgctgttcgcgctcatccagctcttcttcccgctcggccgcatctcgctcatgatatacgggggactggcggcgctcgtcttctgcggctacatcatctacgacaccgacaacctcatcaagcgctactcctacgacgagtacgtctgggccgccgtcgcgctctacctcgacgtcatcaacctcttcctctccctcctcacgctcttccgggcggcggattcgtgagcacggctacctgccagctcgcgtaggcgcggcgacaggatcttggaatgtgccttgccttgccccgcctccggtgctgtctgccgaaattcctctgtaaaaagactaaagagaaataattgttttggttttgtgctttgcttcgcttgcgaagattgttc

SEQ ID NO: 16863 - protein, 302 aa, Zea mays subsp. mays
  peptide (1)..(302): Ceres Seq. ID no. 12349640
FTATTHNGRDQEAVTVGELRAPAACGVSILHTRRKRNRGRAGGDVLPSAAQGPGVVRQRCGDGAGGAAAVPNDAGGPASAVGLYPEGLQHPLHPDAAHRRRSCRRRVRSPRRSLLRLHARRLRALHLPPHPPVHSALPSVLLLPAPPGEPAAARPLHRGHQLRRRPHLRLHQRGGDPRVGGPHGGGGAEPHGVHVLGGEARPRLQLPGPVPVRRRHDPHAVRAHPALLPARPHLAHDIRGTGGARLLRLHHLRHRQPHQALLLRRVRLGRRRALPRRHQPLPLPPHALPGGGFVSTATCQLA

SEQ ID NO: 16864 - protein, 250 aa, Zea mays subsp. mays
  peptide (1)..(250): Ceres Seq. ID no. 12349641
  misc_feature (34)..(249): Pfam Name: Uncharacterised protein family UPF0005 Pfam Description: Uncharacterised protein family UPF0005
  misc_feature (36)..(249): Homolog of NCBI NO: 21311865 NR Description: RIKEN cDNA 0610007H07 [Mus musculus]
  misc_feature (36)..(249): Homolog of NCBI NO: 40018604 NR Description: Unknown (protein for MGC:73002) [Rattus
  misc_feature (16)..(210): Homolog of NCBI NO: 15810201 NR Description: AT4g15470/dl3775w [Arabidopsis thaliana]
  misc_feature (30)..(250): Homolog of NCBI NO: 34393840 NR Description: putative z-protein [Oryza sativa (japonica
  misc_feature (16)..(250): Homolog of NCBI NO: 18414455 NR Description: Expressed protein
  misc_feature (16)..(247): Homolog of NCBI NO: 15235466 NR Description: putative glutamate-/aspartate-binding peptide
  misc_feature (16)..(250): Homolog of NCBI NO: 15229411 NR Description: putative protein; protein id: At3g63310.1
  misc_feature (16)..(249): Homolog of NCBI NO: 15218701 NR Description: putative glutamate/aspartate-binding peptide
  misc_feature (16)..(249): Homolog of NCBI NO: 34393841 NR Description: putative z-protein [Oryza sativa (japonica
  misc_feature (23)..(250): Homolog of NCBI NO: 14626300 NR Description: putative receptor-associated protein
MYFRPPPKGPEWYASDAETGQAARPLYPMMLEDPRLRWAFIRKVYSILSIQMLLTVAVAAVVVFVRPVALFFVSTPGGFGLYIFLLILPFIVLCPLYYYYQHHPVNLLLLGLFTVAISFAVGLTCAFTKGEVILESAVLTAAVVLSLTAYTFWAAKRGHDFSFLGPFLFAAVMILMLFALIQLFFPLGRISLMIYGGLAALVFCGYIIYDTDNLIKRYSYDEYVWAAVALYLDVINLFLSLLTLFRAADS

SEQ ID NO: 16865 - protein, 222 aa, Zea mays subsp. mays
  peptide (1)..(222): Ceres Seq. ID no. 12349642
  misc_feature (6)..(221): Pfam Name: Uncharacterised protein family UPF0005 Pfam Description: Uncharacterised protein family UPF0005
  misc_feature (8)..(221): Homolog of NCBI NO: 21311865 NR Description: RIKEN cDNA 0610007H07 [Mus musculus]
  misc_feature (8)..(221): Homolog of NCBI NO: 40018604 NR Description: Unknown (protein for MGC:73002) [Rattus
  misc_feature (1)..(182): Homolog of NCBI NO: 15810201 NR Description: AT4g15470/dl3775w [Arabidopsis thaliana]
  misc_feature (2)..(222): Homolog of NCBI NO: 34393840 NR Description: putative z-protein [Oryza sativa (japonica
  misc_feature (1)..(222): Homolog of NCBI NO: 18414455 NR Description: Expressed protein
  misc_feature (1)..(219): Homolog of NCBI NO: 15235466 NR Description: putative glutamate-/aspartate-binding peptide
  misc_feature (1)..(222): Homolog of NCBI NO: 15229411 NR Description: putative protein; protein id: At3g63310.1
  misc_feature (1)..(221): Homolog of NCBI NO: 15218701 NR Description: putative glutamate/aspartate-binding peptide
  misc_feature (1)..(221): Homolog of NCBI NO: 34393841 NR Description: putative z-protein [Oryza sativa (japonica
  misc_feature (1)..(222): Homolog of NCBI NO: 14626300 NR Description: putative receptor-associated protein
MMLEDPRLRWAFIRKVYSILSIQMLLTVAVAAVVVFVRPVALFFVSTPGGFGLYIFLLILPFIVLCPLYYYYQHHPVNLLLLGLFTVAISFAVGLTCAFTKGEVILESAVLTAAVVLSLTAYTFWAAKRGHDFSFLGPFLFAAVMILMLFALIQLFFPLGRISLMIYGGLAALVFCGYIIYDTDNLIKRYSYDEYVWAAVALYLDVINLFLSLLTLFRAADS

SEQ ID NO: 16866 - DNA, 2058 bp, Zea mays subsp. mays
  misc_feature (1)..(2058): Ceres Seq. ID no. 12359829
  misc_feature: MA Experiment ID: 108535 Result: Up-regulated in Transcription
  misc_feature: MA Experiment 108535 PARAMETER Experiment Name: Zm_Meristem_P Parameter: Age (day) Value: 8
  misc_feature: MA Experiment 108535 PARAMETER Experiment Name: Zm_Meristem_P Parameter: Organism Value: Zea mays
  misc_feature: MA Experiment 108535 PARAMETER Experiment Name: Zm_Meristem_P Parameter: Plant Line Value: 35A19
  misc_feature: MA Experiment 108535 PARAMETER Experiment Name: Zm_Meristem_P Parameter: Tissue Value: Root Meristem vs. Above Root Meristem
  misc_feature: MA Experiment ID: 108543 Result: Up-regulated in Transcription
  misc_feature: MA Experiment ID: 108544 Result: Down-regulated in Transcription
  misc_feature: MA Experiment ID: 108597 Result: Down-regulated in Transcription
  misc_feature: MA Experiment 108597 PARAMETER Experiment Name: Zm_100uM_ABA_P Parameter: Age (day) Value: 9
  misc_feature: MA Experiment 108597 PARAMETER Experiment Name: Zm_100uM_ABA_P Parameter: Organism Value: Zea mays
  misc_feature: MA Experiment 108597 PARAMETER Experiment Name: Zm_100uM_ABA_P Parameter: Plant Line Value: 35A19
  misc_feature: MA Experiment 108597 PARAMETER Experiment Name: Zm_100uM_ABA_P Parameter: Timepoint (hr) Value: 24
  misc_feature: MA Experiment 108597 PARAMETER Experiment Name: Zm_100uM_ABA_P Parameter: Tissue Value: Aerial
  misc_feature: MA Experiment 108597 PARAMETER Experiment Name: Zm_100uM_ABA_P Parameter: Treatment Value: 100uM ABA vs. No Treatment
  misc_feature: MA Experiment ID: 20000478 Result: Down-regulated in Transcription
  misc_feature: MA Experiment 20000478 PARAMETER Experiment Name: Zm_5mM_SA_P Parameter: Age (day) Value: 11
  misc_feature: MA Experiment 20000478 PARAMETER Experiment Name: Zm_5mM_SA_P Parameter: Organism Value: Zea mays
  misc_feature: MA Experiment 20000478 PARAMETER Experiment Name: Zm_5mM_SA_P Parameter: Plant Line Value: 35A19
  misc_feature: MA Experiment 20000478 PARAMETER Experiment Name: Zm_5mM_SA_P Parameter: Timepoint (hr) Value: 72
  misc_feature: MA Experiment 20000478 PARAMETER Experiment Name: Zm_5mM_SA_P Parameter: Tissue Value: Aerial
  misc_feature: MA Experiment 20000478 PARAMETER Experiment Name: Zm_5mM_SA_P Parameter: Treatment Value: 5mM SA vs. No Treatment
  misc_feature: MA Experiment ID: 20000632 Result: Down-regulated in Transcription
  misc_feature: MA Experiment 20000632 PARAMETER Experiment Name: Zm_Herbicide-Treatments_P Parameter: Timepoint (hr) Value: 4
  misc_feature: MA Experiment 20000632 PARAMETER Experiment Name: Zm_Herbicide-Treatments_P Parameter: Tissue Value: Aerial
  misc_feature: MA Experiment 20000632 PARAMETER Experiment Name: Zm_Herbicide-Treatments_P Parameter: Treatment Value: Glean vs. No Treatment
ttcctcctttcctactcccacactcccccaccctccactagtactagtactagtaccacaaccaccccaccgggaaaaaacccaacaaggggtagggccgccgccgccgccagcgccgccgtgcagatcgcggccggatctacggcgctggggcacgggggtccccggatcgacgacgcctcccccgcgggttcggatggctatgcgaaaagaaaaccctgtgcttaatgcttgtcaagcatccaatggccggatcacgcgagctcaagctgctgcaaatcgccgaagctttggagctttcccttctgttccattgcctgcaaaaaccgaacgaaaacagactgcacaagggaaggcaaaacgaggttcttcatatgacaacaccagtgcaagtgttgcactttcaggcccccagcctaaaaggcgcacagtactcagggatgtgaccaatttgagcaatgctaactctaacaaaagttttgctgctgcaccgaagcttcagacaaagccctctctaaggactggaagaaccgtgagcaaaagcaagccgtgcgcaaaaaagattcctaaaaaaccaccaccagctggtaatggaagtgcattgactaatgttttgaacattgctgaagaaacacaagcggagaagattttggcagagagagtggaacccgttctgttgcttgagaacagggggccactgtcattgcagaatgttgaaaggaacagggacagtgcttgtcatgaggtattctttgaggaaagaaacctcagggataaatgtgaaccttctgtgtcaaagaatggggactcttatgtgttagacattgtagatatcgacaaagataatggcaatcctcaaatgtgtgcttcctacgttgtggagatatactcaaacctaatggcttcagagcttatgagaagaccaagtccaaattacatggagggtttgcaacgggacatcacaaagggcatgagagaaatactcattgattggcttgtggaggtttctgaagaatacaagcttgttccagacacgctgtacctaactgtataccttattgaccggtttctttctcggaactacattgaaagacagagactacaacttgtgggaataacaagcatgcttgttgcctcgaaatatgaagagatatgtgctcctcgagtagaagagttctgtttcataaccgacaatacatacacaaaagcagaggtgctgaaaatggagagccagctgcttaatgacctgggatttaacctttctgttccaacaacaaaaacatttctcaggagattccttagagcggcacaagcatctcgtaaaactccttctatgactttaggatttctggccaattatctcgcggagttgactttgaccgaatatgagttcttgaaatttcttccgtcgttggtggcagcatcggccgtgtttcttgctagatggacgcttgaccaatccgatctcccatggaaccagactctagagcactacacgtcttacaaatgctctgacattcaattgtgtgtctgtgctctacgggaactccagcataacaccagtaactgccctcttaacgccatccgcgagaagtacaggcatcaaaagtttgaatgcgtagcgaacctaacttcaccggagttccctcggtcgttcttcagctgacacgccaatggcaccgattgatgagcaacgttagcagcagccgtagcgcaggttgcgttaacattattgtagcatccccttttaccccccaatgtctgatttggatgtgtttgttatcgagctgctgtgtcccggcctggcctttttcgagtcgcaagtgagatgaagaaggacagagagatggctccttggcttttcttttgtttgtttgacgtaaaaggttcacccggttgtaaacaacactgtgtgtagggctctttgcttgggctgttgttaattaactgtaaggggagatggtccggctggcttgtatgacgacaaacgacgggatgatgtttttgttgacacaattcgttcattggtagcttcggaatggaaattagtttattgcc

SEQ ID NO: 16867 - protein, 554 aa, Zea mays subsp. mays
  peptide (1)..(554): Ceres Seq. ID no. 12359830
  misc_feature (294)..(421): Pfam Name: Cyclin, N-terminal domain Pfam Description: Cyclin, N-terminal domain
  misc_feature (82)..(553): Homolog of NCBI NO: 7438492 NR Description: cyclin, A-type - common tobacco
  misc_feature (84)..(553): Homolog of NCBI NO: 5420276 NR Description: cyclin A2 [Lycopersicon esculentum]
SSFPTPTLPHPPLVLVLVPQPPHREKTQQGVGPPPPPAPPCRSRPDLRRWGTGVPGSTTPPPRVRMAMRKENPVLNACQASNGRITRAQAAANRRSFGAFPSVPLPAKTERKQTAQGKAKRGSSYDNTSASVALSGPQPKRRTVLRDVTNLSNANSNKSFAAAPKLQTKPSLRTGRTVSKSKPCAKKIPKKPPPAGNGSALTNVLNIAEETQAEKILAERVEPVLLLENRGPLSLQNVERNRDSACHEVFFEERNLRDKCEPSVSKNGDSYVLDIVDIDKDNGNPQMCASYVVEIYSNLMASELMRRPSPNYMEGLQRDITKGMREILIDWLVEVSEEYKLVPDTLYLTVYLIDRFLSRNYIERQRLQLVGITSMLVASKYEEICAPRVEEFCFITDNTYTKAEVLKMESQLLNDLGFNLSVPTTKTFLRRFLRAAQASRKTPSMTLGFLANYLAELTLTEYEFLKFLPSLVAASAVFLARWTLDQSDLPWNQTLEHYTSYKCSDIQLCVCALRELQHNTSNCPLNAIREKYRHQKFECVANLTSPEFPRSFFS

SEQ ID NO: 16868 - protein, 489 aa, Zea mays subsp. mays
  peptide (1)..(489): Ceres Seq. ID no. 12359831
  misc_feature (229)..(356): Pfam Name: Cyclin, N-terminal domain Pfam Description: Cyclin, N-terminal domain
  misc_feature (17)..(488): Homolog of NCBI NO: 7438492 NR Description: cyclin, A-type - common tobacco
  misc_feature (19)..(488): Homolog of NCBI NO: 5420276 NR Description: cyclin A2 [Lycopersicon esculentum]
MAMRKENPVLNACQASNGRITRAQAAANRRSFGAFPSVPLPAKTERKQTAQGKAKRGSSYDNTSASVALSGPQPKRRTVLRDVTNLSNANSNKSFAAAPKLQTKPSLRTGRTVSKSKPCAKKIPKKPPPAGNGSALTNVLNIAEETQAEKILAERVEPVLLLENRGPLSLQNVERNRDSACHEVFFEERNLRDKCEPSVSKNGDSYVLDIVDIDKDNGNPQMCASYVVEIYSNLMASELMRRPSPNYMEGLQRDITKGMREILIDWLVEVSEEYKLVPDTLYLTVYLIDRFLSRNYIERQRLQLVGITSMLVASKYEEICAPRVEEFCFITDNTYTKAEVLKMESQLLNDLGFNLSVPTTKTFLRRFLRAAQASRKTPSMTLGFLANYLAELTLTEYEFLKFLPSLVAASAVFLARWTLDQSDLPWNQTLEHYTSYKCSDIQLCVCALRELQHNTSNCPLNAIREKYRHQKFECVANLTSPEFPRSFFS

SEQ ID NO: 16869 - protein, 487 aa, Zea mays subsp. mays
  peptide (1)..(487): Ceres Seq. ID no. 12359832
  misc_feature (227)..(354): Pfam Name: Cyclin, N-terminal domain Pfam Description: Cyclin, N-terminal domain
  misc_feature (15)..(486): Homolog of NCBI NO: 7438492 NR Description: cyclin, A-type - common tobacco
  misc_feature (17)..(486): Homolog of NCBI NO: 5420276 NR Description: cyclin A2 [Lycopersicon esculentum]
MRKENPVLNACQASNGRITRAQAAANRRSFGAFPSVPLPAKTERKQTAQGKAKRGSSYDNTSASVALSGPQPKRRTVLRDVTNLSNANSNKSFAAAPKLQTKPSLRTGRTVSKSKPCAKKIPKKPPPAGNGSALTNVLNIAEETQAEKILAERVEPVLLLENRGPLSLQNVERNRDSACHEVFFEERNLRDKCEPSVSKNGDSYVLDIVDIDKDNGNPQMCASYVVEIYSNLMASELMRRPSPNYMEGLQRDITKGMREILIDWLVEVSEEYKLVPDTLYLTVYLIDRFLSRNYIERQRLQLVGITSMLVASKYEEICAPRVEEFCFITDNTYTKAEVLKMESQLLNDLGFNLSVPTTKTFLRRFLRAAQASRKTPSMTLGFLANYLAELTLTEYEFLKFLPSLVAASAVFLARWTLDQSDLPWNQTLEHYTSYKCSDIQLCVCALRELQHNTSNCPLNAIREKYRHQKFECVANLTSPEFPRSFFS

SEQ ID NO: 16870 - DNA, 1133 bp, Zea mays subsp. mays
  misc_feature (1)..(1133): Ceres Seq. ID no. 12415469
  misc_feature: MA Experiment ID: 108529 Result: Up-regulated in Transcription
  misc_feature: MA Experiment 108529 PARAMETER Experiment Name: Zm_Imbibed_Seeds_P Parameter: Age (day) Value: 5 vs. 2
  misc_feature: MA Experiment 108529 PARAMETER Experiment Name: Zm_Imbibed_Seeds_P Parameter: Organism Value: Zea mays
  misc_feature: MA Experiment 108529 PARAMETER Experiment Name: Zm_Imbibed_Seeds_P Parameter: Plant Line Value: 35A19
  misc_feature: MA Experiment 108529 PARAMETER Experiment Name: Zm_Imbibed_Seeds_P Parameter: Tissue Value: Roots vs. Embryo
  misc_feature: MA Experiment ID: 108535 Result: Down-regulated in Transcription
  misc_feature: MA Experiment 108535 PARAMETER Experiment Name: Zm_Meristem_P Parameter: Age (day) Value: 8
  misc_feature: MA Experiment 108535 PARAMETER Experiment Name: Zm_Meristem_P Parameter: Organism Value: Zea mays
  misc_feature: MA Experiment 108535 PARAMETER Experiment Name: Zm_Meristem_P Parameter: Plant Line Value: 35A19
  misc_feature: MA Experiment 108535 PARAMETER Experiment Name: Zm_Meristem_P Parameter: Tissue Value: Root Meristem vs. Above Root Meristem
  misc_feature: MA Experiment ID: 108544 Result: Down-regulated in Transcription
  misc_feature: MA Experiment ID: 108688 Result: Down-regulated in Transcription
  misc_feature: MA Experiment 108688 PARAMETER Experiment Name: Zm_Embryos-Flowers__P Parameter: Tissue Value: Immature Flowers vs. Aerial+
  misc_feature: MA Experiment ID: 20000492 Result: Up-regulated in Transcription
  misc_feature: MA Experiment 20000492 PARAMETER Experiment Name: Zm_Hybrid_Seed_Dev_P Parameter: DAP Value: 12
  misc_feature: MA Experiment 20000492 PARAMETER Experiment Name: Zm_Hybrid_Seed_Dev_P Parameter: Organism Value: Zea mays
  misc_feature: MA Experiment 20000492 PARAMETER Experiment Name: Zm_Hybrid_Seed_Dev_P Parameter: Plant Line Value: 35A19
  misc_feature: MA Experiment 20000492 PARAMETER Experiment Name: Zm_Hybrid_Seed_Dev_P Parameter: Tissue Value: Fert Kernel vs. Unfert Floret
atctcgcgggctttcccgcagcaagatcaacgtcgtcgttcaagccagcggtagtagagactacgaccgaggctagctaagctaagagatggcggatcaccagtactcggcgtggacgacttccgctgctcgtcatcgggtcttctcctgtgcgctcatggctcttgttagttttgtggctgcaggacgacccatggtgctcgccgacgccatcgtctttcacgtggcgaacaggtgcccgttcccggtgtggccggcgtccgcccctaacaccggccacccagtgctcgccggcggcggcttctacgtcccgcagggcaagtcgaggcgcgtcgtcgcgccggccaactggaacgggcgcttctgggcccgcaccggttgcaacttcaccgcgaacggcatgggcgtagcgggctgcctcaccggcgactgcgagggccggctcgcctgtaacgggtccgtgggcgccccgcccgccacgctagtcgaggtgagcctgcacgaggacgccccgaaagggagctcctacgacgtgagcctggtggacgggtacaacctccccgtcgccgtctccgccaagcccgccacgggcggcgcggacccgaacaagtgcgccattgccggctgcgccaagaacgtgaacgcggtgtgcccgccggagctgcaggtgaccgctaccggcagcggcggcggcaagacggtggtggcgtgcaagagcgcgtgcctagcgttcgggctcgacgccttctgctgccgcggcgcgtacgcgacgccggccacgtgccgagggaccgtgtactcgcgcctcttcaaggacgcctgcccggcatactacagctatgcctacgacatcgccgccacgacggccagcgggtgctacgcgcaggagtacatcatcacgttctgcccgtccagatggggcgacgagcccggggatcgtgctgctcagatttgaatttggtgtcgtcatcgtcagtcaggcaattaccaatcaccattgcgtcgagcttttcgcacgtctttatgtatgtgtgtacgcttgtgtctgcttctagtgggctttcacataaatttctacatacatatacacatacaacaataaaaaataaggtagtgctatttatcggccgcgt

SEQ ID NO: 16871 - protein, 288 aa, Zea mays subsp. mays
  peptide (1)..(288): Ceres Seq. ID no. 12415470
  misc_feature (48)..(274): Pfam Name: Thaumatin family Pfam Description: Thaumatin family
  misc_feature (39)..(274): Homolog of NCBI NO: 7442175 NR Description: thaumatin-like protein - turnip
  misc_feature (29)..(276): Homolog of NCBI NO: 2435406 NR Description: thaumatin-like protein [Arabidopsis thaliana]
  misc_feature (17)..(276): Homolog of NCBI NO: 15222088 NR Description: thaumatin-like protein (PR-5)
  misc_feature (39)..(274): Homolog of NCBI NO: 15221033 NR Description: pathogenesis-related group 5 protein, putative
  misc_feature (39)..(274): Homolog of NCBI NO: 2129751 NR Description: thaumatin-like protein - Arabidopsis thaliana
  misc_feature (44)..(277): Homolog of NCBI NO: 15238593 NR Description: thaumatin-like protein; protein id: At5g24620.1
  misc_feature (18)..(276): Homolog of NCBI NO: 15222090 NR Description: thaumatin-like protein; protein id: At1g75050.1
  misc_feature (17)..(273): Homolog of NCBI NO: 34905146 NR Description: putative pathogenesis-related protein
  misc_feature (23)..(278): Homolog of NCBI NO: 15242552 NR Description: thaumatin-like protein; protein id: At5g40020.1
  misc_feature (23)..(287): Homolog of NCBI NO: 37534308 NR Description: hypothetical protein [Oryza sativa (japonica
MADHQYSAWTTSAARHRVFSCALMALVSFVAAGRPMVLADAIVFHVANRCPFPVWPASAPNTGHPVLAGGGFYVPQGKSRRVVAPANWNGRFWARTGCNFTANGMGVAGCLTGDCEGRLACNGSVGAPPATLVEVSLHEDAPKGSSYDVSLVDGYNLPVAVSAKPATGGADPNKCAIAGCAKNVNAVCPPELQVTATGSGGGKTVVACKSACLAFGLDAFCCRGAYATPATCRGTVYSRLFKDACPAYYSYAYDIAATTASGCYAQEYIITFCPSRWGDEPGDRAAQI

SEQ ID NO: 16872 - protein, 265 aa, Zea mays subsp. mays
  peptide (1)..(265): Ceres Seq. ID no. 12415471
  misc_feature (25)..(251): Pfam Name: Thaumatin family Pfam Description: Thaumatin family
  misc_feature (16)..(251): Homolog of NCBI NO: 7442175 NR Description: thaumatin-like protein - turnip
  misc_feature (6)..(253): Homolog of NCBI NO: 2435406 NR Description: thaumatin-like protein [Arabidopsis thaliana]
  misc_feature (1)..(253): Homolog of NCBI NO: 15222088 NR Description: thaumatin-like protein (PR-5)
  misc_feature (16)..(251): Homolog of NCBI NO: 15221033 NR Description: pathogenesis-related group 5 protein, putative
  misc_feature (16)..(251): Homolog of NCBI NO: 2129751 NR Description: thaumatin-like protein - Arabidopsis thaliana
  misc_feature (21)..(254): Homolog of NCBI NO: 15238593 NR Description: thaumatin-like protein; protein id: At5g24620.1
  misc_feature (1)..(253): Homolog of NCBI NO: 15222090 NR Description: thaumatin-like protein; protein id: At1g75050.1
  misc_feature (1)..(250): Homolog of NCBI NO: 34905146 NR Description: putative pathogenesis-related protein
  misc_feature (1)..(255): Homolog of NCBI NO: 15242552 NR Description: thaumatin-like protein; protein id: At5g40020.1
  misc_feature (1)..(264): Homolog of NCBI NO: 37534308 NR Description: hypothetical protein [Oryza sativa (japonica
MALVSFVAAGRPMVLADAIVFHVANRCPFPVWPASAPNTGHPVLAGGGFYVPQGKSRRVVAPANWNGRFWARTGCNFTANGMGVAGCLTGDCEGRLACNGSVGAPPATLVEVSLHEDAPKGSSYDVSLVDGYNLPVAVSAKPATGGADPNKCAIAGCAKNVNAVCPPELQVTATGSGGGKTVVACKSACLAFGLDAFCCRGAYATPATCRGTVYSRLFKDACPAYYSYAYDIAATTASGCYAQEYIITFCPSRWGDEPGDRAAQI

SEQ ID NO: 16873 - protein, 253 aa, Zea mays subsp. mays
  peptide (1)..(253): Ceres Seq. ID no. 12415472
  misc_feature (13)..(239): Pfam Name: Thaumatin family Pfam Description: Thaumatin family
  misc_feature (4)..(239): Homolog of NCBI NO: 7442175 NR Description: thaumatin-like protein - turnip
  misc_feature (1)..(241): Homolog of NCBI NO: 2435406 NR Description: thaumatin-like protein [Arabidopsis thaliana]
  misc_feature (1)..(241): Homolog of NCBI NO: 15222088 NR Description: thaumatin-like protein (PR-5)
  misc_feature (4)..(239): Homolog of NCBI NO: 15221033 NR Description: pathogenesis-related group 5 protein, putative
  misc_feature (4)..(239): Homolog of NCBI NO: 2129751 NR Description: thaumatin-like protein - Arabidopsis thaliana
  misc_feature (9)..(242): Homolog of NCBI NO: 15238593 NR Description: thaumatin-like protein; protein id: At5g24620.1
  misc_feature (1)..(241): Homolog of NCBI NO: 15222090 NR Description: thaumatin-like protein; protein id: At1g75050.1
  misc_feature (1)..(238): Homolog of NCBI NO: 34905146 NR Description: putative pathogenesis-related protein
  misc_feature (1)..(243): Homolog of NCBI NO: 15242552 NR Description: thaumatin-like protein; protein id: At5g40020.1
  misc_feature (1)..(252): Homolog of NCBI NO: 37534308 NR Description: hypothetical protein [Oryza sativa (japonica
MVLADAIVFHVANRCPFPVWPASAPNTGHPVLAGGGFYVPQGKSRRVVAPANWNGRFWARTGCNFTANGMGVAGCLTGDCEGRLACNGSVGAPPATLVEVSLHEDAPKGSSYDVSLVDGYNLPVAVSAKPATGGADPNKCAIAGCAKNVNAVCPPELQVTATGSGGGKTVVACKSACLAFGLDAFCCRGAYATPATCRGTVYSRLFKDACPAYYSYAYDIAATTASGCYAQEYIITFCPSRWGDEPGDRAAQI

SEQ ID NO: 16874 - DNA, 1005 bp, Zea mays subsp. mays
  misc_feature (1)..(1005): Ceres Seq. ID no. 12357150
  misc_feature: MA Experiment ID: 20000478 Result: Down-regulated in Transcription
  misc_feature: MA Experiment 20000478 PARAMETER Experiment Name: Zm_5mM_SA_P Parameter: Age (day) Value: 11
  misc_feature: MA Experiment 20000478 PARAMETER Experiment Name: Zm_5mM_SA_P Parameter: Organism Value: Zea mays
  misc_feature: MA Experiment 20000478 PARAMETER Experiment Name: Zm_5mM_SA_P Parameter: Plant Line Value: 35A19
  misc_feature: MA Experiment 20000478 PARAMETER Experiment Name: Zm_5mM_SA_P Parameter: Timepoint (hr) Value: 72
  misc_feature: MA Experiment 20000478 PARAMETER Experiment Name: Zm_5mM_SA_P Parameter: Tissue Value: Aerial
  misc_feature: MA Experiment 20000478 PARAMETER Experiment Name: Zm_5mM_SA_P Parameter: Treatment Value: 5mM SA vs. No Treatment
  misc_feature: MA Experiment ID: 20000480 Result: Down-regulated in Transcription
  misc_feature: MA Experiment 20000480 PARAMETER Experiment Name: Zm_Drought_P Parameter: Age (day) Value: 11
  misc_feature: MA Experiment 20000480 PARAMETER Experiment Name: Zm_Drought_P Parameter: Organism Value: Zea mays
  misc_feature: MA Experiment 20000480 PARAMETER Experiment Name: Zm_Drought_P Parameter: Plant Line Value: 35A19
  misc_feature: MA Experiment 20000480 PARAMETER Experiment Name: Zm_Drought_P Parameter: Timepoint (hr) Value: 72
  misc_feature: MA Experiment 20000480 PARAMETER Experiment Name: Zm_Drought_P Parameter: Tissue Value: Aerial
  misc_feature: MA Experiment 20000480 PARAMETER Experiment Name: Zm_Drought_P Parameter: Treatment Value: Drought vs. No Drought
  misc_feature: MA Experiment ID: 20000492 Result: Up-regulated in Transcription
  misc_feature: MA Experiment 20000492 PARAMETER Experiment Name: Zm_Hybrid_Seed_Dev_P Parameter: DAP Value: 12
  misc_feature: MA Experiment 20000492 PARAMETER Experiment Name: Zm_Hybrid_Seed_Dev_P Parameter: Organism Value: Zea mays
  misc_feature: MA Experiment 20000492 PARAMETER Experiment Name: Zm_Hybrid_Seed_Dev_P Parameter: Plant Line Value: 35A19
  misc_feature: MA Experiment 20000492 PARAMETER Experiment Name: Zm_Hybrid_Seed_Dev_P Parameter: Tissue Value: Fert Kernel vs. Unfert Floret
  misc_feature: MA Experiment ID: 20000535 Result: Down-regulated in Transcription
  misc_feature: MA Experiment 20000535 PARAMETER Experiment Name: Zm_Hybrid_Seed_Dev_P Parameter: DAP Value: 30 vs. 12
  misc_feature: MA Experiment 20000535 PARAMETER Experiment Name: Zm_Hybrid_Seed_Dev_P Parameter: Organism Value: Zea mays
  misc_feature: MA Experiment 20000535 PARAMETER Experiment Name: Zm_Hybrid_Seed_Dev_P Parameter: Plant Line Value: 35A19
  misc_feature: MA Experiment 20000535 PARAMETER Experiment Name: Zm_Hybrid_Seed_Dev_P Parameter: Tissue Value: Embryo vs. Unfert Floret
  misc_feature: MA Experiment ID: 20000626 Result: Down-regulated in Transcription
  misc_feature: MA Experiment 20000626 PARAMETER Experiment Name: Zm_Herbicide-Treatments_P Parameter: Timepoint (hr) Value: 12
  misc_feature: MA Experiment 20000626 PARAMETER Experiment Name: Zm_Herbicide-Treatments_P Parameter: Tissue Value: Aerial
  misc_feature: MA Experiment 20000626 PARAMETER Experiment Name: Zm_Herbicide-Treatments_P Parameter: Treatment Value: Roundup vs. No Treatment
agcatccatcaactgctaccgagttaagtatattctgagctcgtctgcagccaaaagcttccatttgcattgcgatgggggctctgcctcgtggcctgctagctggcatctgcgccgtcttgttagcagcagtggttgcccttgcccatggtgcggaacaggaaacagcgtcaatggtggtcggcttggccaagtgcgccgactgcaccaggaagaacatgaaagctgatgcggcattcaacggccttcaagtggctgtcaagtgcaagaacgccaacggcgtcttcgagaccaaggccctcggtgaggttgacaagtccggcagcttcagcgttcccctcccggctgacctcctccgcgaggatggcgagctgaagcaagactgcttctcgcagctccacagcgcggccaacaagccatgccccggacaggagccgtcttggatcgtccggccaaccaccgacaacgacgacgacgacaagatgaagaataccttcgtcgcagtcgccggcaaggtgcactacccatcaaaggagtgcgcctctgctttcctcttctaccatttgttcaagaagcacctgttgcacaagaagcccatggtgatcatccctcacatccacaagaagcccatggtgccgatgtaccgccactcgcccgtgccggagtacaagccacctcacccgacgcccaccccgatctaccatgctgcagctgagcacaagacacagaaccccgagacggaccctgaaaagttcaagaagctgctccccttcataaaaaagaaccccttctttcccaagttccccaagtttcctcccgtcaaggaggagaacaaggcgtaaaaatatgagggcgagataccaagtgtacccctttcctctgcatccactcttacgtagtgtctgttgcatcttgcatggaccgtcattacctcctgtttcttgacagtgtttgtaacctctcaccggccagggctcccactaatagaaataaaacttttgttct

SEQ ID NO: 16875 - protein, 255 aa, Zea mays subsp. mays
  peptide (1)..(255): Ceres Seq. ID no. 12357151
  misc_feature (1)..(210): Homolog of NCBI NO: 37531090 NR Description: putative proline-rich protein
  misc_feature (6)..(207): Homolog of NCBI NO: 37531076 NR Description: putative proline-rich protein
  misc_feature (1)..(210): Homolog of NCBI NO: 18676394 NR Description: proline-rich protein [Oryza sativa]
  misc_feature (1)..(220): Homolog of NCBI NO: 37531094 NR Description: putative proline-rich protein
  misc_feature (1)..(210): Homolog of NCBI NO: 37531088 NR Description: putative proline-rich protein
  misc_feature (14)..(207): Homolog of NCBI NO: 37531070 NR Description: putative proline-rich protein
  misc_feature (1)..(220): Homolog of NCBI NO: 37531092 NR Description: putative proline-rich protein
  misc_feature (1)..(207): Homolog of NCBI NO: 37531074 NR Description: putative proline-rich protein
  misc_feature (1)..(254): Homolog of NCBI NO: 6689616 NR Description: proline-rich protein [Zea mays]
  misc_feature (1)..(254): Homolog of NCBI NO: 37531058 NR Description: putative proline-rich protein
MGALPRGLLAGICAVLLAAVVALAHGAEQETASMVVGLAKCADCTRKNMKADAAFNGLQVAVKCKNANGVFETKALGEVDKSGSFSVPLPADLLREDGELKQDCFSQLHSAANKPCPGQEPSWIVRPTTDNDDDDKMKNTFVAVAGKVHYPSKECASAFLFYHLFKKHLLHKKPMVIIPHIHKKPMVPMYRHSPVPEYKPPHPTPTPIYHAAAEHKTQNPETDPEKFKKLLPFIKKNPFFPKFPKFPPVKEENKA

SEQ ID NO: 16876 - protein, 222 aa, Zea mays subsp. mays
  peptide (1)..(222): Ceres Seq. ID no. 12357152
  misc_feature (1)..(177): Homolog of NCBI NO: 37531090 NR Description: putative proline-rich protein
  misc_feature (1)..(174): Homolog of NCBI NO: 37531076 NR Description: putative proline-rich protein
  misc_feature (1)..(177): Homolog of NCBI NO: 18676394 NR Description: proline-rich protein [Oryza sativa]
  misc_feature (1)..(187): Homolog of NCBI NO: 37531094 NR Description: putative proline-rich protein
  misc_feature (1)..(177): Homolog of NCBI NO: 37531088 NR Description: putative proline-rich protein
  misc_feature (1)..(174): Homolog of NCBI NO: 37531070 NR Description: putative proline-rich protein
  misc_feature (1)..(187): Homolog of NCBI NO: 37531092 NR Description: putative proline-rich protein
  misc_feature (1)..(174): Homolog of NCBI NO: 37531074 NR Description: putative proline-rich protein
  misc_feature (1)..(221): Homolog of NCBI NO: 6689616 NR Description: proline-rich protein [Zea mays]
  misc_feature (1)..(221): Homolog of NCBI NO: 37531058 NR Description: putative proline-rich protein
MVVGLAKCADCTRKNMKADAAFNGLQVAVKCKNANGVFETKALGEVDKSGSFSVPLPADLLREDGELKQDCFSQLHSAANKPCPGQEPSWIVRPTTDNDDDDKMKNTFVAVAGKVHYPSKECASAFLFYHLFKKHLLHKKPMVIIPHIHKKPMVPMYRHSPVPEYKPPHPTPTPIYHAAAEHKTQNPETDPEKFKKLLPFIKKNPFFPKFPKFPPVKEENKA

SEQ ID NO: 16877 - protein, 207 aa, Zea mays subsp. mays
  peptide (1)..(207): Ceres Seq. ID no. 12357153
  misc_feature (1)..(162): Homolog of NCBI NO: 37531090 NR Description: putative proline-rich protein
  misc_feature (1)..(159): Homolog of NCBI NO: 37531076 NR Description: putative proline-rich protein
  misc_feature (1)..(162): Homolog of NCBI NO: 18676394 NR Description: proline-rich protein [Oryza sativa]
  misc_feature (1)..(172): Homolog of NCBI NO: 37531094 NR Description: putative proline-rich protein
  misc_feature (1)..(162): Homolog of NCBI NO: 37531088 NR Description: putative proline-rich protein
  misc_feature (1)..(159): Homolog of NCBI NO: 37531070 NR Description: putative proline-rich protein
  misc_feature (1)..(172): Homolog of NCBI NO: 37531092 NR Description: putative proline-rich protein
  misc_feature (1)..(159): Homolog of NCBI NO: 37531074 NR Description: putative proline-rich protein
  misc_feature (1)..(206): Homolog of NCBI NO: 6689616 NR Description: proline-rich protein [Zea mays]
  misc_feature (1)..(206): Homolog of NCBI NO: 37531058 NR Description: putative proline-rich protein
MKADAAFNGLQVAVKCKNANGVFETKALGEVDKSGSFSVPLPADLLREDGELKQDCFSQLHSAANKPCPGQEPSWIVRPTTDNDDDDKMKNTFVAVAGKVHYPSKECASAFLFYHLFKKHLLHKKPMVIIPHIHKKPMVPMYRHSPVPEYKPPHPTPTPIYHAAAEHKTQNPETDPEKFKKLLPFIKKNPFFPKFPKFPPVKEENKA

SEQ ID NO: 16878 - DNA, 1092 bp, Zea mays subsp. mays
  misc_feature (1)..(1092): Ceres Seq. ID no. 12355020
  misc_feature: MA Experiment ID: 108528 Result: Up-regulated in Transcription
  misc_feature: MA Experiment 108528 PARAMETER Experiment Name: Zm_Imbibed_Seeds_P Parameter: Age (day) Value: 5 vs. 2
  misc_feature: MA Experiment 108528 PARAMETER Experiment Name: Zm_Imbibed_Seeds_P Parameter: Organism Value: Zea mays
  misc_feature: MA Experiment 108528 PARAMETER Experiment Name: Zm_Imbibed_Seeds_P Parameter: Plant Line Value: 35A19
  misc_feature: MA Experiment 108528 PARAMETER Experiment Name: Zm_Imbibed_Seeds_P Parameter: Tissue Value: Aerial vs. Embryo
  misc_feature: MA Experiment ID: 108530 Result: Up-regulated in Transcription
  misc_feature: MA Experiment 108530 PARAMETER Experiment Name: Zm_Imbibed_Seeds_P Parameter: Age (day) Value: 6 vs. 2
  misc_feature: MA Experiment 108530 PARAMETER Experiment Name: Zm_Imbibed_Seeds_P Parameter: Organism Value: Zea mays
  misc_feature: MA Experiment 108530 PARAMETER Experiment Name: Zm_Imbibed_Seeds_P Parameter: Plant Line Value: 35A19
  misc_feature: MA Experiment 108530 PARAMETER Experiment Name: Zm_Imbibed_Seeds_P Parameter: Tissue Value: Aerial vs. Embryo
  misc_feature: MA Experiment ID: 108543 Result: Down-regulated in Transcription
  misc_feature: MA Experiment ID: 108544 Result: Down-regulated in Transcription
  misc_feature: MA Experiment ID: 20000480 Result: Down-regulated in Transcription
  misc_feature: MA Experiment 20000480 PARAMETER Experiment Name: Zm_Drought_P Parameter: Age (day) Value: 11
  misc_feature: MA Experiment 20000480 PARAMETER Experiment Name: Zm_Drought_P Parameter: Organism Value: Zea mays
  misc_feature: MA Experiment 20000480 PARAMETER Experiment Name: Zm_Drought_P Parameter: Plant Line Value: 35A19
  misc_feature: MA Experiment 20000480 PARAMETER Experiment Name: Zm_Drought_P Parameter: Timepoint (hr) Value: 72
  misc_feature: MA Experiment 20000480 PARAMETER Experiment Name: Zm_Drought_P Parameter: Tissue Value: Aerial
  misc_feature: MA Experiment 20000480 PARAMETER Experiment Name: Zm_Drought_P Parameter: Treatment Value: Drought vs. No Drought
acggccagggaccaagctactcgtaaacaccatcagagtgtacacaagaacacgtacgcggcgcacggcgtcgttagtcaccaagcgggccatcggcaatggcgagcacgcaagctccagcggcggccgacaacgtggaccccgtctacgagtggctcgacgatggcgccagctaccttctccgcctcgacctcccagggttcaagaaggaggactttcgggtgcacgtggacggcgagggccggctcaccgtcatcggcaatcgcaaacccacgcccggcggcggcggcaaggcgctgcggctccacaagacgttccagctgcccaatacggccaaccttgataccatcacgggccgcttcgacggcaacgtgctcacgctcaccgtgcccaaactgctcgccggtgctgatgcccccacaacgccaccaccgcagtccaaggaggaggcgcgagtcgccggcgataagccagatcaggcggacaagctgcccgccagggttggccgtggccgtgaggagacgacggaggagcggaggaccaccgagaccgagaggactagcttggcggcgagaagcaaagaggaagacgaggagaaggccaagcccatggtggcgctgccgccgcagtcgagcgagaaggcgagcggagaccatcaacgagatgaccagcaggatggcaaggcgcaggccgaccacagggagatggtcgctcgcgaggccgcgcgcaggatcgaggcggcgcgggcgagggtggcggaggccaaggccaaggcagagcgggagaggaagtgtgagcactggaaggagcgcgccgtggaggagggcctcaagttggcggaggcggtcaataacaagaaggaggtgatcgccacggccgtcgccgccttcacacttggcgtcttcgtctcgagtaggctcttctccaggacttaatcaacccatgcgtaatcatggaccagacatattcacgtatatgagcatgagaacatgagcagcatcgccaggttatattgattcgtagacttgtacatgcatgatgcagcactaatattcacattatgtattaattattgctccctattgagcactc

SEQ ID NO: 16879 - protein, 288 aa, Zea mays subsp. mays
  peptide (1)..(288): Ceres Seq. ID no. 12355021
  misc_feature (26)..(288): Homolog of NCBI NO: 6634015 NR Description: KIAA0324 protein [Homo sapiens]
  misc_feature (26)..(288): Homolog of NCBI NO: 5821151 NR Description: RNA binding protein [Homo sapiens]
  misc_feature (37)..(288): Homolog of NCBI NO: 19923466 NR Description: splicing coactivator subunit SRm300
  misc_feature (37)..(288): Homolog of NCBI NO: 6649242 NR Description: splicing coactivator subunit SRm300 [Homo sapiens]
  misc_feature (37)..(288): Homolog of NCBI NO: 7512967 NR Description: hypothetical protein KIAA0324 - human (fragment)
  misc_feature (37)..(288): Homolog of NCBI NO: 6634015 NR Description: KIAA0324 protein [Homo sapiens]
  misc_feature (37)..(288): Homolog of NCBI NO: 5821151 NR Description: RNA binding protein [Homo sapiens]
  misc_feature (32)..(288): Homolog of NCBI NO: 6649242 NR Description: splicing coactivator subunit SRm300 [Homo sapiens]
  misc_feature (26)..(288): Homolog of NCBI NO: 19923466 NR Description: splicing coactivator subunit SRm300
  misc_feature (26)..(288): Homolog of NCBI NO: 7512967 NR Description: hypothetical protein KIAA0324 - human (fragment)
TARDQATRKHHQSVHKNTYAAHGVVSHQAGHRQWRARKLQRRPTTWTPSTSGSTMAPATFSASTSQGSRRRTFGCTWTARAGSPSSAIANPRPAAAARRCGSTRRSSCPIRPTLIPSRAASTATCSRSPCPNCSPVLMPPQRHHRSPRRRRESPAISQIRRTSCPPGLAVAVRRRRRSGGPPRPRGLAWRREAKRKTRRRPSPWWRCRRSRARRRAETINEMTSRMARRRPTTGRWSLARPRAGSRRRGRGWRRPRPRQSGRGSVSTGRSAPWRRASSWRRRSITRRR

SEQ ID NO: 16880 - protein, 278 aa, Zea mays subsp. mays
  peptide (1)..(278): Ceres Seq. ID no. 12355022
  misc_feature (113)..(248): Pfam Name: Caldesmon Pfam Description: Caldesmon
  misc_feature (15)..(259): Homolog of NCBI NO: 18414724 NR Description: expressed protein
  misc_feature (19)..(109): Homolog of NCBI NO: 34912184 NR Description: P0700A11.18 [Oryza sativa (japonica
  misc_feature (14)..(232): Homolog of NCBI NO: 15242107 NR Description: small heat shock protein -like; protein id:
  misc_feature (11)..(163): Homolog of NCBI NO: 21592618 NR Description: unknown [Arabidopsis thaliana]
  misc_feature (11)..(163): Homolog of NCBI NO: 18401331 NR Description: expressed protein
  misc_feature (1)..(157): Homolog of NCBI NO: 34912180 NR Description: P0700A11.16 [Oryza sativa (japonica
  misc_feature (1)..(277): Homolog of NCBI NO: 34912188 NR Description: P0700A11.20 [Oryza sativa (japonica
MASTQAPAAADNVDPVYEWLDDGASYLLRLDLPGFKKEDFRVHVDGEGRLTVIGNRKPTPGGGGKALRLHKTFQLPNTANLDTITGRFDGNVLTLTVPKLLAGADAPTTPPPQSKEEARVAGDKPDQADKLPARVGRGREETTEERRTTETERTSLAARSKEEDEEKAKPMVALPPQSSEKASGDHQRDDQQDGKAQADHREMVAREAARRIEAARARVAEAKAKAERERKCEHWKERAVEEGLKLAEAVNNKKEVIATAVAAFTLGVFVSSRLFSRT

SEQ ID NO: 16881 - protein, 234 aa, Zea mays subsp. mays
  peptide (1)..(234): Ceres Seq. ID no. 12355023
  misc_feature (1)..(234): Homolog of NCBI NO: 19923466 NR Description: splicing coactivator subunit SRm300
  misc_feature (1)..(234): Homolog of NCBI NO: 7512967 NR Description: hypothetical protein KIAA0324 - human (fragment)
  misc_feature (1)..(234): Homolog of NCBI NO: 6634015 NR Description: KIAA0324 protein [Homo sapiens]
  misc_feature (1)..(234): Homolog of NCBI NO: 5821151 NR Description: RNA binding protein [Homo sapiens]
  misc_feature (1)..(234): Homolog of NCBI NO: 19923466 NR Description: splicing coactivator subunit SRm300
  misc_feature (1)..(234): Homolog of NCBI NO: 6649242 NR Description: splicing coactivator subunit SRm300 [Homo sapiens]
  misc_feature (1)..(234): Homolog of NCBI NO: 7512967 NR Description: hypothetical protein KIAA0324 - human (fragment)
  misc_feature (1)..(234): Homolog of NCBI NO: 6634015 NR Description: KIAA0324 protein [Homo sapiens]
  misc_feature (1)..(234): Homolog of NCBI NO: 5821151 NR Description: RNA binding protein [Homo sapiens]
  misc_feature (1)..(234): Homolog of NCBI NO: 6649242 NR Description: splicing coactivator subunit SRm300 [Homo sapiens]
MAPATFSASTSQGSRRRTFGCTWTARAGSPSSAIANPRPAAAARRCGSTRRSSCPIRPTLIPSRAASTATCSRSPCPNCSPVLMPPQRHHRSPRRRRESPAISQIRRTSCPPGLAVAVRRRRRSGGPPRPRGLAWRREAKRKTRRRPSPWWRCRRSRARRRAETINEMTSRMARRRPTTGRWSLARPRAGSRRRGRGWRRPRPRQSGRGSVSTGRSAPWRRASSWRRRSITRRR

SEQ ID NO: 16882 - DNA, 1087 bp, Zea mays subsp. mays
  misc_feature (1)..(1087): Ceres Seq. ID no. 12400968
  misc_feature: MA Experiment ID: 108522 Result: Up-regulated in Transcription
  misc_feature: MA Experiment 108522 PARAMETER Experiment Name: Zm_42deg_Heat_P Parameter: Age (day) Value: 8
  misc_feature: MA Experiment 108522 PARAMETER Experiment Name: Zm_42deg_Heat_P Parameter: Organism Value: Zea mays
  misc_feature: MA Experiment 108522 PARAMETER Experiment Name: Zm_42deg_Heat_P Parameter: Plant Line Value: 35A19
  misc_feature: MA Experiment 108522 PARAMETER Experiment Name: Zm_42deg_Heat_P Parameter: Temperature (deg C) Value: 42 vs. 22
  misc_feature: MA Experiment 108522 PARAMETER Experiment Name: Zm_42deg_Heat_P Parameter: Timepoint (hr) Value: 1
  misc_feature: MA Experiment 108522 PARAMETER Experiment Name: Zm_42deg_Heat_P Parameter: Tissue Value: Aerial
  misc_feature: MA Experiment ID: 108527 Result: Up-regulated in Transcription
  misc_feature: MA Experiment 108527 PARAMETER Experiment Name: Zm_5mM_NO_P Parameter: Age (day) Value: 8
  misc_feature: MA Experiment 108527 PARAMETER Experiment Name: Zm_5mM_NO_P Parameter: Organism Value: Zea mays
  misc_feature: MA Experiment 108527 PARAMETER Experiment Name: Zm_5mM_NO_P Parameter: Plant Line Value: 35A19
  misc_feature: MA Experiment 108527 PARAMETER Experiment Name: Zm_5mM_NO_P Parameter: Timepoint (hr) Value: 6
  misc_feature: MA Experiment 108527 PARAMETER Experiment Name: Zm_5mM_NO_P Parameter: Tissue Value: Aerial
  misc_feature: MA Experiment 108527 PARAMETER Experiment Name: Zm_5mM_NO_P Parameter: Treatment Value: 5mM NO vs. No Treatment
  misc_feature: MA Experiment ID: 108528 Result: Up-regulated in Transcription
  misc_feature: MA Experiment 108528 PARAMETER Experiment Name: Zm_Imbibed_Seeds_P Parameter: Age (day) Value: 5 vs. 2
  misc_feature: MA Experiment 108528 PARAMETER Experiment Name: Zm_Imbibed_Seeds_P Parameter: Organism Value: Zea mays
  misc_feature: MA Experiment 108528 PARAMETER Experiment Name: Zm_Imbibed_Seeds_P Parameter: Plant Line Value: 35A19
  misc_feature: MA Experiment 108528 PARAMETER Experiment Name: Zm_Imbibed_Seeds_P Parameter: Tissue Value: Aerial vs. Embryo
  misc_feature: MA Experiment ID: 108529 Result: Up-regulated in Transcription
  misc_feature: MA Experiment 108529 PARAMETER Experiment Name: Zm_Imbibed_Seeds_P Parameter: Age (day) Value: 5 vs. 2
  misc_feature: MA Experiment 108529 PARAMETER Experiment Name: Zm_Imbibed_Seeds_P Parameter: Organism Value: Zea mays
  misc_feature: MA Experiment 108529 PARAMETER Experiment Name: Zm_Imbibed_Seeds_P Parameter: Plant Line Value: 35A19
  misc_feature: MA Experiment 108529 PARAMETER Experiment Name: Zm_Imbibed_Seeds_P Parameter: Tissue Value: Roots vs. Embryo
  misc_feature: MA Experiment ID: 108530 Result: Up-regulated in Transcription
  misc_feature: MA Experiment 108530 PARAMETER Experiment Name: Zm_Imbibed_Seeds_P Parameter: Age (day) Value: 6 vs. 2
  misc_feature: MA Experiment 108530 PARAMETER Experiment Name: Zm_Imbibed_Seeds_P Parameter: Organism Value: Zea mays
  misc_feature: MA Experiment 108530 PARAMETER Experiment Name: Zm_Imbibed_Seeds_P Parameter: Plant Line Value: 35A19
  misc_feature: MA Experiment 108530 PARAMETER Experiment Name: Zm_Imbibed_Seeds_P Parameter: Tissue Value: Aerial vs. Embryo
  misc_feature: MA Experiment ID: 108535 Result: Down-regulated in Transcription
  misc_feature: MA Experiment 108535 PARAMETER Experiment Name: Zm_Meristem_P Parameter: Age (day) Value: 8
  misc_feature: MA Experiment 108535 PARAMETER Experiment Name: Zm_Meristem_P Parameter: Organism Value: Zea mays
  misc_feature: MA Experiment 108535 PARAMETER Experiment Name: Zm_Meristem_P Parameter: Plant Line Value: 35A19
  misc_feature: MA Experiment 108535 PARAMETER Experiment Name: Zm_Meristem_P Parameter: Tissue Value: Root Meristem vs. Above Root Meristem
  misc_feature: MA Experiment ID: 108546 Result: Up-regulated in Transcription
  misc_feature: MA Experiment 108546 PARAMETER Experiment Name: Zm_Imbibed_Seeds_P Parameter: Age (day) Value: 3 vs. 2
  misc_feature: MA Experiment 108546 PARAMETER Experiment Name: Zm_Imbibed_Seeds_P Parameter: Organism Value: Zea mays
  misc_feature: MA Experiment 108546 PARAMETER Experiment Name: Zm_Imbibed_Seeds_P Parameter: Plant Line Value: 35A19
  misc_feature: MA Experiment 108546 PARAMETER Experiment Name: Zm_Imbibed_Seeds_P Parameter: Tissue Value: Roots vs. Embryo
  misc_feature: MA Experiment ID: 108556 Result: Up-regulated in Transcription
  misc_feature: MA Experiment 108556 PARAMETER Experiment Name: Zm_Drought_P Parameter: Age (day) Value: 9
  misc_feature: MA Experiment 108556 PARAMETER Experiment Name: Zm_Drought_P Parameter: Organism Value: Zea mays
  misc_feature: MA Experiment 108556 PARAMETER Experiment Name: Zm_Drought_P Parameter: Plant Line Value: 35A19
  misc_feature: MA Experiment 108556 PARAMETER Experiment Name: Zm_Drought_P Parameter: Timepoint (hr) Value: 24
  misc_feature: MA Experiment 108556 PARAMETER Experiment Name: Zm_Drought_P Parameter: Tissue Value: Aerial
  misc_feature: MA Experiment 108556 PARAMETER Experiment Name: Zm_Drought_P Parameter: Treatment Value: Drought vs. No Drought
  misc_feature: MA Experiment ID: 20000108 Result: Down-regulated in Transcription
  misc_feature: MA Experiment 20000108 PARAMETER Experiment Name: Zm_Root-Tips_P Parameter: Age (day) Value: 12
  misc_feature: MA Experiment 20000108 PARAMETER Experiment Name: Zm_Root-Tips_P Parameter: Organism Value: Zea mays
  misc_feature: MA Experiment 20000108 PARAMETER Experiment Name: Zm_Root-Tips_P Parameter: Tissue Value: Root tips vs. Root mid region    35
  misc_feature: MA Experiment 20000108 PARAMETER Experiment Name: Zm_Root-Tips_P Parameter: Tissue Value: Root tips vs. Root mid region   Sequence Listing-Misc Features (4)
gcgtcgattgcttgcccagctcgcttcgtcttcgtcttccttctcccccttctcctcgcctccggttaaccgccacagcctggattcgccatctcccgcggcggcgcggcggccgctgctgctgcgtcggcgcgtgagatggatgattgcggcggcggcggcggcaagaggccgttccagctggcgcggtcgctgacgtaccaccagccacccggggcaccggccggcggctgcgtccaggtggcggcggcagcaccagcagcatcagctcgcggacgagccgcgcgcgccccggcgcaggcggtggtgctgtacacgacgtcgctgcgcggggtgcggcgcacgttcgcggactgcgccgcggtgcgcgccatcctgcgcggcttccgcgtggccgttgacgagcgggacgtgtccatggacgcggcgctccggcgggaggtccaggcgctgctggccgccgcgcggccgcgnnttcgcgctcccgcagctgctcatcgtgcgnccgcctcgtcggcggcgcggacgaggtgcggcagctgaacgagaccggccagctccggcgcctcctnnacggcgcggccgggcaggacccggccttcgtntgcgacgcctgtggcggcgtccggttcgtcccgtgcgccggatgcggcggcggccgcaaggtgttcgtcgaggaggagggccgcgtcgttcgctgcgtcgagtgcaacgagaacgggctggtacgctgccttaactgctgctcttgatcgccgacggcggcggcggtcgnnngccgttccattcgtgctgctaatccaancggtagaggttgtggtagatatcaacaaaaggaagaagaanaagagggggctttcggtttcccggcgtggggttcgtgtgtgtccgatccgatcattttgaggatcggatttgctgctagtcggtggacaagaacagattgttcttggctccttgctgcaaaattgccatatggtgatggcgattggagaataagaactgggcttgtttgtatatgcatctgatgtatcaaagattgatactgctgctagttcaactaatgtaaatacttcagtttggtgtc

SEQ ID NO: 16883 - protein, 134 aa, Zea mays subsp. mays
  peptide (1)..(134): Ceres Seq. ID no. 12400969
  misc_feature (54)..(106): Homolog of NCBI NO: 15217659 NR Description: peptide transporter, putative
  misc_feature (41)..(106): Homolog of NCBI NO: 32490043 NR Description: OSJNBa0063C18.3 [Oryza sativa (japonica
  misc_feature (37)..(131): Homolog of NCBI NO: 38346321 NR Description: OJ000126_13.3 [Oryza sativa (japonica
  misc_feature (54)..(105): Homolog of NCBI NO: 15237686 NR Description: putative protein; protein id: At5g58530.1
  misc_feature (56)..(109): Homolog of NCBI NO: 30694571 NR Description: expressed protein [Arabidopsis thaliana]
  misc_feature (31)..(112): Homolog of NCBI NO: 34899868 NR Description: OJ1714_H10.16 [Oryza sativa (japonica
  misc_feature (56)..(111): Homolog of NCBI NO: 15227326 NR Description: unknown protein
  misc_feature (56)..(109): Homolog of NCBI NO: 15451042 NR Description: putative protein [Arabidopsis thaliana]
  misc_feature (39)..(103): Homolog of NCBI NO: 15240723 NR Description: putative protein
  misc_feature (6)..(108): Homolog of NCBI NO: 34899098 NR Description: hypothetical protein~similar to Arabidopsis
  misc_feature (112)..(112): Xaa is any aa, unknown or other
  misc_feature (113)..(113): Xaa is any aa, unknown or other
  misc_feature (123)..(123): Xaa is any aa, unknown or other
MDDCGGGGGKRPFQLARSLTYHQPPGAPAGGCVQVAAAAPAASARGRAARAPAQAVVLYTTSLRGVRRTFADCAAVRAILRGFRVAVDERDVSMDAALRREVQALLAAARPXXRAPAAAHRAXASSAARTRCGS

SEQ ID NO: 16884 - DNA, 1286 bp, Zea mays subsp. mays
  misc_feature (1)..(1286): Ceres Seq. ID no. 13494497
  misc_feature: MA Experiment ID: 108504 Result: Down-regulated in Transcription
  misc_feature: MA Experiment 108504 PARAMETER Experiment Name: Zm_Drought_P Parameter: Age (day) Value: 8
  misc_feature: MA Experiment 108504 PARAMETER Experiment Name: Zm_Drought_P Parameter: Organism Value: Zea mays
  misc_feature: MA Experiment 108504 PARAMETER Experiment Name: Zm_Drought_P Parameter: Plant Line Value: 35A19
  misc_feature: MA Experiment 108504 PARAMETER Experiment Name: Zm_Drought_P Parameter: Timepoint (hr) Value: 12
  misc_feature: MA Experiment 108504 PARAMETER Experiment Name: Zm_Drought_P Parameter: Tissue Value: Aerial
  misc_feature: MA Experiment 108504 PARAMETER Experiment Name: Zm_Drought_P Parameter: Treatment Value: Drought vs. No Drought
  misc_feature: MA Experiment ID: 108523 Result: Down-regulated in Transcription
  misc_feature: MA Experiment 108523 PARAMETER Experiment Name: Zm_42deg_Heat_P Parameter: Age (day) Value: 8
  misc_feature: MA Experiment 108523 PARAMETER Experiment Name: Zm_42deg_Heat_P Parameter: Organism Value: Zea mays
  misc_feature: MA Experiment 108523 PARAMETER Experiment Name: Zm_42deg_Heat_P Parameter: Plant Line Value: 35A19
  misc_feature: MA Experiment 108523 PARAMETER Experiment Name: Zm_42deg_Heat_P Parameter: Temperature (deg C) Value: 42 vs. 22
  misc_feature: MA Experiment 108523 PARAMETER Experiment Name: Zm_42deg_Heat_P Parameter: Timepoint (hr) Value: 6
  misc_feature: MA Experiment 108523 PARAMETER Experiment Name: Zm_42deg_Heat_P Parameter: Tissue Value: Aerial
  misc_feature: MA Experiment ID: 108543 Result: Up-regulated in Transcription
  misc_feature: MA Experiment ID: 108544 Result: Down-regulated in Transcription
  misc_feature: MA Experiment ID: 108556 Result: Down-regulated in Transcription
  misc_feature: MA Experiment 108556 PARAMETER Experiment Name: Zm_Drought_P Parameter: Age (day) Value: 9
  misc_feature: MA Experiment 108556 PARAMETER Experiment Name: Zm_Drought_P Parameter: Organism Value: Zea mays
  misc_feature: MA Experiment 108556 PARAMETER Experiment Name: Zm_Drought_P Parameter: Plant Line Value: 35A19
  misc_feature: MA Experiment 108556 PARAMETER Experiment Name: Zm_Drought_P Parameter: Timepoint (hr) Value: 24
  misc_feature: MA Experiment 108556 PARAMETER Experiment Name: Zm_Drought_P Parameter: Tissue Value: Aerial
  misc_feature: MA Experiment 108556 PARAMETER Experiment Name: Zm_Drought_P Parameter: Treatment Value: Drought vs. No Drought
  misc_feature: MA Experiment ID: 108597 Result: Down-regulated in Transcription
  misc_feature: MA Experiment 108597 PARAMETER Experiment Name: Zm_100uM_ABA_P Parameter: Age (day) Value: 9
  misc_feature: MA Experiment 108597 PARAMETER Experiment Name: Zm_100uM_ABA_P Parameter: Organism Value: Zea mays
  misc_feature: MA Experiment 108597 PARAMETER Experiment Name: Zm_100uM_ABA_P Parameter: Plant Line Value: 35A19
  misc_feature: MA Experiment 108597 PARAMETER Experiment Name: Zm_100uM_ABA_P Parameter: Timepoint (hr) Value: 24
  misc_feature: MA Experiment 108597 PARAMETER Experiment Name: Zm_100uM_ABA_P Parameter: Tissue Value: Aerial
  misc_feature: MA Experiment 108597 PARAMETER Experiment Name: Zm_100uM_ABA_P Parameter: Treatment Value: 100uM ABA vs. No Treatment
  misc_feature: MA Experiment ID: 20000478 Result: Down-regulated in Transcription
  misc_feature: MA Experiment 20000478 PARAMETER Experiment Name: Zm_5mM_SA_P Parameter: Age (day) Value: 11
  misc_feature: MA Experiment 20000478 PARAMETER Experiment Name: Zm_5mM_SA_P Parameter: Organism Value: Zea mays
  misc_feature: MA Experiment 20000478 PARAMETER Experiment Name: Zm_5mM_SA_P Parameter: Plant Line Value: 35A19
  misc_feature: MA Experiment 20000478 PARAMETER Experiment Name: Zm_5mM_SA_P Parameter: Timepoint (hr) Value: 72
  misc_feature: MA Experiment 20000478 PARAMETER Experiment Name: Zm_5mM_SA_P Parameter: Tissue Value: Aerial
  misc_feature: MA Experiment 20000478 PARAMETER Experiment Name: Zm_5mM_SA_P Parameter: Treatment Value: 5mM SA vs. No Treatment
  misc_feature: MA Experiment ID: 20000480 Result: Down-regulated in Transcription
  misc_feature: MA Experiment 20000480 PARAMETER Experiment Name: Zm_Drought_P Parameter: Age (day) Value: 11
  misc_feature: MA Experiment 20000480 PARAMETER Experiment Name: Zm_Drought_P Parameter: Organism Value: Zea mays
  misc_feature: MA Experiment 20000480 PARAMETER Experiment Name: Zm_Drought_P Parameter: Plant Line Value: 35A19
  misc_feature: MA Experiment 20000480 PARAMETER Experiment Name: Zm_Drought_P Parameter: Timepoint (hr) Value: 72
  misc_feature: MA Experiment 20000480 PARAMETER Experiment Name: Zm_Drought_P Parameter: Tissue Value: Aerial
  misc_feature: MA Experiment 20000480 PARAMETER Experiment Name: Zm_Drought_P Parameter: Treatment Value: Drought vs. No Drought
  misc_feature: MA Experiment ID: 20000488 Result: Down-regulated in Transcription
  misc_feature: MA Experiment 20000488 PARAMETER Experiment Name: Zm_50mM_NH4NO3_L_to_H_P Parameter: Organism Value: Zea mays
  misc_feature: MA Experiment 20000488 PARAMETER Experiment Name: Zm_50mM_NH4NO3_L_to_H_P Parameter: Timepoint (hr) Value: 8
  misc_feature: MA Experiment 20000488 PARAMETER Experiment Name: Zm_50mM_NH4NO3_L_to_H_P Parameter: Tissue Value: Leaves
  misc_feature: MA Experiment 20000488 PARAMETER Experiment Name: Zm_50mM_NH4NO3_L_to_H_P Parameter: Treatment Value: 50mM NH4NO3 vs. 100mM Mannitol
  misc_feature: MA Experiment ID: 20000626 Result: Down-regulated in Transcription
  misc_feature: MA Experiment 20000626 PARAMETER Experiment Name: Zm_Herbicide-Treatments_P Parameter: Timepoint (hr) Value: 12
  misc_feature: MA Experiment 20000626 PARAMETER Experiment Name: Zm_Herbicide-Treatments_P Parameter: Tissue Value: Aerial
  misc_feature: MA Experiment 20000626 PARAMETER Experiment Name: Zm_Herbicide-Treatments_P Parameter: Treatment Value: Roundup vs. No Treatment
gcacgagaccattacctagaacatcctaatcaaaaaaccaaacaaactgaaccactgtccgctgcgtgctttccttcctctcaacgccagccttgccgagagcccgagaccaatcgccgccatctcccggaatgacggggtgacgaaaccgcgccgcaccagacaagacagaggagccgccgccgcgacccacaggccaccgggtcgccgaggaggggatccagcgagccatgtcgaccgacgtgcccatgagccccgagctcgagcaggtggacggcgagatccaggacatcttccgcgcgctccagaatgggttccagaagatggacaagatcaaggactccagcaggcagtccaagcagctggaggatctcacggccaagatgagagagtgcaagcgcttgatcaaagagtttgaccgtatactcaaggatgaggagaaaaagaacacccctgatgtcaacaagcagctcaatgacaagaagcagttcatgatcaaagaactcaactcctatgtgaccttaaggaaaacgtaccagagcagccttggtaataagaggatcgaactattcgatacgggtaatgaccaggtggctgagggaactccagttcaaatggcatcagaaatgtcaaatcaagaactcattagcaccggaaggaaacaaatggaccaaactgatcaagctattgagcgctcaaaaatggttgtagcacaaactgttgaagttggagctcagactgctgcaactctgacacagcaaacggaacaaatgaagaggataggcaatgagctagattctgtccacttttcactgaagaaggctagtcaaatggtgaaagagattggccgtcaggttgctactgacaaatgcattatggcgttcctgtttctgattgtctgtggtgtcattgcaataattgttgttaagattgtcaacccgcataacaagaacatcagagacattccgggcctagcacctcccgccatgaacaggaagctgctgtccatcgacgctgcaggactctgagcgttgtgaatggctgcctcccgcagcacagcgcaacgcagcgcgtcagagttctcttatgagccacgatacatggcttcgcgattcttttgtgcttgtagtttacgtccgcccattctttccctattgcattggtgagtagtagcctcaggtttgtagcgggactcttgttgtttattgcttgcgagcccatagctttctggttgtttgtgtatatgcggtagtgatgtgaatgtgagagtcgagtggagattcttc

SEQ ID NO: 16885 - protein, 265 aa, Zea mays subsp. mays
  peptide (1)..(265): Ceres Seq. ID no. 13494498
  misc_feature (77)..(212): Pfam Name: Vesicle transport v-SNARE protein Pfam Description: Vesicle transport v-SNARE protein
  misc_feature (77)..(212): Pfam Name: Vesicle transport v-SNARE protein Pfam Description: Vesicle transport v-SNARE protein
  misc_feature (1)..(182): Homolog of NCBI NO: 25370781 NR Description: F11A17.20 [imported] - Arabidopsis thaliana
  misc_feature (12)..(258): Homolog of NCBI NO: 25370781 NR Description: F11A17.20 [imported] - Arabidopsis thaliana
  misc_feature (7)..(248): Homolog of NCBI NO: 25370780 NR Description: hypothetical protein At2g35190 [imported] -
  misc_feature (7)..(258): Homolog of NCBI NO: 27805643 NR Description: Novel plant SNARE 11 (AtNPSN11)
  misc_feature (7)..(258): Homolog of NCBI NO: 18403771 NR Description: expressed protein [Arabidopsis thaliana]
  misc_feature (1)..(182): Homolog of NCBI NO: 25370781 NR Description: F11A17.20 [imported] - Arabidopsis thaliana
  misc_feature (7)..(248): Homolog of NCBI NO: 25370780 NR Description: hypothetical protein At2g35190 [imported] -
  misc_feature (7)..(258): Homolog of NCBI NO: 18403771 NR Description: expressed protein [Arabidopsis thaliana]
  misc_feature (1)..(264): Homolog of NCBI NO: 23237830 NR Description: contains ESTs
  misc_feature (1)..(261): Homolog of NCBI NO: 34896946 NR Description: putative vesicle soluble NSF attachment protein
  misc_feature (1)..(258): Homolog of NCBI NO: 18401508 NR Description: expressed protein [Arabidopsis thaliana]
  misc_feature (1)..(258): Homolog of NCBI NO: 22330102 NR Description: expressed protein [Arabidopsis thaliana]
  misc_feature (1)..(258): Homolog of NCBI NO: 21536876 NR Description: unknown [Arabidopsis thaliana]
  misc_feature (7)..(258): Homolog of NCBI NO: 27805643 NR Description: Novel plant SNARE 11 (AtNPSN11)
  misc_feature (12)..(258): Homolog of NCBI NO: 25370781 NR Description: F11A17.20 [imported] - Arabidopsis thaliana
  misc_feature (1)..(258): Homolog of NCBI NO: 21536876 NR Description: unknown [Arabidopsis thaliana]
  misc_feature (1)..(258): Homolog of NCBI NO: 22330102 NR Description: expressed protein [Arabidopsis thaliana]
  misc_feature (1)..(258): Homolog of NCBI NO: 18401508 NR Description: expressed protein [Arabidopsis thaliana]
  misc_feature (1)..(261): Homolog of NCBI NO: 34896946 NR Description: putative vesicle soluble NSF attachment protein
  misc_feature (1)..(264): Homolog of NCBI NO: 23237830 NR Description: contains ESTs
MSTDVPMSPELEQVDGEIQDIFRALQNGFQKMDKIKDSSRQSKQLEDLTAKMRECKRLIKEFDRILKDEEKKNTPDVNKQLNDKKQFMIKELNSYVTLRKTYQSSLGNKRIELFDTGNDQVAEGTPVQMASEMSNQELISTGRKQMDQTDQAIERSKMVVAQTVEVGAQTAATLTQQTEQMKRIGNELDSVHFSLKKASQMVKEIGRQVATDKCIMAFLFLIVCGVIAIIVVKIVNPHNKNIRDIPGLAPPAMNRKLLSIDAAGL

SEQ ID NO: 16886 - protein, 259 aa, Zea mays subsp. mays
  peptide (1)..(259): Ceres Seq. ID no. 13494499
  misc_feature (71)..(206): Pfam Name: Vesicle transport v-SNARE protein Pfam Description: Vesicle transport v-SNARE protein
  misc_feature (71)..(206): Pfam Name: Vesicle transport v-SNARE protein Pfam Description: Vesicle transport v-SNARE protein
  misc_feature (1)..(176): Homolog of NCBI NO: 25370781 NR Description: F11A17.20 [imported] - Arabidopsis thaliana
  misc_feature (6)..(252): Homolog of NCBI NO: 25370781 NR Description: F11A17.20 [imported] - Arabidopsis thaliana
  misc_feature (1)..(242): Homolog of NCBI NO: 25370780 NR Description: hypothetical protein At2g35190 [imported] -
  misc_feature (1)..(252): Homolog of NCBI NO: 27805643 NR Description: Novel plant SNARE 11 (AtNPSN11)
  misc_feature (1)..(252): Homolog of NCBI NO: 18403771 NR Description: expressed protein [Arabidopsis thaliana]
  misc_feature (1)..(176): Homolog of NCBI NO: 25370781 NR Description: F11A17.20 [imported] - Arabidopsis thaliana
  misc_feature (1)..(242): Homolog of NCBI NO: 25370780 NR Description: hypothetical protein At2g35190 [imported] -
  misc_feature (1)..(252): Homolog of NCBI NO: 18403771 NR Description: expressed protein [Arabidopsis thaliana]
  misc_feature (1)..(258): Homolog of NCBI NO: 23237830 NR Description: contains ESTs
  misc_feature (1)..(255): Homolog of NCBI NO: 34896946 NR Description: putative vesicle soluble NSF attachment protein
  misc_feature (1)..(252): Homolog of NCBI NO: 18401508 NR Description: expressed protein [Arabidopsis thaliana]
  misc_feature (1)..(252): Homolog of NCBI NO: 22330102 NR Description: expressed protein [Arabidopsis thaliana]
  misc_feature (1)..(252): Homolog of NCBI NO: 21536876 NR Description: unknown [Arabidopsis thaliana]
  misc_feature (1)..(252): Homolog of NCBI NO: 27805643 NR Description: Novel plant SNARE 11 (AtNPSN11)
  misc_feature (6)..(252): Homolog of NCBI NO: 25370781 NR Description: F11A17.20 [imported] - Arabidopsis thaliana
  misc_feature (1)..(252): Homolog of NCBI NO: 21536876 NR Description: unknown [Arabidopsis thaliana]
  misc_feature (1)..(252): Homolog of NCBI NO: 22330102 NR Description: expressed protein [Arabidopsis thaliana]
  misc_feature (1)..(252): Homolog of NCBI NO: 18401508 NR Description: expressed protein [Arabidopsis thaliana]
  misc_feature (1)..(255): Homolog of NCBI NO: 34896946 NR Description: putative vesicle soluble NSF attachment protein
  misc_feature (1)..(258): Homolog of NCBI NO: 23237830 NR Description: contains ESTs
MSPELEQVDGEIQDIFRALQNGFQKMDKIKDSSRQSKQLEDLTAKMRECKRLIKEFDRILKDEEKKNTPDVNKQLNDKKQFMIKELNSYVTLRKTYQSSLGNKRIELFDTGNDQVAEGTPVQMASEMSNQELISTGRKQMDQTDQAIERSKMVVAQTVEVGAQTAATLTQQTEQMKRIGNELDSVHFSLKKASQMVKEIGRQVATDKCIMAFLFLIVCGVIAIIVVKIVNPHNKNIRDIPGLAPPAMNRKLLSIDAAGL

SEQ ID NO: 16887 - protein, 234 aa, Zea mays subsp. mays
  peptide (1)..(234): Ceres Seq. ID no. 13494500
  misc_feature (46)..(181): Pfam Name: Vesicle transport v-SNARE protein Pfam Description: Vesicle transport v-SNARE protein
  misc_feature (46)..(181): Pfam Name: Vesicle transport v-SNARE protein Pfam Description: Vesicle transport v-SNARE protein
  misc_feature (1)..(151): Homolog of NCBI NO: 25370781 NR Description: F11A17.20 [imported] - Arabidopsis thaliana
  misc_feature (1)..(227): Homolog of NCBI NO: 25370781 NR Description: F11A17.20 [imported] - Arabidopsis thaliana
  misc_feature (1)..(217): Homolog of NCBI NO: 25370780 NR Description: hypothetical protein At2g35190 [imported] -
  misc_feature (1)..(227): Homolog of NCBI NO: 27805643 NR Description: Novel plant SNARE 11 (AtNPSN11)
  misc_feature (1)..(227): Homolog of NCBI NO: 18403771 NR Description: expressed protein [Arabidopsis thaliana]
  misc_feature (1)..(227): Homolog of NCBI NO: 25370781 NR Description: F11A17.20 [imported] - Arabidopsis thaliana
  misc_feature (1)..(227): Homolog of NCBI NO: 27805643 NR Description: Novel plant SNARE 11 (AtNPSN11)
  misc_feature (1)..(233): Homolog of NCBI NO: 23237830 NR Description: contains ESTs
  misc_feature (1)..(230): Homolog of NCBI NO: 34896946 NR Description: putative vesicle soluble NSF attachment protein
  misc_feature (1)..(227): Homolog of NCBI NO: 18401508 NR Description: expressed protein [Arabidopsis thaliana]
  misc_feature (1)..(227): Homolog of NCBI NO: 22330102 NR Description: expressed protein [Arabidopsis thaliana]
  misc_feature (1)..(227): Homolog of NCBI NO: 21536876 NR Description: unknown [Arabidopsis thaliana]
  misc_feature (1)..(227): Homolog of NCBI NO: 18403771 NR Description: expressed protein [Arabidopsis thaliana]
  misc_feature (1)..(217): Homolog of NCBI NO: 25370780 NR Description: hypothetical protein At2g35190 [imported] -
  misc_feature (1)..(151): Homolog of NCBI NO: 25370781 NR Description: F11A17.20 [imported] - Arabidopsis thaliana
  misc_feature (1)..(227): Homolog of NCBI NO: 21536876 NR Description: unknown [Arabidopsis thaliana]
  misc_feature (1)..(227): Homolog of NCBI NO: 22330102 NR Description: expressed protein [Arabidopsis thaliana]
  misc_feature (1)..(227): Homolog of NCBI NO: 18401508 NR Description: expressed protein [Arabidopsis thaliana]
  misc_feature (1)..(230): Homolog of NCBI NO: 34896946 NR Description: putative vesicle soluble NSF attachment protein
  misc_feature (1)..(233): Homolog of NCBI NO: 23237830 NR Description: contains ESTs
MDKIKDSSRQSKQLEDLTAKMRECKRLIKEFDRILKDEEKKNTPDVNKQLNDKKQFMIKELNSYVTLRKTYQSSLGNKRIELFDTGNDQVAEGTPVQMASEMSNQELISTGRKQMDQTDQAIERSKMVVAQTVEVGAQTAATLTQQTEQMKRIGNELDSVHFSLKKASQMVKEIGRQVATDKCIMAFLFLIVCGVIAIIVVKIVNPHNKNIRDIPGLAPPAMNRKLLSIDAAGL

SEQ ID NO: 16888 - DNA, 912 bp, Zea mays subsp. mays
  misc_feature (1)..(912): Ceres Seq. ID no. 12363928
  misc_feature: MA Experiment ID: 108523 Result: Up-regulated in Transcription
  misc_feature: MA Experiment 108523 PARAMETER Experiment Name: Zm_42deg_Heat_P Parameter: Age (day) Value: 8
  misc_feature: MA Experiment 108523 PARAMETER Experiment Name: Zm_42deg_Heat_P Parameter: Organism Value: Zea mays
  misc_feature: MA Experiment 108523 PARAMETER Experiment Name: Zm_42deg_Heat_P Parameter: Plant Line Value: 35A19
  misc_feature: MA Experiment 108523 PARAMETER Experiment Name: Zm_42deg_Heat_P Parameter: Temperature (deg C) Value: 42 vs. 22
  misc_feature: MA Experiment 108523 PARAMETER Experiment Name: Zm_42deg_Heat_P Parameter: Timepoint (hr) Value: 6
  misc_feature: MA Experiment 108523 PARAMETER Experiment Name: Zm_42deg_Heat_P Parameter: Tissue Value: Aerial
  misc_feature: MA Experiment ID: 108527 Result: Up-regulated in Transcription
  misc_feature: MA Experiment 108527 PARAMETER Experiment Name: Zm_5mM_NO_P Parameter: Age (day) Value: 8
  misc_feature: MA Experiment 108527 PARAMETER Experiment Name: Zm_5mM_NO_P Parameter: Organism Value: Zea mays
  misc_feature: MA Experiment 108527 PARAMETER Experiment Name: Zm_5mM_NO_P Parameter: Plant Line Value: 35A19
  misc_feature: MA Experiment 108527 PARAMETER Experiment Name: Zm_5mM_NO_P Parameter: Timepoint (hr) Value: 6
  misc_feature: MA Experiment 108527 PARAMETER Experiment Name: Zm_5mM_NO_P Parameter: Tissue Value: Aerial
  misc_feature: MA Experiment 108527 PARAMETER Experiment Name: Zm_5mM_NO_P Parameter: Treatment Value: 5mM NO vs. No Treatment
  misc_feature: MA Experiment ID: 20000626 Result: Up-regulated in Transcription
  misc_feature: MA Experiment 20000626 PARAMETER Experiment Name: Zm_Herbicide-Treatments_P Parameter: Timepoint (hr) Value: 12
  misc_feature: MA Experiment 20000626 PARAMETER Experiment Name: Zm_Herbicide-Treatments_P Parameter: Tissue Value: Aerial
  misc_feature: MA Experiment 20000626 PARAMETER Experiment Name: Zm_Herbicide-Treatments_P Parameter: Treatment Value: Roundup vs. No Treatment
ctctccattccgaactccaaacgaaccaattcgtgtccatcgaaggttccatgggatcaggcctctcaagcagccaccggaggagcagcgcgtcgcttcaccagccggcggcggccccggccccggccccggcgctggtcatcgcggccgacggctcgttgagggagttcgcgccggcgccactccccgcctccgtctccgacgcgctcgccggcgccaatgcggcggccgacggccggttcttcgtgtgcagctccgacgcgctctgcttcgactccgacgtcccggcgctcggcgccgacgagctgctccggccggggcagatatacttcgtcctccccgcggccatgctcggcaggccgctctcgagcgccggcatggccgcgctcgccgcgcgcgcgagcgaggcgctggcggcgggagcgggctggcgtgggcgccctcgcggccgccgcgggttcacgaaggcgcgcgtcgtgccggcgcaccaccgccacgcggacggcgaccgagaggtcaacgagaagctgaaccagaggactcttggcggcatcgagacggcttcacgtggtccggcgaccaacgccaggaagtccgctgtggcggcgcgaccggctccgcctctgaggagggcgctcagcaccattgaagaggatgccgagcgatcaaattggctttgaagcgcgcgtgttggacgcgaccgagtgatcacagagctgcgcgagggcatgtgccgtattgatgataactttggattgatttttttttgtgtgtgtataggatgttagagattttgtgctattcaaatagcttgaaaggatatggaaatttgttatttggttggtcgacgtttgtgtatttaaacaaatcacaaagattaaatgaaaattttagttgctgacttggttcttt

SEQ ID NO: 16889 - protein, 225 aa, Zea mays subsp. mays
  peptide (1)..(225): Ceres Seq. ID no. 12363929
  misc_feature (37)..(141): Homolog of NCBI NO: 34394505 NR Description: hypothetical protein [Oryza sativa (japonica
  misc_feature (44)..(143): Homolog of NCBI NO: 21592697 NR Description: unknown [Arabidopsis thaliana]
  misc_feature (28)..(217): Homolog of NCBI NO: 13699079 NR Description: TMV response-related gene product [Nicotiana
  misc_feature (26)..(141): Homolog of NCBI NO: 34904464 NR Description: OSJNBa0086P08.11 [Oryza sativa (japonica
  misc_feature (44)..(186): Homolog of NCBI NO: 14596201 NR Description: Unknown protein [Arabidopsis thaliana]
  misc_feature (44)..(186): Homolog of NCBI NO: 18411155 NR Description: expressed protein
  misc_feature (17)..(137): Homolog of NCBI NO: 31126784 NR Description: hypothetical protein [Oryza sativa (japonica
  misc_feature (38)..(219): Homolog of NCBI NO: 5441884 NR Description: Similar to Arabidopsis thaliana DNA contig
  misc_feature (21)..(219): Homolog of NCBI NO: 5441882 NR Description: Similar to Arabidopsis thaliana DNA contig
  misc_feature (21)..(220): Homolog of NCBI NO: 5441883 NR Description: Similar to Arabidopsis thaliana BAC genomic
LHSELQTNQFVSIEGSMGSGLSSSHRRSSASLHQPAAAPAPAPALVIAADGSLREFAPAPLPASVSDALAGANAAADGRFFVCSSDALCFDSDVPALGADELLRPGQIYFVLPAAMLGRPLSSAGMAALAARASEALAAGAGWRGRPRGRRGFTKARVVPAHHRHADGDREVNEKLNQRTLGGIETASRGPATNARKSAVAARPAPPLRRALSTIEEDAERSNWL

SEQ ID NO: 16890 - protein, 215 aa, Zea mays subsp. mays
  peptide (1)..(215): Ceres Seq. ID no. 12363930
SPFRTPNEPIRVHRRFHGIRPLKQPPEEQRVASPAGGGPGPGPGAGHRGRRLVEGVRAGATPRLRLRRARRRQCGGRRPVLRVQLRRALLRLRRPGARRRRAAPAGADILRPPRGHARQAALERRHGRARRARERGAGGGSGLAWAPSRPPRVHEGARRAGAPPPRGRRPRGQREAEPEDSWRHRDGFTWSGDQRQEVRCGGATGSASEEGAQHH

SEQ ID NO: 16891 - protein, 209 aa, Zea mays subsp. mays
  peptide (1)..(209): Ceres Seq. ID no. 12363931
  misc_feature (21)..(125): Homolog of NCBI NO: 34394505 NR Description: hypothetical protein [Oryza sativa (japonica
  misc_feature (28)..(127): Homolog of NCBI NO: 21592697 NR Description: unknown [Arabidopsis thaliana]
  misc_feature (12)..(201): Homolog of NCBI NO: 13699079 NR Description: TMV response-related gene product [Nicotiana
  misc_feature (10)..(125): Homolog of NCBI NO: 34904464 NR Description: OSJNBa0086P08.11 [Oryza sativa (japonica
  misc_feature (28)..(170): Homolog of NCBI NO: 14596201 NR Description: Unknown protein [Arabidopsis thaliana]
  misc_feature (28)..(170): Homolog of NCBI NO: 18411155 NR Description: expressed protein
  misc_feature (1)..(121): Homolog of NCBI NO: 31126784 NR Description: hypothetical protein [Oryza sativa (japonica
  misc_feature (22)..(203): Homolog of NCBI NO: 5441884 NR Description: Similar to Arabidopsis thaliana DNA contig
  misc_feature (5)..(203): Homolog of NCBI NO: 5441882 NR Description: Similar to Arabidopsis thaliana DNA contig
  misc_feature (5)..(204): Homolog of NCBI NO: 5441883 NR Description: Similar to Arabidopsis thaliana BAC genomic
MGSGLSSSHRRSSASLHQPAAAPAPAPALVIAADGSLREFAPAPLPASVSDALAGANAAADGRFFVCSSDALCFDSDVPALGADELLRPGQIYFVLPAAMLGRPLSSAGMAALAARASEALAAGAGWRGRPRGRRGFTKARVVPAHHRHADGDREVNEKLNQRTLGGIETASRGPATNARKSAVAARPAPPLRRALSTIEEDAERSNWL

SEQ ID NO: 16892 - DNA, 686 bp, Zea mays subsp. mays
  misc_feature (1)..(686): Ceres Seq. ID no. 12549504
  misc_feature: MA Experiment ID: 108523 Result: Up-regulated in Transcription
  misc_feature: MA Experiment 108523 PARAMETER Experiment Name: Zm_42deg_Heat_P Parameter: Age (day) Value: 8
  misc_feature: MA Experiment 108523 PARAMETER Experiment Name: Zm_42deg_Heat_P Parameter: Organism Value: Zea mays
  misc_feature: MA Experiment 108523 PARAMETER Experiment Name: Zm_42deg_Heat_P Parameter: Plant Line Value: 35A19
  misc_feature: MA Experiment 108523 PARAMETER Experiment Name: Zm_42deg_Heat_P Parameter: Temperature (deg C) Value: 42 vs. 22
  misc_feature: MA Experiment 108523 PARAMETER Experiment Name: Zm_42deg_Heat_P Parameter: Timepoint (hr) Value: 6
  misc_feature: MA Experiment 108523 PARAMETER Experiment Name: Zm_42deg_Heat_P Parameter: Tissue Value: Aerial
  misc_feature: MA Experiment ID: 108527 Result: Up-regulated in Transcription
  misc_feature: MA Experiment 108527 PARAMETER Experiment Name: Zm_5mM_NO_P Parameter: Age (day) Value: 8
  misc_feature: MA Experiment 108527 PARAMETER Experiment Name: Zm_5mM_NO_P Parameter: Organism Value: Zea mays
  misc_feature: MA Experiment 108527 PARAMETER Experiment Name: Zm_5mM_NO_P Parameter: Plant Line Value: 35A19
  misc_feature: MA Experiment 108527 PARAMETER Experiment Name: Zm_5mM_NO_P Parameter: Timepoint (hr) Value: 6
  misc_feature: MA Experiment 108527 PARAMETER Experiment Name: Zm_5mM_NO_P Parameter: Tissue Value: Aerial
  misc_feature: MA Experiment 108527 PARAMETER Experiment Name: Zm_5mM_NO_P Parameter: Treatment Value: 5mM NO vs. No Treatment
  misc_feature: MA Experiment ID: 108528 Result: Up-regulated in Transcription
  misc_feature: MA Experiment 108528 PARAMETER Experiment Name: Zm_Imbibed_Seeds_P Parameter: Age (day) Value: 5 vs. 2
  misc_feature: MA Experiment 108528 PARAMETER Experiment Name: Zm_Imbibed_Seeds_P Parameter: Organism Value: Zea mays
  misc_feature: MA Experiment 108528 PARAMETER Experiment Name: Zm_Imbibed_Seeds_P Parameter: Plant Line Value: 35A19
  misc_feature: MA Experiment 108528 PARAMETER Experiment Name: Zm_Imbibed_Seeds_P Parameter: Tissue Value: Aerial vs. Embryo
  misc_feature: MA Experiment ID: 108534 Result: Up-regulated in Transcription
  misc_feature: MA Experiment 108534 PARAMETER Experiment Name: Zm_4deg_Cold_P Parameter: Age (hr) Value: 8
  misc_feature: MA Experiment 108534 PARAMETER Experiment Name: Zm_4deg_Cold_P Parameter: Organism Value: Zea mays
  misc_feature: MA Experiment 108534 PARAMETER Experiment Name: Zm_4deg_Cold_P Parameter: Plant Line Value: 35A19
  misc_feature: MA Experiment 108534 PARAMETER Experiment Name: Zm_4deg_Cold_P Parameter: Temperature (deg C) Value: 4 vs. 22
  misc_feature: MA Experiment 108534 PARAMETER Experiment Name: Zm_4deg_Cold_P Parameter: Timepoint (hr) Value: 6
  misc_feature: MA Experiment 108534 PARAMETER Experiment Name: Zm_4deg_Cold_P Parameter: Tissue Value: Aerial
  misc_feature: MA Experiment ID: 108535 Result: Down-regulated in Transcription
  misc_feature: MA Experiment 108535 PARAMETER Experiment Name: Zm_Meristem_P Parameter: Age (day) Value: 8
  misc_feature: MA Experiment 108535 PARAMETER Experiment Name: Zm_Meristem_P Parameter: Organism Value: Zea mays
  misc_feature: MA Experiment 108535 PARAMETER Experiment Name: Zm_Meristem_P Parameter: Plant Line Value: 35A19
  misc_feature: MA Experiment 108535 PARAMETER Experiment Name: Zm_Meristem_P Parameter: Tissue Value: Root Meristem vs. Above Root Meristem
  misc_feature: MA Experiment ID: 108540 Result: Up-regulated in Transcription
  misc_feature: MA Experiment 108540 PARAMETER Experiment Name: Zm_20percent_PEG_P Parameter: Age (day) Value: 8
  misc_feature: MA Experiment 108540 PARAMETER Experiment Name: Zm_20percent_PEG_P Parameter: Organism Value: Zea mays
  misc_feature: MA Experiment 108540 PARAMETER Experiment Name: Zm_20percent_PEG_P Parameter: Plant Line Value: 35A19
  misc_feature: MA Experiment 108540 PARAMETER Experiment Name: Zm_20percent_PEG_P Parameter: Timepoint (hr) Value: 6
  misc_feature: MA Experiment 108540 PARAMETER Experiment Name: Zm_20percent_PEG_P Parameter: Tissue Value: Aerial
  misc_feature: MA Experiment 108540 PARAMETER Experiment Name: Zm_20percent_PEG_P Parameter: Treatment Value: 20percent PEG vs. No Treatment
  misc_feature: MA Experiment ID: 108543 Result: Down-regulated in Transcription
  misc_feature: MA Experiment ID: 108547 Result: Up-regulated in Transcription
  misc_feature: MA Experiment 108547 PARAMETER Experiment Name: Zm_Imbibed_Seeds_P Parameter: Age (day) Value: 4 vs. 2
  misc_feature: MA Experiment 108547 PARAMETER Experiment Name: Zm_Imbibed_Seeds_P Parameter: Organism Value: Zea mays
  misc_feature: MA Experiment 108547 PARAMETER Experiment Name: Zm_Imbibed_Seeds_P Parameter: Plant Line Value: 35A19
  misc_feature: MA Experiment 108547 PARAMETER Experiment Name: Zm_Imbibed_Seeds_P Parameter: Tissue Value: Aerial vs. Embryo
  misc_feature: MA Experiment ID: 108556 Result: Up-regulated in Transcription
  misc_feature: MA Experiment 108556 PARAMETER Experiment Name: Zm_Drought_P Parameter: Age (day) Value: 9
  misc_feature: MA Experiment 108556 PARAMETER Experiment Name: Zm_Drought_P Parameter: Organism Value: Zea mays
  misc_feature: MA Experiment 108556 PARAMETER Experiment Name: Zm_Drought_P Parameter: Plant Line Value: 35A19
  misc_feature: MA Experiment 108556 PARAMETER Experiment Name: Zm_Drought_P Parameter: Timepoint (hr) Value: 24
  misc_feature: MA Experiment 108556 PARAMETER Experiment Name: Zm_Drought_P Parameter: Tissue Value: Aerial
  misc_feature: MA Experiment 108556 PARAMETER Experiment Name: Zm_Drought_P Parameter: Treatment Value: Drought vs. No Drought
  misc_feature: MA Experiment ID: 20000108 Result: Down-regulated in Transcription
  misc_feature: MA Experiment 20000108 PARAMETER Experiment Name: Zm_Root-Tips_P Parameter: Age (day) Value: 12
  misc_feature: MA Experiment 20000108 PARAMETER Experiment Name: Zm_Root-Tips_P Parameter: Organism Value: Zea mays
  misc_feature: MA Experiment 20000108 PARAMETER Experiment Name: Zm_Root-Tips_P Parameter: Tissue Value: Root tips vs. Root mid region    35
  misc_feature: MA Experiment 20000108 PARAMETER Experiment Name: Zm_Root-Tips_P Parameter: Tissue Value: Root tips vs. Root mid region   Sequence Listing-Misc Features (4)
  misc_feature: MA Experiment ID: 20000477 Result: Up-regulated in Transcription
  misc_feature: MA Experiment 20000477 PARAMETER Experiment Name: Zm_5mM_SA_P Parameter: Age (day) Value: 10
  misc_feature: MA Experiment 20000477 PARAMETER Experiment Name: Zm_5mM_SA_P Parameter: Organism Value: Zea mays
  misc_feature: MA Experiment 20000477 PARAMETER Experiment Name: Zm_5mM_SA_P Parameter: Plant Line Value: 35A19
  misc_feature: MA Experiment 20000477 PARAMETER Experiment Name: Zm_5mM_SA_P Parameter: Timepoint (hr) Value: 48
  misc_feature: MA Experiment 20000477 PARAMETER Experiment Name: Zm_5mM_SA_P Parameter: Tissue Value: Aerial
  misc_feature: MA Experiment 20000477 PARAMETER Experiment Name: Zm_5mM_SA_P Parameter: Treatment Value: 5mM SA vs. No Treatment
  misc_feature: MA Experiment ID: 20000478 Result: Up-regulated in Transcription
  misc_feature: MA Experiment 20000478 PARAMETER Experiment Name: Zm_5mM_SA_P Parameter: Age (day) Value: 11
  misc_feature: MA Experiment 20000478 PARAMETER Experiment Name: Zm_5mM_SA_P Parameter: Organism Value: Zea mays
  misc_feature: MA Experiment 20000478 PARAMETER Experiment Name: Zm_5mM_SA_P Parameter: Plant Line Value: 35A19
  misc_feature: MA Experiment 20000478 PARAMETER Experiment Name: Zm_5mM_SA_P Parameter: Timepoint (hr) Value: 72
  misc_feature: MA Experiment 20000478 PARAMETER Experiment Name: Zm_5mM_SA_P Parameter: Tissue Value: Aerial
  misc_feature: MA Experiment 20000478 PARAMETER Experiment Name: Zm_5mM_SA_P Parameter: Treatment Value: 5mM SA vs. No Treatment
  misc_feature: MA Experiment ID: 20000479 Result: Up-regulated in Transcription
  misc_feature: MA Experiment 20000479 PARAMETER Experiment Name: Zm_Drought_P Parameter: Age (day) Value: 10
  misc_feature: MA Experiment 20000479 PARAMETER Experiment Name: Zm_Drought_P Parameter: Organism Value: Zea mays
  misc_feature: MA Experiment 20000479 PARAMETER Experiment Name: Zm_Drought_P Parameter: Plant Line Value: 35A19
  misc_feature: MA Experiment 20000479 PARAMETER Experiment Name: Zm_Drought_P Parameter: Timepoint (hr) Value: 48
  misc_feature: MA Experiment 20000479 PARAMETER Experiment Name: Zm_Drought_P Parameter: Tissue Value: Aerial
  misc_feature: MA Experiment 20000479 PARAMETER Experiment Name: Zm_Drought_P Parameter: Treatment Value: Drought vs. No Drought
  misc_feature: MA Experiment ID: 20000480 Result: Up-regulated in Transcription
  misc_feature: MA Experiment 20000480 PARAMETER Experiment Name: Zm_Drought_P Parameter: Age (day) Value: 11
  misc_feature: MA Experiment 20000480 PARAMETER Experiment Name: Zm_Drought_P Parameter: Organism Value: Zea mays
  misc_feature: MA Experiment 20000480 PARAMETER Experiment Name: Zm_Drought_P Parameter: Plant Line Value: 35A19
  misc_feature: MA Experiment 20000480 PARAMETER Experiment Name: Zm_Drought_P Parameter: Timepoint (hr) Value: 72
  misc_feature: MA Experiment 20000480 PARAMETER Experiment Name: Zm_Drought_P Parameter: Tissue Value: Aerial
  misc_feature: MA Experiment 20000480 PARAMETER Experiment Name: Zm_Drought_P Parameter: Treatment Value: Drought vs. No Drought
  misc_feature: MA Experiment ID: 20000533 Result: Up-regulated in Transcription
  misc_feature: MA Experiment 20000533 PARAMETER Experiment Name: Zm_0.001percent_MeJA_P Parameter: Age (day) Value: 11
  misc_feature: MA Experiment 20000533 PARAMETER Experiment Name: Zm_0.001percent_MeJA_P Parameter: Organism Value: Zea mays
  misc_feature: MA Experiment 20000533 PARAMETER Experiment Name: Zm_0.001percent_MeJA_P Parameter: Plant Line Value: 35A19
  misc_feature: MA Experiment 20000533 PARAMETER Experiment Name: Zm_0.001percent_MeJA_P Parameter: Timepoint (hr) Value: 72
  misc_feature: MA Experiment 20000533 PARAMETER Experiment Name: Zm_0.001percent_MeJA_P Parameter: Tissue Value: Aerial
  misc_feature: MA Experiment 20000533 PARAMETER Experiment Name: Zm_0.001percent_MeJA_P Parameter: Treatment Value: 0.001percent MeJA vs. No Treatment
  misc_feature: MA Experiment ID: 20001612 Result: Up-regulated in Transcription
  misc_feature: MA Experiment 20001612 PARAMETER Experiment Name: Zm_50ppm_KNO3_L-to-H_P Parameter: Age (day) Value: 19
  misc_feature: MA Experiment 20001612 PARAMETER Experiment Name: Zm_50ppm_KNO3_L-to-H_P Parameter: Organism Value: Zea mays
  misc_feature: MA Experiment 20001612 PARAMETER Experiment Name: Zm_50ppm_KNO3_L-to-H_P Parameter: Plant Line Value: 35A19
  misc_feature: MA Experiment 20001612 PARAMETER Experiment Name: Zm_50ppm_KNO3_L-to-H_P Parameter: Timepoint (hr) Value: 8
  misc_feature: MA Experiment 20001612 PARAMETER Experiment Name: Zm_50ppm_KNO3_L-to-H_P Parameter: Tissue Value: Roots
  misc_feature: MA Experiment 20001612 PARAMETER Experiment Name: Zm_50ppm_KNO3_L-to-H_P Parameter: Treatment Value: 50ppm KNO3 vs. 50ppm KCl
atcgagacgctgggcacgttcgcgctctccgtcggggcggcggtcgggatggagttctgggcgcggtgggcgcaccgggcgctgtggcacgcctccctgtggcacatgcacgagtcgcaccaccggccgcgcgagggccccttcgagctcaacgacgtgttcgccatcgtcaacgccgcgccggccatctccctcctcgcctacggcttcttccaccgcggcatcgtgcccggcctctgcttcggcgcgggcctggggattacgctgttcggcatggcctacatgttcgtccacgacggcctggtccaccgccgctttccggtcggccccatcgccgacgtgccctacttccgccgagtggctgcttcgcacaagatacnccacatggacaagttcggcggcgtcccgtatgggctcttcctgggaccaaaggagctggaggaggttggtggcctggacgagcttgttagcagtccggtgagtgaagctactgatactgaagacgcaggagaagaaaagacgcgtccagttgtatgcgttgtccgaacaagcgtgttcatgggccagagtgtgccaaatgagttctagctttaggcgagtgggccaaatgagtgtgggctgcgtcccagggtagtataagtactatgagtctgtaataatcaggacaagaagaatttaggtaaagt

SEQ ID NO: 16893 - protein, 195 aa, Zea mays subsp. mays
  peptide (1)..(195): Ceres Seq. ID no. 12549505
  misc_feature (5)..(155): Pfam Name: Carotene hydroxylase Pfam Description: Carotene hydroxylase
  misc_feature (1)..(155): Homolog of NCBI NO: 15235959 NR Description: beta-carotene hydroxylase
  misc_feature (1)..(155): Homolog of NCBI NO: 1575296 NR Description: beta-carotene hydroxylase [Arabidopsis thaliana]
  misc_feature (2)..(155): Homolog of NCBI NO: 2956717 NR Description: beta-carotene hydroxylase 2 [Capsicum annuum]
  misc_feature (1)..(169): Homolog of NCBI NO: 21734857 NR Description: beta-carotene hydroxylase [Vitis vinifera]
  misc_feature (2)..(155): Homolog of NCBI NO: 5870600 NR Description: beta-carotene hydroxylase [Lycopersicon
  misc_feature (2)..(155): Homolog of NCBI NO: 37536402 NR Description: putative beta-carotene hydroxylase
  misc_feature (2)..(174): Homolog of NCBI NO: 33145986 NR Description: beta-carotene hydroxylase [Crocus sativus]
  misc_feature (2)..(155): Homolog of NCBI NO: 9968545 NR Description: beta-carotene hydroxylase [Narcissus
  misc_feature (2)..(155): Homolog of NCBI NO: 11245486 NR Description: beta-carotene hydroxylase [Citrus unshiu]
  misc_feature (2)..(155): Homolog of NCBI NO: 9988836 NR Description: beta-carotene hydroxylase [Citrus unshiu]
  misc_feature (127)..(127): Xaa is any aa, unknown or other
IETLGTFALSVGAAVGMEFWARWAHRALWHASLWHMHESHHRPREGPFELNDVFAIVNAAPAISLLAYGFFHRGIVPGLCFGAGLGITLFGMAYMFVHDGLVHRRFPVGPIADVPYFRRVAASHKIXHMDKFGGVPYGLFLGPKELEEVGGLDELVSSPVSEATDTEDAGEEKTRPVVCVVRTSVFMGQSVPNEF

SEQ ID NO: 16894 - protein, 179 aa, Zea mays subsp. mays
  peptide (1)..(179): Ceres Seq. ID no. 12549506
  misc_feature (1)..(139): Pfam Name: Carotene hydroxylase Pfam Description: Carotene hydroxylase
  misc_feature (1)..(139): Homolog of NCBI NO: 9971820 NR Description: beta hydroxylase [Tagetes erecta]
  misc_feature (1)..(139): Homolog of NCBI NO: 1575296 NR Description: beta-carotene hydroxylase [Arabidopsis thaliana]
  misc_feature (1)..(139): Homolog of NCBI NO: 2956717 NR Description: beta-carotene hydroxylase 2 [Capsicum annuum]
  misc_feature (1)..(153): Homolog of NCBI NO: 21734857 NR Description: beta-carotene hydroxylase [Vitis vinifera]
  misc_feature (1)..(139): Homolog of NCBI NO: 5870600 NR Description: beta-carotene hydroxylase [Lycopersicon
  misc_feature (1)..(139): Homolog of NCBI NO: 37536402 NR Description: putative beta-carotene hydroxylase
  misc_feature (1)..(158): Homolog of NCBI NO: 33145986 NR Description: beta-carotene hydroxylase [Crocus sativus]
  misc_feature (1)..(139): Homolog of NCBI NO: 9968545 NR Description: beta-carotene hydroxylase [Narcissus
  misc_feature (1)..(139): Homolog of NCBI NO: 11245486 NR Description: beta-carotene hydroxylase [Citrus unshiu]
  misc_feature (1)..(139): Homolog of NCBI NO: 9988836 NR Description: beta-carotene hydroxylase [Citrus unshiu]
  misc_feature (111)..(111): Xaa is any aa, unknown or other
MEFWARWAHRALWHASLWHMHESHHRPREGPFELNDVFAIVNAAPAISLLAYGFFHRGIVPGLCFGAGLGITLFGMAYMFVHDGLVHRRFPVGPIADVPYFRRVAASHKIXHMDKFGGVPYGLFLGPKELEEVGGLDELVSSPVSEATDTEDAGEEKTRPVVCVVRTSVFMGQSVPNEF

SEQ ID NO: 16895 - protein, 160 aa, Zea mays subsp. mays
  peptide (1)..(160): Ceres Seq. ID no. 12549507
  misc_feature (1)..(120): Pfam Name: Carotene hydroxylase Pfam Description: Carotene hydroxylase
  misc_feature (1)..(120): Homolog of NCBI NO: 9971820 NR Description: beta hydroxylase [Tagetes erecta]
  misc_feature (1)..(120): Homolog of NCBI NO: 1575296 NR Description: beta-carotene hydroxylase [Arabidopsis thaliana]
  misc_feature (1)..(120): Homolog of NCBI NO: 2956717 NR Description: beta-carotene hydroxylase 2 [Capsicum annuum]
  misc_feature (1)..(134): Homolog of NCBI NO: 21734857 NR Description: beta-carotene hydroxylase [Vitis vinifera]
  misc_feature (1)..(120): Homolog of NCBI NO: 5870600 NR Description: beta-carotene hydroxylase [Lycopersicon
  misc_feature (1)..(120): Homolog of NCBI NO: 37536402 NR Description: putative beta-carotene hydroxylase
  misc_feature (1)..(139): Homolog of NCBI NO: 33145986 NR Description: beta-carotene hydroxylase [Crocus sativus]
  misc_feature (1)..(120): Homolog of NCBI NO: 9968545 NR Description: beta-carotene hydroxylase [Narcissus
  misc_feature (1)..(120): Homolog of NCBI NO: 11245486 NR Description: beta-carotene hydroxylase [Citrus unshiu]
  misc_feature (1)..(120): Homolog of NCBI NO: 9988836 NR Description: beta-carotene hydroxylase [Citrus unshiu]
  misc_feature (92)..(92): Xaa is any aa, unknown or other
MHESHHRPREGPFELNDVFAIVNAAPAISLLAYGFFHRGIVPGLCFGAGLGITLFGMAYMFVHDGLVHRRFPVGPIADVPYFRRVAASHKIXHMDKFGGVPYGLFLGPKELEEVGGLDELVSSPVSEATDTEDAGEEKTRPVVCVVRTSVFMGQSVPNEF

SEQ ID NO: 16896 - DNA, 1763 bp, Zea mays subsp. mays
  misc_feature (1)..(1763): Ceres Seq. ID no. 12362600
  misc_feature: MA Experiment ID: 108504 Result: Down-regulated in Transcription
  misc_feature: MA Experiment 108504 PARAMETER Experiment Name: Zm_Drought_P Parameter: Age (day) Value: 8
  misc_feature: MA Experiment 108504 PARAMETER Experiment Name: Zm_Drought_P Parameter: Organism Value: Zea mays
  misc_feature: MA Experiment 108504 PARAMETER Experiment Name: Zm_Drought_P Parameter: Plant Line Value: 35A19
  misc_feature: MA Experiment 108504 PARAMETER Experiment Name: Zm_Drought_P Parameter: Timepoint (hr) Value: 12
  misc_feature: MA Experiment 108504 PARAMETER Experiment Name: Zm_Drought_P Parameter: Tissue Value: Aerial
  misc_feature: MA Experiment 108504 PARAMETER Experiment Name: Zm_Drought_P Parameter: Treatment Value: Drought vs. No Drought
  misc_feature: MA Experiment ID: 108515 Result: Down-regulated in Transcription
  misc_feature: MA Experiment 108515 PARAMETER Experiment Name: Zm_2mM_SA_P Parameter: Age (day) Value: 8
  misc_feature: MA Experiment 108515 PARAMETER Experiment Name: Zm_2mM_SA_P Parameter: Organism Value: Zea mays
  misc_feature: MA Experiment 108515 PARAMETER Experiment Name: Zm_2mM_SA_P Parameter: Plant Line Value: 35A19
  misc_feature: MA Experiment 108515 PARAMETER Experiment Name: Zm_2mM_SA_P Parameter: Timepoint (hr) Value: 12
  misc_feature: MA Experiment 108515 PARAMETER Experiment Name: Zm_2mM_SA_P Parameter: Tissue Value: Aerial
  misc_feature: MA Experiment 108515 PARAMETER Experiment Name: Zm_2mM_SA_P Parameter: Treatment Value: 2mM SA vs. No Treatment
  misc_feature: MA Experiment ID: 108522 Result: Down-regulated in Transcription
  misc_feature: MA Experiment 108522 PARAMETER Experiment Name: Zm_42deg_Heat_P Parameter: Age (day) Value: 8
  misc_feature: MA Experiment 108522 PARAMETER Experiment Name: Zm_42deg_Heat_P Parameter: Organism Value: Zea mays
  misc_feature: MA Experiment 108522 PARAMETER Experiment Name: Zm_42deg_Heat_P Parameter: Plant Line Value: 35A19
  misc_feature: MA Experiment 108522 PARAMETER Experiment Name: Zm_42deg_Heat_P Parameter: Temperature (deg C) Value: 42 vs. 22
  misc_feature: MA Experiment 108522 PARAMETER Experiment Name: Zm_42deg_Heat_P Parameter: Timepoint (hr) Value: 1
  misc_feature: MA Experiment 108522 PARAMETER Experiment Name: Zm_42deg_Heat_P Parameter: Tissue Value: Aerial
  misc_feature: MA Experiment ID: 108535 Result: Up-regulated in Transcription
  misc_feature: MA Experiment 108535 PARAMETER Experiment Name: Zm_Meristem_P Parameter: Age (day) Value: 8
  misc_feature: MA Experiment 108535 PARAMETER Experiment Name: Zm_Meristem_P Parameter: Organism Value: Zea mays
  misc_feature: MA Experiment 108535 PARAMETER Experiment Name: Zm_Meristem_P Parameter: Plant Line Value: 35A19
  misc_feature: MA Experiment 108535 PARAMETER Experiment Name: Zm_Meristem_P Parameter: Tissue Value: Root Meristem vs. Above Root Meristem
  misc_feature: MA Experiment ID: 108536 Result: Down-regulated in Transcription
  misc_feature: MA Experiment 108536 PARAMETER Experiment Name: Zm_Meristem_P Parameter: Age (day) Value: 8
  misc_feature: MA Experiment 108536 PARAMETER Experiment Name: Zm_Meristem_P Parameter: Organism Value: Zea mays
  misc_feature: MA Experiment 108536 PARAMETER Experiment Name: Zm_Meristem_P Parameter: Plant Line Value: 35A19
  misc_feature: MA Experiment 108536 PARAMETER Experiment Name: Zm_Meristem_P Parameter: Tissue Value: Shoot Meristem vs. Above Shoot Meristem
  misc_feature: MA Experiment ID: 108543 Result: Up-regulated in Transcription
  misc_feature: MA Experiment ID: 108547 Result: Up-regulated in Transcription
  misc_feature: MA Experiment 108547 PARAMETER Experiment Name: Zm_Imbibed_Seeds_P Parameter: Age (day) Value: 4 vs. 2
  misc_feature: MA Experiment 108547 PARAMETER Experiment Name: Zm_Imbibed_Seeds_P Parameter: Organism Value: Zea mays
  misc_feature: MA Experiment 108547 PARAMETER Experiment Name: Zm_Imbibed_Seeds_P Parameter: Plant Line Value: 35A19
  misc_feature: MA Experiment 108547 PARAMETER Experiment Name: Zm_Imbibed_Seeds_P Parameter: Tissue Value: Aerial vs. Embryo
  misc_feature: MA Experiment ID: 108556 Result: Down-regulated in Transcription
  misc_feature: MA Experiment 108556 PARAMETER Experiment Name: Zm_Drought_P Parameter: Age (day) Value: 9
  misc_feature: MA Experiment 108556 PARAMETER Experiment Name: Zm_Drought_P Parameter: Organism Value: Zea mays
  misc_feature: MA Experiment 108556 PARAMETER Experiment Name: Zm_Drought_P Parameter: Plant Line Value: 35A19
  misc_feature: MA Experiment 108556 PARAMETER Experiment Name: Zm_Drought_P Parameter: Timepoint (hr) Value: 24
  misc_feature: MA Experiment 108556 PARAMETER Experiment Name: Zm_Drought_P Parameter: Tissue Value: Aerial
  misc_feature: MA Experiment 108556 PARAMETER Experiment Name: Zm_Drought_P Parameter: Treatment Value: Drought vs. No Drought
  misc_feature: MA Experiment ID: 108597 Result: Down-regulated in Transcription
  misc_feature: MA Experiment 108597 PARAMETER Experiment Name: Zm_100uM_ABA_P Parameter: Age (day) Value: 9
  misc_feature: MA Experiment 108597 PARAMETER Experiment Name: Zm_100uM_ABA_P Parameter: Organism Value: Zea mays
  misc_feature: MA Experiment 108597 PARAMETER Experiment Name: Zm_100uM_ABA_P Parameter: Plant Line Value: 35A19
  misc_feature: MA Experiment 108597 PARAMETER Experiment Name: Zm_100uM_ABA_P Parameter: Timepoint (hr) Value: 24
  misc_feature: MA Experiment 108597 PARAMETER Experiment Name: Zm_100uM_ABA_P Parameter: Tissue Value: Aerial
  misc_feature: MA Experiment 108597 PARAMETER Experiment Name: Zm_100uM_ABA_P Parameter: Treatment Value: 100uM ABA vs. No Treatment
  misc_feature: MA Experiment ID: 108689 Result: Down-regulated in Transcription
  misc_feature: MA Experiment 108689 PARAMETER Experiment Name: Zm_Drought_Roots_P Parameter: Age (day) Value: 9
  misc_feature: MA Experiment 108689 PARAMETER Experiment Name: Zm_Drought_Roots_P Parameter: Organism Value: Zea mays
  misc_feature: MA Experiment 108689 PARAMETER Experiment Name: Zm_Drought_Roots_P Parameter: Plant Line Value: 35A19
  misc_feature: MA Experiment 108689 PARAMETER Experiment Name: Zm_Drought_Roots_P Parameter: Timepoint (hr) Value: 24
  misc_feature: MA Experiment 108689 PARAMETER Experiment Name: Zm_Drought_Roots_P Parameter: Tissue Value: Roots
  misc_feature: MA Experiment 108689 PARAMETER Experiment Name: Zm_Drought_Roots_P Parameter: Treatment Value: Drought vs. No Drought
  misc_feature: MA Experiment ID: 20000477 Result: Down-regulated in Transcription
  misc_feature: MA Experiment 20000477 PARAMETER Experiment Name: Zm_5mM_SA_P Parameter: Age (day) Value: 10
  misc_feature: MA Experiment 20000477 PARAMETER Experiment Name: Zm_5mM_SA_P Parameter: Organism Value: Zea mays
  misc_feature: MA Experiment 20000477 PARAMETER Experiment Name: Zm_5mM_SA_P Parameter: Plant Line Value: 35A19
  misc_feature: MA Experiment 20000477 PARAMETER Experiment Name: Zm_5mM_SA_P Parameter: Timepoint (hr) Value: 48
  misc_feature: MA Experiment 20000477 PARAMETER Experiment Name: Zm_5mM_SA_P Parameter: Tissue Value: Aerial
  misc_feature: MA Experiment 20000477 PARAMETER Experiment Name: Zm_5mM_SA_P Parameter: Treatment Value: 5mM SA vs. No Treatment
  misc_feature: MA Experiment ID: 20000478 Result: Down-regulated in Transcription
  misc_feature: MA Experiment 20000478 PARAMETER Experiment Name: Zm_5mM_SA_P Parameter: Age (day) Value: 11
  misc_feature: MA Experiment 20000478 PARAMETER Experiment Name: Zm_5mM_SA_P Parameter: Organism Value: Zea mays
  misc_feature: MA Experiment 20000478 PARAMETER Experiment Name: Zm_5mM_SA_P Parameter: Plant Line Value: 35A19
  misc_feature: MA Experiment 20000478 PARAMETER Experiment Name: Zm_5mM_SA_P Parameter: Timepoint (hr) Value: 72
  misc_feature: MA Experiment 20000478 PARAMETER Experiment Name: Zm_5mM_SA_P Parameter: Tissue Value: Aerial
  misc_feature: MA Experiment 20000478 PARAMETER Experiment Name: Zm_5mM_SA_P Parameter: Treatment Value: 5mM SA vs. No Treatment
  misc_feature: MA Experiment ID: 20000479 Result: Down-regulated in Transcription
  misc_feature: MA Experiment 20000479 PARAMETER Experiment Name: Zm_Drought_P Parameter: Age (day) Value: 10
  misc_feature: MA Experiment 20000479 PARAMETER Experiment Name: Zm_Drought_P Parameter: Organism Value: Zea mays
  misc_feature: MA Experiment 20000479 PARAMETER Experiment Name: Zm_Drought_P Parameter: Plant Line Value: 35A19
  misc_feature: MA Experiment 20000479 PARAMETER Experiment Name: Zm_Drought_P Parameter: Timepoint (hr) Value: 48
  misc_feature: MA Experiment 20000479 PARAMETER Experiment Name: Zm_Drought_P Parameter: Tissue Value: Aerial
  misc_feature: MA Experiment 20000479 PARAMETER Experiment Name: Zm_Drought_P Parameter: Treatment Value: Drought vs. No Drought
  misc_feature: MA Experiment ID: 20000480 Result: Down-regulated in Transcription
  misc_feature: MA Experiment 20000480 PARAMETER Experiment Name: Zm_Drought_P Parameter: Age (day) Value: 11
  misc_feature: MA Experiment 20000480 PARAMETER Experiment Name: Zm_Drought_P Parameter: Organism Value: Zea mays
  misc_feature: MA Experiment 20000480 PARAMETER Experiment Name: Zm_Drought_P Parameter: Plant Line Value: 35A19
  misc_feature: MA Experiment 20000480 PARAMETER Experiment Name: Zm_Drought_P Parameter: Timepoint (hr) Value: 72
  misc_feature: MA Experiment 20000480 PARAMETER Experiment Name: Zm_Drought_P Parameter: Tissue Value: Aerial
  misc_feature: MA Experiment 20000480 PARAMETER Experiment Name: Zm_Drought_P Parameter: Treatment Value: Drought vs. No Drought
  misc_feature: MA Experiment ID: 20000626 Result: Down-regulated in Transcription
  misc_feature: MA Experiment 20000626 PARAMETER Experiment Name: Zm_Herbicide-Treatments_P Parameter: Timepoint (hr) Value: 12
  misc_feature: MA Experiment 20000626 PARAMETER Experiment Name: Zm_Herbicide-Treatments_P Parameter: Tissue Value: Aerial
  misc_feature: MA Experiment 20000626 PARAMETER Experiment Name: Zm_Herbicide-Treatments_P Parameter: Treatment Value: Roundup vs. No Treatment
  misc_feature: MA Experiment ID: 20001614 Result: Up-regulated in Transcription
  misc_feature: MA Experiment 20001614 PARAMETER Experiment Name: Zm_50ppm_KNO3_L-to-H_P Parameter: Age (day) Value: 21
  misc_feature: MA Experiment 20001614 PARAMETER Experiment Name: Zm_50ppm_KNO3_L-to-H_P Parameter: Organism Value: Zea mays
  misc_feature: MA Experiment 20001614 PARAMETER Experiment Name: Zm_50ppm_KNO3_L-to-H_P Parameter: Plant Line Value: 35A19
  misc_feature: MA Experiment 20001614 PARAMETER Experiment Name: Zm_50ppm_KNO3_L-to-H_P Parameter: Timepoint (hr) Value: 48
  misc_feature: MA Experiment 20001614 PARAMETER Experiment Name: Zm_50ppm_KNO3_L-to-H_P Parameter: Tissue Value: Roots
  misc_feature: MA Experiment 20001614 PARAMETER Experiment Name: Zm_50ppm_KNO3_L-to-H_P Parameter: Treatment Value: 50ppm KNO3 vs. 50ppm KCl
gcacgagaccattacctagaacatcctaatcgaaaagagatagacagctagcttcatcagtaggatgggcagcgacgaggaagcggcgctgctggtgccggcggtggaggagggttgccccgggtgcgtgatggagcagcggaaggcgagcagcaacggcaggatcccctacagggagctgttcttcgtcgccgccacctccctcgcctcagctttaccgatcacgtgcctcttccccttcttgtatttcatggtaagggacttccgcgtcgctgaaacagaggaagacatcggattctatgctggttttcttgctgcgtcgtacatggtgggcagaggcttctcttccatcttctggggcgtcatcgcagaccgcgttggacggaagcctgtcatcacgttttcgatactgtccgtggtcgtattcagcgcgctgtttggtctgagcacgacgtactggatggcgatcgccacgaggctcgtgctgggcgctctcaacggcctgctcgccccgataaaggcgtactgcgttgaagtttgccagacccagcaccaggcgcttggactctcgcttgtgaacacggcatgggctctgggtctcattgttggtccagctcttggaggctacctttcgcagccagctgagaaatatcctcacgtgttttccaaagactctgtatttggcagatttccataccttttgccctgtctaagtgtatcagcgtttgctacacttgtcctgataagctgtgagtggcttccggagactatacacaagcataaggttcccgaaatggacaccaaagcattcaaagccctgtcgtcaaaagagggctattgcgatccacctcgcaagaagaagagcttgctccagaacaggccttggatatcaaccctgctaccttactgctttttcagtcttcatgacacagcatatagtgagatactttccttatgggctgtgagcgaccggaagtatggcggccttagcttctcgactgaagatactggtcaggttcttgctatggcaggcgctagtcttctagtgtaccagcttgtcatttatcgctgggtccataggattcttgggacagtcaactcagcacgtattgcatctgctgtgtccatacttgttcttgcaacttatccctttatgacatacctgtcgggagtgaaactttccttggctctttgttctgcagccatgatgagaagtgctcttgcgatcactgtcaccacaggaatttcacttctacagaataatgctgtgtgccaagaacaaagaggcaccgcaaatggtatatcgacaactgcaatgtcattcttcaagtcaattgctccagtaggtgcaggggctctattctcatgggcacaaaaacgtcaagatgttgctttcctgccaggtgatcaagtggtgttcatggtgctgaatttggtgcagcttctcgggctgatatccacctttgagccctttctagtgttacctgcactaccagagtagtagtagtgttaaggctacaggacattatgaaaataaatgtaccttggcacatagttacagttgatcgagtgcaagacagaaggaacatgattgtagccacttgttacactactaatgatgtctgattagcccaagattaaaaaagaagaatgttttattaattagcaaacttgatctattgtaatatcactgtgacacaaaacccatatttctaatcatatggtcgtggatgctcaaaatgtgcaataaagttgtgatattc

SEQ ID NO: 16897 - protein, 478 aa, Zea mays subsp. mays
  peptide (1)..(478): Ceres Seq. ID no. 12362601
  misc_feature (88)..(471): Homolog of NCBI NO: 21555230 NR Description: transporter-like protein [Arabidopsis thaliana]
  misc_feature (88)..(471): Homolog of NCBI NO: 30684567 NR Description: transporter-related protein [Arabidopsis thaliana]
  misc_feature (35)..(448): Homolog of NCBI NO: 10177340 NR Description: transporter-like protein [Arabidopsis thaliana]
  misc_feature (35)..(471): Homolog of NCBI NO: 20260160 NR Description: transporter-like protein [Arabidopsis thaliana]
  misc_feature (1)..(471): Homolog of NCBI NO: 15229781 NR Description: transporter-like protein; protein id: At3g43790.1
  misc_feature (5)..(471): Homolog of NCBI NO: 22326785 NR Description: transporter-like protein
  misc_feature (1)..(471): Homolog of NCBI NO: 30684565 NR Description: transporter-related protein [Arabidopsis
  misc_feature (1)..(474): Homolog of NCBI NO: 23452821 NR Description: major facilitator superfamily antiporter
  misc_feature (88)..(474): Homolog of NCBI NO: 23452819 NR Description: major facilitator superfamily antiporter [Zea
  misc_feature (16)..(474): Homolog of NCBI NO: 23452823 NR Description: major facilitator superfamily antiporter
MGSDEEAALLVPAVEEGCPGCVMEQRKASSNGRIPYRELFFVAATSLASALPITCLFPFLYFMVRDFRVAETEEDIGFYAGFLAASYMVGRGFSSIFWGVIADRVGRKPVITFSILSVVVFSALFGLSTTYWMAIATRLVLGALNGLLAPIKAYCVEVCQTQHQALGLSLVNTAWALGLIVGPALGGYLSQPAEKYPHVFSKDSVFGRFPYLLPCLSVSAFATLVLISCEWLPETIHKHKVPEMDTKAFKALSSKEGYCDPPRKKKSLLQNRPWISTLLPYCFFSLHDTAYSEILSLWAVSDRKYGGLSFSTEDTGQVLAMAGASLLVYQLVIYRWVHRILGTVNSARIASAVSILVLATYPFMTYLSGVKLSLALCSAAMMRSALAITVTTGISLLQNNAVCQEQRGTANGISTTAMSFFKSIAPVGAGALFSWAQKRQDVAFLPGDQVVFMVLNLVQLLGLISTFEPFLVLPALPE

SEQ ID NO: 16898 - protein, 456 aa, Zea mays subsp. mays
  peptide (1)..(456): Ceres Seq. ID no. 12362602
  misc_feature (66)..(449): Homolog of NCBI NO: 21555230 NR Description: transporter-like protein [Arabidopsis thaliana]
  misc_feature (66)..(449): Homolog of NCBI NO: 30684567 NR Description: transporter-related protein [Arabidopsis thaliana]
  misc_feature (13)..(426): Homolog of NCBI NO: 10177340 NR Description: transporter-like protein [Arabidopsis thaliana]
  misc_feature (13)..(449): Homolog of NCBI NO: 20260160 NR Description: transporter-like protein [Arabidopsis thaliana]
  misc_feature (1)..(449): Homolog of NCBI NO: 15229781 NR Description: transporter-like protein; protein id: At3g43790.1
  misc_feature (1)..(449): Homolog of NCBI NO: 22326785 NR Description: transporter-like protein
  misc_feature (1)..(449): Homolog of NCBI NO: 30684565 NR Description: transporter-related protein [Arabidopsis
  misc_feature (1)..(452): Homolog of NCBI NO: 23452821 NR Description: major facilitator superfamily antiporter
  misc_feature (66)..(452): Homolog of NCBI NO: 23452819 NR Description: major facilitator superfamily antiporter [Zea
  misc_feature (1)..(452): Homolog of NCBI NO: 23452823 NR Description: major facilitator superfamily antiporter
MEQRKASSNGRIPYRELFFVAATSLASALPITCLFPFLYFMVRDFRVAETEEDIGFYAGFLAASYMVGRGFSSIFWGVIADRVGRKPVITFSILSVVVFSALFGLSTTYWMAIATRLVLGALNGLLAPIKAYCVEVCQTQHQALGLSLVNTAWALGLIVGPALGGYLSQPAEKYPHVFSKDSVFGRFPYLLPCLSVSAFATLVLISCEWLPETIHKHKVPEMDTKAFKALSSKEGYCDPPRKKKSLLQNRPWISTLLPYCFFSLHDTAYSEILSLWAVSDRKYGGLSFSTEDTGQVLAMAGASLLVYQLVIYRWVHRILGTVNSARIASAVSILVLATYPFMTYLSGVKLSLALCSAAMMRSALAITVTTGISLLQNNAVCQEQRGTANGISTTAMSFFKSIAPVGAGALFSWAQKRQDVAFLPGDQVVFMVLNLVQLLGLISTFEPFLVLPALPE

SEQ ID NO: 16899 - protein, 416 aa, Zea mays subsp. mays
  peptide (1)..(416): Ceres Seq. ID no. 12362603
  misc_feature (26)..(409): Homolog of NCBI NO: 21555230 NR Description: transporter-like protein [Arabidopsis thaliana]
  misc_feature (26)..(409): Homolog of NCBI NO: 30684567 NR Description: transporter-related protein [Arabidopsis thaliana]
  misc_feature (1)..(386): Homolog of NCBI NO: 10177340 NR Description: transporter-like protein [Arabidopsis thaliana]
  misc_feature (1)..(409): Homolog of NCBI NO: 20260160 NR Description: transporter-like protein [Arabidopsis thaliana]
  misc_feature (1)..(409): Homolog of NCBI NO: 15229781 NR Description: transporter-like protein; protein id: At3g43790.1
  misc_feature (1)..(409): Homolog of NCBI NO: 22326785 NR Description: transporter-like protein
  misc_feature (1)..(409): Homolog of NCBI NO: 30684565 NR Description: transporter-related protein [Arabidopsis
  misc_feature (1)..(412): Homolog of NCBI NO: 23452821 NR Description: major facilitator superfamily antiporter
  misc_feature (26)..(412): Homolog of NCBI NO: 23452819 NR Description: major facilitator superfamily antiporter [Zea
  misc_feature (1)..(412): Homolog of NCBI NO: 23452823 NR Description: major facilitator superfamily antiporter
MVRDFRVAETEEDIGFYAGFLAASYMVGRGFSSIFWGVIADRVGRKPVITFSILSVVVFSALFGLSTTYWMAIATRLVLGALNGLLAPIKAYCVEVCQTQHQALGLSLVNTAWALGLIVGPALGGYLSQPAEKYPHVFSKDSVFGRFPYLLPCLSVSAFATLVLISCEWLPETIHKHKVPEMDTKAFKALSSKEGYCDPPRKKKSLLQNRPWISTLLPYCFFSLHDTAYSEILSLWAVSDRKYGGLSFSTEDTGQVLAMAGASLLVYQLVIYRWVHRILGTVNSARIASAVSILVLATYPFMTYLSGVKLSLALCSAAMMRSALAITVTTGISLLQNNAVCQEQRGTANGISTTAMSFFKSIAPVGAGALFSWAQKRQDVAFLPGDQVVFMVLNLVQLLGLISTFEPFLVLPALPE

SEQ ID NO: 16900 - DNA, 1388 bp, Zea mays subsp. mays
  misc_feature (1)..(1388): Ceres Seq. ID no. 12382787
  misc_feature: MA Experiment ID: 108536 Result: Up-regulated in Transcription
  misc_feature: MA Experiment 108536 PARAMETER Experiment Name: Zm_Meristem_P Parameter: Age (day) Value: 8
  misc_feature: MA Experiment 108536 PARAMETER Experiment Name: Zm_Meristem_P Parameter: Organism Value: Zea mays
  misc_feature: MA Experiment 108536 PARAMETER Experiment Name: Zm_Meristem_P Parameter: Plant Line Value: 35A19
  misc_feature: MA Experiment 108536 PARAMETER Experiment Name: Zm_Meristem_P Parameter: Tissue Value: Shoot Meristem vs. Above Shoot Meristem
  misc_feature: MA Experiment ID: 108543 Result: Up-regulated in Transcription
  misc_feature: MA Experiment ID: 108545 Result: Up-regulated in Transcription
  misc_feature: MA Experiment 108545 PARAMETER Experiment Name: Zm_Imbibed_Seeds_P Parameter: Age (day) Value: 3 vs. 2
  misc_feature: MA Experiment 108545 PARAMETER Experiment Name: Zm_Imbibed_Seeds_P Parameter: Organism Value: Zea mays
  misc_feature: MA Experiment 108545 PARAMETER Experiment Name: Zm_Imbibed_Seeds_P Parameter: Plant Line Value: 35A19
  misc_feature: MA Experiment 108545 PARAMETER Experiment Name: Zm_Imbibed_Seeds_P Parameter: Tissue Value: Aerial vs. Embryo
  misc_feature: MA Experiment ID: 108687 Result: Down-regulated in Transcription
  misc_feature: MA Experiment 108687 PARAMETER Experiment Name: Zm_Embryos-Flowers__P Parameter: Tissue Value: Embryo vs. Aerial+
gcacgagaccattacctagaacatcctaatcgaaaaaaacaaaaaaagggccttcacttgactccacagccacagctagctgctgtggtgaagagtagcaggttcggcggccgggagggggcagccaacacgacgatggagcggttcggcctggacggcggcggtggcggtggcgagctgccgccggggttccggttccacccgacggacgaggagctcatcacctactacctcctccgcaaggccgtggacggcagcttctgcggccgcgccatcgcggagatcgacctgaacaagtgcgagccatgggagctcccggacaaggcgaagatgggggagaaggagtggtacttctacagcctccgcgaccgcaagtacccgacgggcctgcgcaccaaccgcgccacggtggccggctactggaaggccaccggcaaggaccgcgagatccgcagcggccgcaccggcgcgctggtgggcatgaagaagacgctcgtcttctaccgcggccgcgcccccaagggacagaagacgcactgggtcatgcacgagtaccgcctcgagggcgcctacgcctaccatttcctccccagctccacaagggacgagtgggtgatcgcgagggtgttccagaagcccggcgaggtcccacctgcagcccgcaagcaccgcctcggcgcccttagcagcactaccggcaccgccgcgggcgattcctgcttctcggactctacctcggcctccatcggcggcgcgtcgtcgtcatccacgcctggcccgctgttcgcgtcggcggccgccgccgtggccaatgccggcgccgccgacggcgacaccagctcctactgcggcggcgctgccaaccatggcaacctggtcaccggccgtgagctcgtgccctgcttctccactgccaccattaacggccccctagttgccgccgcgctcggcatcgggcagccgtacaacgcagccccgctgccgttcgagcagcagccgccgcctccggccttcctgccgagcctgcgttcccttcaggacaacctccagcttccaccgttcctctcagcaggcggtctgggcggcggcggggctctccactggctccccgccggcggcatggaggtcaaggtcgagggccgctcggcgccaccgcagatggctgtcggccccggccagctcgatggcgctttcggctggagcttctagttcttcgctgcactacatggttgtgcccatctatctagctagtagtggtttcttcatgcgttgtacgttaagcttggttaatcaactgctagtaagtgactgggtcgtcgttctaagtaatgtagtaactgtgttgtagtctctcatctaactgcagtagcagctttatttgttcgtgg

SEQ ID NO: 16901 - protein, 402 aa, Zea mays subsp. mays
  peptide (1)..(402): Ceres Seq. ID no. 12382788
  misc_feature (60)..(188): Pfam Name: No apical meristem (NAM) protein Pfam Description: No apical meristem (NAM) protein
  misc_feature (59)..(245): Homolog of NCBI NO: 30682054 NR Description: NAM (no apical meristem)-related protein
  misc_feature (59)..(245): Homolog of NCBI NO: 30682048 NR Description: NAM (no apical meristem)-related protein
  misc_feature (59)..(230): Homolog of NCBI NO: 21537315 NR Description: NAM, no apical meristem,-like protein
  misc_feature (59)..(230): Homolog of NCBI NO: 15240252 NR Description: NAM, no apical meristem, - like protein
  misc_feature (60)..(338): Homolog of NCBI NO: 15232511 NR Description: NAM-like protein
  misc_feature (60)..(338): Homolog of NCBI NO: 11994506 NR Description: contains similarity to NAM (no apical meristem)
  misc_feature (60)..(212): Homolog of NCBI NO: 1279640 NR Description: NAM [Petunia x hybrida]
  misc_feature (52)..(373): Homolog of NCBI NO: 15238882 NR Description: CUC2 (dbj|BAA19529.1); protein id: At5g53950.1
ARDHYLEHPNRKKQKKGLHLTPQPQLAAVVKSSRFGGREGAANTTMERFGLDGGGGGGELPPGFRFHPTDEELITYYLLRKAVDGSFCGRAIAEIDLNKCEPWELPDKAKMGEKEWYFYSLRDRKYPTGLRTNRATVAGYWKATGKDREIRSGRTGALVGMKKTLVFYRGRAPKGQKTHWVMHEYRLEGAYAYHFLPSSTRDEWVIARVFQKPGEVPPAARKHRLGALSSTTGTAAGDSCFSDSTSASIGGASSSSTPGPLFASAAAAVANAGAADGDTSSYCGGAANHGNLVTGRELVPCFSTATINGPLVAAALGIGQPYNAAPLPFEQQPPPPAFLPSLRSLQDNLQLPPFLSAGGLGGGGALHWLPAGGMEVKVEGRSAPPQMAVGPGQLDGAFGWSF

SEQ ID NO: 16902 - protein, 357 aa, Zea mays subsp. mays
  peptide (1)..(357): Ceres Seq. ID no. 12382789
  misc_feature (15)..(143): Pfam Name: No apical meristem (NAM) protein Pfam Description: No apical meristem (NAM) protein
  misc_feature (14)..(200): Homolog of NCBI NO: 30682054 NR Description: NAM (no apical meristem)-related protein
  misc_feature (14)..(200): Homolog of NCBI NO: 30682048 NR Description: NAM (no apical meristem)-related protein
  misc_feature (14)..(185): Homolog of NCBI NO: 21537315 NR Description: NAM, no apical meristem,-like protein
  misc_feature (14)..(185): Homolog of NCBI NO: 15240252 NR Description: NAM, no apical meristem, - like protein
  misc_feature (15)..(293): Homolog of NCBI NO: 15232511 NR Description: NAM-like protein
  misc_feature (15)..(293): Homolog of NCBI NO: 11994506 NR Description: contains similarity to NAM (no apical meristem)
  misc_feature (15)..(167): Homolog of NCBI NO: 1279640 NR Description: NAM [Petunia x hybrida]
  misc_feature (7)..(328): Homolog of NCBI NO: 15238882 NR Description: CUC2 (dbj|BAA19529.1); protein id: At5g53950.1
MERFGLDGGGGGGELPPGFRFHPTDEELITYYLLRKAVDGSFCGRAIAEIDLNKCEPWELPDKAKMGEKEWYFYSLRDRKYPTGLRTNRATVAGYWKATGKDREIRSGRTGALVGMKKTLVFYRGRAPKGQKTHWVMHEYRLEGAYAYHFLPSSTRDEWVIARVFQKPGEVPPAARKHRLGALSSTTGTAAGDSCFSDSTSASIGGASSSSTPGPLFASAAAAVANAGAADGDTSSYCGGAANHGNLVTGRELVPCFSTATINGPLVAAALGIGQPYNAAPLPFEQQPPPPAFLPSLRSLQDNLQLPPFLSAGGLGGGGALHWLPAGGMEVKVEGRSAPPQMAVGPGQLDGAFGWSF

SEQ ID NO: 16903 - protein, 292 aa, Zea mays subsp. mays
  peptide (1)..(292): Ceres Seq. ID no. 12382790
  misc_feature (1)..(78): Pfam Name: No apical meristem (NAM) protein Pfam Description: No apical meristem (NAM) protein
  misc_feature (1)..(135): Homolog of NCBI NO: 30682054 NR Description: NAM (no apical meristem)-related protein
  misc_feature (1)..(135): Homolog of NCBI NO: 30682048 NR Description: NAM (no apical meristem)-related protein
  misc_feature (1)..(120): Homolog of NCBI NO: 21537315 NR Description: NAM, no apical meristem,-like protein
  misc_feature (1)..(120): Homolog of NCBI NO: 15240252 NR Description: NAM, no apical meristem, - like protein
  misc_feature (1)..(228): Homolog of NCBI NO: 15232511 NR Description: NAM-like protein
  misc_feature (1)..(228): Homolog of NCBI NO: 11994506 NR Description: contains similarity to NAM (no apical meristem)
  misc_feature (1)..(102): Homolog of NCBI NO: 1279640 NR Description: NAM [Petunia x hybrida]
  misc_feature (1)..(263): Homolog of NCBI NO: 15238882 NR Description: CUC2 (dbj|BAA19529.1); protein id: At5g53950.1
MGEKEWYFYSLRDRKYPTGLRTNRATVAGYWKATGKDREIRSGRTGALVGMKKTLVFYRGRAPKGQKTHWVMHEYRLEGAYAYHFLPSSTRDEWVIARVFQKPGEVPPAARKHRLGALSSTTGTAAGDSCFSDSTSASIGGASSSSTPGPLFASAAAAVANAGAADGDTSSYCGGAANHGNLVTGRELVPCFSTATINGPLVAAALGIGQPYNAAPLPFEQQPPPPAFLPSLRSLQDNLQLPPFLSAGGLGGGGALHWLPAGGMEVKVEGRSAPPQMAVGPGQLDGAFGWSF

SEQ ID NO: 16904 - DNA, 1143 bp, Zea mays subsp. mays
  misc_feature (1)..(1143): Ceres Seq. ID no. 12350692
  misc_feature: MA Experiment ID: 108504 Result: Down-regulated in Transcription
  misc_feature: MA Experiment 108504 PARAMETER Experiment Name: Zm_Drought_P Parameter: Age (day) Value: 8
  misc_feature: MA Experiment 108504 PARAMETER Experiment Name: Zm_Drought_P Parameter: Organism Value: Zea mays
  misc_feature: MA Experiment 108504 PARAMETER Experiment Name: Zm_Drought_P Parameter: Plant Line Value: 35A19
  misc_feature: MA Experiment 108504 PARAMETER Experiment Name: Zm_Drought_P Parameter: Timepoint (hr) Value: 12
  misc_feature: MA Experiment 108504 PARAMETER Experiment Name: Zm_Drought_P Parameter: Tissue Value: Aerial
  misc_feature: MA Experiment 108504 PARAMETER Experiment Name: Zm_Drought_P Parameter: Treatment Value: Drought vs. No Drought
  misc_feature: MA Experiment ID: 108527 Result: Down-regulated in Transcription
  misc_feature: MA Experiment 108527 PARAMETER Experiment Name: Zm_5mM_NO_P Parameter: Age (day) Value: 8
  misc_feature: MA Experiment 108527 PARAMETER Experiment Name: Zm_5mM_NO_P Parameter: Organism Value: Zea mays
  misc_feature: MA Experiment 108527 PARAMETER Experiment Name: Zm_5mM_NO_P Parameter: Plant Line Value: 35A19
  misc_feature: MA Experiment 108527 PARAMETER Experiment Name: Zm_5mM_NO_P Parameter: Timepoint (hr) Value: 6
  misc_feature: MA Experiment 108527 PARAMETER Experiment Name: Zm_5mM_NO_P Parameter: Tissue Value: Aerial
  misc_feature: MA Experiment 108527 PARAMETER Experiment Name: Zm_5mM_NO_P Parameter: Treatment Value: 5mM NO vs. No Treatment
  misc_feature: MA Experiment ID: 108530 Result: Up-regulated in Transcription
  misc_feature: MA Experiment 108530 PARAMETER Experiment Name: Zm_Imbibed_Seeds_P Parameter: Age (day) Value: 6 vs. 2
  misc_feature: MA Experiment 108530 PARAMETER Experiment Name: Zm_Imbibed_Seeds_P Parameter: Organism Value: Zea mays
  misc_feature: MA Experiment 108530 PARAMETER Experiment Name: Zm_Imbibed_Seeds_P Parameter: Plant Line Value: 35A19
  misc_feature: MA Experiment 108530 PARAMETER Experiment Name: Zm_Imbibed_Seeds_P Parameter: Tissue Value: Aerial vs. Embryo
  misc_feature: MA Experiment ID: 108534 Result: Up-regulated in Transcription
  misc_feature: MA Experiment 108534 PARAMETER Experiment Name: Zm_4deg_Cold_P Parameter: Age (hr) Value: 8
  misc_feature: MA Experiment 108534 PARAMETER Experiment Name: Zm_4deg_Cold_P Parameter: Organism Value: Zea mays
  misc_feature: MA Experiment 108534 PARAMETER Experiment Name: Zm_4deg_Cold_P Parameter: Plant Line Value: 35A19
  misc_feature: MA Experiment 108534 PARAMETER Experiment Name: Zm_4deg_Cold_P Parameter: Temperature (deg C) Value: 4 vs. 22
  misc_feature: MA Experiment 108534 PARAMETER Experiment Name: Zm_4deg_Cold_P Parameter: Timepoint (hr) Value: 6
  misc_feature: MA Experiment 108534 PARAMETER Experiment Name: Zm_4deg_Cold_P Parameter: Tissue Value: Aerial
  misc_feature: MA Experiment ID: 108542 Result: Down-regulated in Transcription
  misc_feature: MA Experiment 108542 PARAMETER Experiment Name: Zm_150mM_NaCl_P Parameter: Age (day) Value: 8
  misc_feature: MA Experiment 108542 PARAMETER Experiment Name: Zm_150mM_NaCl_P Parameter: Organism Value: Zea mays
  misc_feature: MA Experiment 108542 PARAMETER Experiment Name: Zm_150mM_NaCl_P Parameter: Plant Line Value: 35A19
  misc_feature: MA Experiment 108542 PARAMETER Experiment Name: Zm_150mM_NaCl_P Parameter: Timepoint (hr) Value: 6
  misc_feature: MA Experiment 108542 PARAMETER Experiment Name: Zm_150mM_NaCl_P Parameter: Tissue Value: Aerial
  misc_feature: MA Experiment 108542 PARAMETER Experiment Name: Zm_150mM_NaCl_P Parameter: Treatment Value: 150mM NaCl vs. No Treatment
  misc_feature: MA Experiment ID: 108545 Result: Up-regulated in Transcription
  misc_feature: MA Experiment 108545 PARAMETER Experiment Name: Zm_Imbibed_Seeds_P Parameter: Age (day) Value: 3 vs. 2
  misc_feature: MA Experiment 108545 PARAMETER Experiment Name: Zm_Imbibed_Seeds_P Parameter: Organism Value: Zea mays
  misc_feature: MA Experiment 108545 PARAMETER Experiment Name: Zm_Imbibed_Seeds_P Parameter: Plant Line Value: 35A19
  misc_feature: MA Experiment 108545 PARAMETER Experiment Name: Zm_Imbibed_Seeds_P Parameter: Tissue Value: Aerial vs. Embryo
  misc_feature: MA Experiment ID: 108547 Result: Up-regulated in Transcription
  misc_feature: MA Experiment 108547 PARAMETER Experiment Name: Zm_Imbibed_Seeds_P Parameter: Age (day) Value: 4 vs. 2
  misc_feature: MA Experiment 108547 PARAMETER Experiment Name: Zm_Imbibed_Seeds_P Parameter: Organism Value: Zea mays
  misc_feature: MA Experiment 108547 PARAMETER Experiment Name: Zm_Imbibed_Seeds_P Parameter: Plant Line Value: 35A19
  misc_feature: MA Experiment 108547 PARAMETER Experiment Name: Zm_Imbibed_Seeds_P Parameter: Tissue Value: Aerial vs. Embryo
  misc_feature: MA Experiment ID: 108556 Result: Down-regulated in Transcription
  misc_feature: MA Experiment 108556 PARAMETER Experiment Name: Zm_Drought_P Parameter: Age (day) Value: 9
  misc_feature: MA Experiment 108556 PARAMETER Experiment Name: Zm_Drought_P Parameter: Organism Value: Zea mays
  misc_feature: MA Experiment 108556 PARAMETER Experiment Name: Zm_Drought_P Parameter: Plant Line Value: 35A19
  misc_feature: MA Experiment 108556 PARAMETER Experiment Name: Zm_Drought_P Parameter: Timepoint (hr) Value: 24
  misc_feature: MA Experiment 108556 PARAMETER Experiment Name: Zm_Drought_P Parameter: Tissue Value: Aerial
  misc_feature: MA Experiment 108556 PARAMETER Experiment Name: Zm_Drought_P Parameter: Treatment Value: Drought vs. No Drought
  misc_feature: MA Experiment ID: 108559 Result: Down-regulated in Transcription
  misc_feature: MA Experiment 108559 PARAMETER Experiment Name: Zm_5mM_NO_P Parameter: Age (day) Value: 8
  misc_feature: MA Experiment 108559 PARAMETER Experiment Name: Zm_5mM_NO_P Parameter: Organism Value: Zea mays
  misc_feature: MA Experiment 108559 PARAMETER Experiment Name: Zm_5mM_NO_P Parameter: Plant Line Value: 35A19
  misc_feature: MA Experiment 108559 PARAMETER Experiment Name: Zm_5mM_NO_P Parameter: Timepoint (hr) Value: 12
  misc_feature: MA Experiment 108559 PARAMETER Experiment Name: Zm_5mM_NO_P Parameter: Tissue Value: Aerial
  misc_feature: MA Experiment 108559 PARAMETER Experiment Name: Zm_5mM_NO_P Parameter: Treatment Value: 5mM NO vs. No Treatment
  misc_feature: MA Experiment ID: 108687 Result: Down-regulated in Transcription
  misc_feature: MA Experiment 108687 PARAMETER Experiment Name: Zm_Embryos-Flowers__P Parameter: Tissue Value: Embryo vs. Aerial+
  misc_feature: MA Experiment ID: 108688 Result: Down-regulated in Transcription
  misc_feature: MA Experiment 108688 PARAMETER Experiment Name: Zm_Embryos-Flowers__P Parameter: Tissue Value: Immature Flowers vs. Aerial+
  misc_feature: MA Experiment ID: 20000626 Result: Down-regulated in Transcription
  misc_feature: MA Experiment 20000626 PARAMETER Experiment Name: Zm_Herbicide-Treatments_P Parameter: Timepoint (hr) Value: 12
  misc_feature: MA Experiment 20000626 PARAMETER Experiment Name: Zm_Herbicide-Treatments_P Parameter: Tissue Value: Aerial
  misc_feature: MA Experiment 20000626 PARAMETER Experiment Name: Zm_Herbicide-Treatments_P Parameter: Treatment Value: Roundup vs. No Treatment
actcccaccttcttggagacaccgccaggcgccatcttccggccgctgcccgcctgccccccccgggaggtcgaactgccttctagagccctctcctgttttcaggcgaatgtgcaggtagcttgacgtctgatgaacgctcagccatgctgctgatgctacacgaaactcttcctttcgtgaggccgacgagttcttgccgggacccaaaactctccgagaagagtgcctctgctctccacggtaaattgggatgcagtgcggtctgcagttcagcggaaggccatcgtgtacagaagccacacattgttcacagctacaaagttagcttcactaggaccagccatcatctgtgtaaaagcttaaacgagagaactacaaggcactgcctgcatcggttccatgttaatgcttcgcccgatgacgacgacttccgctcgtcgcgtaacatagcgatcagtttgttcaagcggtacaagaatgtcattgaccgaggaggtggagaaaacctaaatgagtttgtcagtgctggagtgaccgcttacgcactagggtgtacagatgaggggcttagaaaggaacttatggatattgaagattctggtctggagattgaaggcttagggtccttggggggcaccagcctcaagttcaaagtccactcctttgagatccgtgagtgcatcctgtggctcagtatagtgttcgtcacaatactgtgcacaccacaactaacagttatcaggtggtctccgaacccaccggtgtcagccgacgtcttgcatcagtggaaaggattctgtgctctaatcgcgaacgcttactatgtcaaaggaatggcatggttgccagtgaaaaccttgcagctggaacagatggctgtcacaggaagttcagagaaaccatcagtagttgctagccgcatgcagttagttttcagcacattagaggtagtcagcccacagtggccaagagtgtgattagatgaaagcaataccatcaaacaaaggtctgcagttttattctgaccaaaagatatgcatgtccaagttagcaagttcaaacctctgtcatggtgcaaacagatgatactatatccatttgaactctaatgtcaaataaaaatgctaatgtacttgttgg

SEQ ID NO: 16905 - protein, 277 aa, Zea mays subsp. mays
  peptide (1)..(277): Ceres Seq. ID no. 12350693
  misc_feature (88)..(277): Homolog of NCBI NO: 15220740 NR Description: unknown protein
  misc_feature (2)..(277): Homolog of NCBI NO: 30017575 NR Description: unknown protein [Oryza sativa (japonica
MLLMLHETLPFVRPTSSCRDPKLSEKSASALHGKLGCSAVCSSAEGHRVQKPHIVHSYKVSFTRTSHHLCKSLNERTTRHCLHRFHVNASPDDDDFRSSRNIAISLFKRYKNVIDRGGGENLNEFVSAGVTAYALGCTDEGLRKELMDIEDSGLEIEGLGSLGGTSLKFKVHSFEIRECILWLSIVFVTILCTPQLTVIRWSPNPPVSADVLHQWKGFCALIANAYYVKGMAWLPVKTLQLEQMAVTGSSEKPSVVASRMQLVFSTLEVVSPQWPRV

SEQ ID NO: 16906 - protein, 274 aa, Zea mays subsp. mays
  peptide (1)..(274): Ceres Seq. ID no. 12350694
  misc_feature (85)..(274): Homolog of NCBI NO: 15220740 NR Description: unknown protein
  misc_feature (1)..(274): Homolog of NCBI NO: 30017575 NR Description: unknown protein [Oryza sativa (japonica
MLHETLPFVRPTSSCRDPKLSEKSASALHGKLGCSAVCSSAEGHRVQKPHIVHSYKVSFTRTSHHLCKSLNERTTRHCLHRFHVNASPDDDDFRSSRNIAISLFKRYKNVIDRGGGENLNEFVSAGVTAYALGCTDEGLRKELMDIEDSGLEIEGLGSLGGTSLKFKVHSFEIRECILWLSIVFVTILCTPQLTVIRWSPNPPVSADVLHQWKGFCALIANAYYVKGMAWLPVKTLQLEQMAVTGSSEKPSVVASRMQLVFSTLEVVSPQWPRV

SEQ ID NO: 16907 - DNA, 1569 bp, Zea mays subsp. mays
  misc_feature (1)..(1569): Ceres Seq. ID no. 12383339
  misc_feature: MA Experiment ID: 108527 Result: Up-regulated in Transcription
  misc_feature: MA Experiment 108527 PARAMETER Experiment Name: Zm_5mM_NO_P Parameter: Age (day) Value: 8
  misc_feature: MA Experiment 108527 PARAMETER Experiment Name: Zm_5mM_NO_P Parameter: Organism Value: Zea mays
  misc_feature: MA Experiment 108527 PARAMETER Experiment Name: Zm_5mM_NO_P Parameter: Plant Line Value: 35A19
  misc_feature: MA Experiment 108527 PARAMETER Experiment Name: Zm_5mM_NO_P Parameter: Timepoint (hr) Value: 6
  misc_feature: MA Experiment 108527 PARAMETER Experiment Name: Zm_5mM_NO_P Parameter: Tissue Value: Aerial
  misc_feature: MA Experiment 108527 PARAMETER Experiment Name: Zm_5mM_NO_P Parameter: Treatment Value: 5mM NO vs. No Treatment
  misc_feature: MA Experiment ID: 108559 Result: Up-regulated in Transcription
  misc_feature: MA Experiment 108559 PARAMETER Experiment Name: Zm_5mM_NO_P Parameter: Age (day) Value: 8
  misc_feature: MA Experiment 108559 PARAMETER Experiment Name: Zm_5mM_NO_P Parameter: Organism Value: Zea mays
  misc_feature: MA Experiment 108559 PARAMETER Experiment Name: Zm_5mM_NO_P Parameter: Plant Line Value: 35A19
  misc_feature: MA Experiment 108559 PARAMETER Experiment Name: Zm_5mM_NO_P Parameter: Timepoint (hr) Value: 12
  misc_feature: MA Experiment 108559 PARAMETER Experiment Name: Zm_5mM_NO_P Parameter: Tissue Value: Aerial
  misc_feature: MA Experiment 108559 PARAMETER Experiment Name: Zm_5mM_NO_P Parameter: Treatment Value: 5mM NO vs. No Treatment
  misc_feature: MA Experiment ID: 108689 Result: Down-regulated in Transcription
  misc_feature: MA Experiment 108689 PARAMETER Experiment Name: Zm_Drought_Roots_P Parameter: Age (day) Value: 9
  misc_feature: MA Experiment 108689 PARAMETER Experiment Name: Zm_Drought_Roots_P Parameter: Organism Value: Zea mays
  misc_feature: MA Experiment 108689 PARAMETER Experiment Name: Zm_Drought_Roots_P Parameter: Plant Line Value: 35A19
  misc_feature: MA Experiment 108689 PARAMETER Experiment Name: Zm_Drought_Roots_P Parameter: Timepoint (hr) Value: 24
  misc_feature: MA Experiment 108689 PARAMETER Experiment Name: Zm_Drought_Roots_P Parameter: Tissue Value: Roots
  misc_feature: MA Experiment 108689 PARAMETER Experiment Name: Zm_Drought_Roots_P Parameter: Treatment Value: Drought vs. No Drought
  misc_feature: MA Experiment ID: 20000492 Result: Down-regulated in Transcription
  misc_feature: MA Experiment 20000492 PARAMETER Experiment Name: Zm_Hybrid_Seed_Dev_P Parameter: DAP Value: 12
  misc_feature: MA Experiment 20000492 PARAMETER Experiment Name: Zm_Hybrid_Seed_Dev_P Parameter: Organism Value: Zea mays
  misc_feature: MA Experiment 20000492 PARAMETER Experiment Name: Zm_Hybrid_Seed_Dev_P Parameter: Plant Line Value: 35A19
  misc_feature: MA Experiment 20000492 PARAMETER Experiment Name: Zm_Hybrid_Seed_Dev_P Parameter: Tissue Value: Fert Kernel vs. Unfert Floret
ctacgccaagcgcgcaattaaccctcactaaagggaacaaaagctggagctccaccgcggtggcggccgctctagaactagtggatcccccgggctgcaggaattcgcacgagaccattacctagaacatcctaatcgaaaaaagttcaggaaaggggagcctcaaaaggagagggagagtgagagggaggggaagtgcgctgcagtgctgcgcagctgcgctggggagaagagaagaaggtgccaaccacttcccaaggagaccgccagctctgctgctgcacgaccgaccagcccgtccactcgcctcgccttcctccgaaccccggcgaggaagaggaacccgccgccgccgccggacgcacttccgatggcgacgccacggaagccgatcaagctcacgctgccgtcccacgagaccaccatcggcaagttcctgacgcacagcgggacgttcacggacggggatctgcgcgtgaacaaggacggcctccgcatcgtctcgcggagggagggaggcgaggctcctcctatagagccactggatagtcaactgagcttagatgatctagacgttataaaagtgatcgggaaaggtagcagtggaaatgtgcaattggtccgccacaaatttactggccagttttttgctctgaaggttattcaactaaatattgatgagagtatacgcaaacagattgccaaggagttgaagataaacttatcaacacagtgccaatatgttgttgtgttctatcagtgtttctatttcaatggcgccatttctattgttttggaatacatggatggtggctcccttgcagatttcctgaagactgttaaaaccattccagaggcctacctcgctgctatctgtacgcagatgctaaaaggactgatctacttgcataacgagaagcgcgttatacaccgagatctgaaaccatcaaatatattgataaatcataggggtgaagtaaaaatatcagattttggtgtgagtgccattatctctagttcctcttcgcaacgagatacatttattggcacacgcaactacatggcgccagaaagaatcgataaagaaacatggttctatgagtgatatctggagtttgggactagtgatactggaatgtgcaaccggcatctttccatttcctccttgtgaaagcttctacgaacttctcgtagctgttgttgatcaaccgccaccttctgcaccaccggatcagttttcaccagaattctgtgcgttcatttctgcatgtctccagaaggatgctaatgacaggtcatcagcacaagccttattggaccatccattcctgagcatgtatgatgacctgcatgtagatcttgcttcgtacttcacgacagcaggatctcccctcgccaccttcaagtcggtgattggctccatcactttacttatatgacatacatgtacagccttttaggataaaaatgagcactgaagttttgcctatctgtatatcggcagcaacgtttggtcatgtttgtttcaccttgtaatgtattgactcagatatgggattggtcattgtc

SEQ ID NO: 16908 - protein, 244 aa, Zea mays subsp. mays
  peptide (1)..(244): Ceres Seq. ID no. 12383340
  misc_feature (67)..(243): Pfam Name: Protein kinase domain Pfam Description: Protein kinase domain
  misc_feature (4)..(244): Homolog of NCBI NO: 12718822 NR Description: NQK1 MAPKK [Nicotiana tabacum]
  misc_feature (7)..(236): Homolog of NCBI NO: 15236108 NR Description: mitogen activated protein kinase kinase (nMAPKK)
  misc_feature (8)..(244): Homolog of NCBI NO: 7434316 NR Description: protein kinase MEK1 - tomato
  misc_feature (8)..(244): Homolog of NCBI NO: 9843771 NR Description: MAP kinase kinase [Lycopersicon esculentum]
  misc_feature (8)..(236): Homolog of NCBI NO: 11259772 NR Description: mitogen-activated protein kinase kinase (EC
  misc_feature (8)..(236): Homolog of NCBI NO: 15233715 NR Description: MAP kinase kinase 2
  misc_feature (8)..(236): Homolog of NCBI NO: 7682432 NR Description: MAP kinase kinase [Nicotiana tabacum]
  misc_feature (8)..(237): Homolog of NCBI NO: 15528441 NR Description: MAP kinase kinase [Medicago sativa subsp. x varia]
  misc_feature (4)..(236): Homolog of NCBI NO: 37625027 NR Description: putative mitogen-activated protein kinase kinase
  misc_feature (6)..(243): Homolog of NCBI NO: 22797196 NR Description: putative mitogen-activated protein kinase kinase
MATPRKPIKLTLPSHETTIGKFLTHSGTFTDGDLRVNKDGLRIVSRREGGEAPPIEPLDSQLSLDDLDVIKVIGKGSSGNVQLVRHKFTGQFFALKVIQLNIDESIRKQIAKELKINLSTQCQYVVVFYQCFYFNGAISIVLEYMDGGSLADFLKTVKTIPEAYLAAICTQMLKGLIYLHNEKRVIHRDLKPSNILINHRGEVKISDFGVSAIISSSSSQRDTFIGTRNYMAPERIDKETWFYE

SEQ ID NO: 16909 - DNA, 1722 bp, Zea mays subsp. mays
  misc_feature (1)..(1722): Ceres Seq. ID no. 12361452
  misc_feature: MA Experiment ID: 108528 Result: Up-regulated in Transcription
  misc_feature: MA Experiment 108528 PARAMETER Experiment Name: Zm_Imbibed_Seeds_P Parameter: Age (day) Value: 5 vs. 2
  misc_feature: MA Experiment 108528 PARAMETER Experiment Name: Zm_Imbibed_Seeds_P Parameter: Organism Value: Zea mays
  misc_feature: MA Experiment 108528 PARAMETER Experiment Name: Zm_Imbibed_Seeds_P Parameter: Plant Line Value: 35A19
  misc_feature: MA Experiment 108528 PARAMETER Experiment Name: Zm_Imbibed_Seeds_P Parameter: Tissue Value: Aerial vs. Embryo
  misc_feature: MA Experiment ID: 108535 Result: Up-regulated in Transcription
  misc_feature: MA Experiment 108535 PARAMETER Experiment Name: Zm_Meristem_P Parameter: Age (day) Value: 8
  misc_feature: MA Experiment 108535 PARAMETER Experiment Name: Zm_Meristem_P Parameter: Organism Value: Zea mays
  misc_feature: MA Experiment 108535 PARAMETER Experiment Name: Zm_Meristem_P Parameter: Plant Line Value: 35A19
  misc_feature: MA Experiment 108535 PARAMETER Experiment Name: Zm_Meristem_P Parameter: Tissue Value: Root Meristem vs. Above Root Meristem
  misc_feature: MA Experiment ID: 108545 Result: Up-regulated in Transcription
  misc_feature: MA Experiment 108545 PARAMETER Experiment Name: Zm_Imbibed_Seeds_P Parameter: Age (day) Value: 3 vs. 2
  misc_feature: MA Experiment 108545 PARAMETER Experiment Name: Zm_Imbibed_Seeds_P Parameter: Organism Value: Zea mays
  misc_feature: MA Experiment 108545 PARAMETER Experiment Name: Zm_Imbibed_Seeds_P Parameter: Plant Line Value: 35A19
  misc_feature: MA Experiment 108545 PARAMETER Experiment Name: Zm_Imbibed_Seeds_P Parameter: Tissue Value: Aerial vs. Embryo
  misc_feature: MA Experiment ID: 108547 Result: Up-regulated in Transcription
  misc_feature: MA Experiment 108547 PARAMETER Experiment Name: Zm_Imbibed_Seeds_P Parameter: Age (day) Value: 4 vs. 2
  misc_feature: MA Experiment 108547 PARAMETER Experiment Name: Zm_Imbibed_Seeds_P Parameter: Organism Value: Zea mays
  misc_feature: MA Experiment 108547 PARAMETER Experiment Name: Zm_Imbibed_Seeds_P Parameter: Plant Line Value: 35A19
  misc_feature: MA Experiment 108547 PARAMETER Experiment Name: Zm_Imbibed_Seeds_P Parameter: Tissue Value: Aerial vs. Embryo
  misc_feature: MA Experiment ID: 20000626 Result: Down-regulated in Transcription
  misc_feature: MA Experiment 20000626 PARAMETER Experiment Name: Zm_Herbicide-Treatments_P Parameter: Timepoint (hr) Value: 12
  misc_feature: MA Experiment 20000626 PARAMETER Experiment Name: Zm_Herbicide-Treatments_P Parameter: Tissue Value: Aerial
  misc_feature: MA Experiment 20000626 PARAMETER Experiment Name: Zm_Herbicide-Treatments_P Parameter: Treatment Value: Roundup vs. No Treatment
gcacgagaccattacctagaacatcctaatcgaaaaaaaaataaaaaaattgggtgtttacaacgaattttaggtcttggccccttgggctcttggtccaagcgattttttttctgtgggccgttgggtccgtggaacatatccgttgcagaagactacagattgcagaagcgctcgctcgctgttgttgctgctgccaactgaagggatgcgagccacggccaccgcaggaggccgtgcggtgttccacctccaacacctctgcccgcgcccgccatggcgagctcttcctcctgctgccaccacgcacctctcccgctccgcgccagcgaggcgagccgaccaccgttgcctccccaaaggtttcttatcaactctagaaccggggatttcaggagtctccttgtgtcggcgtgctcatgcaacatgtagctattctttggatgacaagttacagggagagctagatgatatacagggagaacagagaaagctagaaacagttggtgcgtttcagaaaataccaatggtgatgcctgcaactgatatactaatgtcagcacaaaggaaatctagaaatgtgccaccaacaaagggtatagcaaatattgctaagcgtgaaaggaacaaaggtgcgaaacagcttgatgccttaatgaaagaactttctgtaccgctgagaacatacacagaaaacttcccaaagaggagagatttgcatccttatgagaggtctctcattgagttgacttttggggagggttattatgagcaggttctaggacgtgtagatactctcaggaaaaggattacttctgttggaaagcaacatgcttcagtctgtgctaagtcaacaacaaaacgtgaagcagaggaacgcctcactgagggcagaaagaaactcgaagaggctttccagcatgggaagcacgccattgatgatttagtaaatgtagcaaaggctttgcgttctatgcctgttgttgatctacatattccaacactatgtctagttggatcacccaatgtggggaagtcatctttagtccggatattatcatctggaaaacctgaggtctgcagctacccattcacaacaagagggattctaatgggtcacattgtatctaatcaggaacgttttcaggttacggacactccaggactcctgacaaggcatgatgatgacagaaataacatagagcgattgacactcgctgtcctttcttatctacctattgctgtcctgtatgtgcatgatctatccgaagactgtgggacctcagtggccgatcagtacatcacgtacaagcatattaaggacagattcggtgaccgcctatggcttgatgttatatccaaatgcgatcttttgggaaagaaagagcccataagttttcacgatgctgatgacgatgtagcacggtacagaagattggggccagaaggcgccctccaagtatctgtgcagagcgaaatcggcgtcaaacagcttaaggaaagagtgcatgagctgctgacctctcagatggctcggatcaaatctaccaaggcggagcctgaaacacaggaagtagggactagtgttgtttactgaagtttgacaataataaggattcgaatatcatgctgggtgtccgcgtaaacattcaatgtcgatgatggtaacacattccatctgttgtccttttgtccatttggaaagggtggtcagaattgccc

SEQ ID NO: 16910 - protein, 462 aa, Zea mays subsp. mays
  peptide (1)..(462): Ceres Seq. ID no. 12361453
  misc_feature (259)..(388): Pfam Name: GTP1/OBG family Pfam Description: GTP1/OBG family
  misc_feature (102)..(441): Homolog of NCBI NO: 12847799 NR Description: unnamed protein product [Mus musculus]
  misc_feature (102)..(452): Homolog of NCBI NO: 14521033 NR Description: GTP-BINDING PROTEIN, GTP1/OBG FAMILY [Pyrococcus
  misc_feature (102)..(452): Homolog of NCBI NO: 14591132 NR Description: hypothetical protein [Pyrococcus horikoshii]
  misc_feature (102)..(448): Homolog of NCBI NO: 6912532 NR Description: G protein-binding protein CRFG; GTP-binding
  misc_feature (102)..(448): Homolog of NCBI NO: 34933235 NR Description: similar to GTP-binding protein NGB [Rattus
  misc_feature (102)..(452): Homolog of NCBI NO: 18977867 NR Description: GTP-binding protein, gtp1/obg family
  misc_feature (102)..(448): Homolog of NCBI NO: 28374270 NR Description: similar to G protein-binding protein CRFG [Danio
  misc_feature (97)..(458): Homolog of NCBI NO: 25406691 NR Description: hypothetical protein F23A5.12 [imported] -
  misc_feature (97)..(458): Homolog of NCBI NO: 15220827 NR Description: GTP-binding protein, putative; protein id:
  misc_feature (94)..(454): Homolog of NCBI NO: 34905188 NR Description: putative GTP-binding protein
MRATATAGGRAVFHLQHLCPRPPWRALPPAATTHLSRSAPARRADHRCLPKGFLSTLEPGISGVSLCRRAHATCSYSLDDKLQGELDDIQGEQRKLETVGAFQKIPMVMPATDILMSAQRKSRNVPPTKGIANIAKRERNKGAKQLDALMKELSVPLRTYTENFPKRRDLHPYERSLIELTFGEGYYEQVLGRVDTLRKRITSVGKQHASVCAKSTTKREAEERLTEGRKKLEEAFQHGKHAIDDLVNVAKALRSMPVVDLHIPTLCLVGSPNVGKSSLVRILSSGKPEVCSYPFTTRGILMGHIVSNQERFQVTDTPGLLTRHDDDRNNIERLTLAVLSYLPIAVLYVHDLSEDCGTSVADQYITYKHIKDRFGDRLWLDVISKCDLLGKKEPISFHDADDDVARYRRLGPEGALQVSVQSEIGVKQLKERVHELLTSQMARIKSTKAEPETQEVGTSVVY

SEQ ID NO: 16911 - protein, 356 aa, Zea mays subsp. mays
  peptide (1)..(356): Ceres Seq. ID no. 12361454
  misc_feature (153)..(282): Pfam Name: GTP1/OBG family Pfam Description: GTP1/OBG family
  misc_feature (1)..(342): Homolog of NCBI NO: 6912532 NR Description: G protein-binding protein CRFG; GTP-binding
  misc_feature (1)..(342): Homolog of NCBI NO: 28374270 NR Description: similar to G protein-binding protein CRFG [Danio
  misc_feature (1)..(342): Homolog of NCBI NO: 34933235 NR Description: similar to GTP-binding protein NGB [Rattus
  misc_feature (1)..(346): Homolog of NCBI NO: 18977867 NR Description: GTP-binding protein, gtp1/obg family
  misc_feature (1)..(335): Homolog of NCBI NO: 12847799 NR Description: unnamed protein product [Mus musculus]
  misc_feature (1)..(346): Homolog of NCBI NO: 14521033 NR Description: GTP-BINDING PROTEIN, GTP1/OBG FAMILY [Pyrococcus
  misc_feature (1)..(346): Homolog of NCBI NO: 14591132 NR Description: hypothetical protein [Pyrococcus horikoshii]
  misc_feature (1)..(352): Homolog of NCBI NO: 25406691 NR Description: hypothetical protein F23A5.12 [imported] -
  misc_feature (1)..(352): Homolog of NCBI NO: 15220827 NR Description: GTP-binding protein, putative; protein id:
  misc_feature (1)..(348): Homolog of NCBI NO: 34905188 NR Description: putative GTP-binding protein
MVMPATDILMSAQRKSRNVPPTKGIANIAKRERNKGAKQLDALMKELSVPLRTYTENFPKRRDLHPYERSLIELTFGEGYYEQVLGRVDTLRKRITSVGKQHASVCAKSTTKREAEERLTEGRKKLEEAFQHGKHAIDDLVNVAKALRSMPVVDLHIPTLCLVGSPNVGKSSLVRILSSGKPEVCSYPFTTRGILMGHIVSNQERFQVTDTPGLLTRHDDDRNNIERLTLAVLSYLPIAVLYVHDLSEDCGTSVADQYITYKHIKDRFGDRLWLDVISKCDLLGKKEPISFHDADDDVARYRRLGPEGALQVSVQSEIGVKQLKERVHELLTSQMARIKSTKAEPETQEVGTSVVY

SEQ ID NO: 16912 - protein, 354 aa, Zea mays subsp. mays
  peptide (1)..(354): Ceres Seq. ID no. 12361455
  misc_feature (151)..(280): Pfam Name: GTP1/OBG family Pfam Description: GTP1/OBG family
  misc_feature (1)..(340): Homolog of NCBI NO: 6912532 NR Description: G protein-binding protein CRFG; GTP-binding
  misc_feature (1)..(340): Homolog of NCBI NO: 28374270 NR Description: similar to G protein-binding protein CRFG [Danio
  misc_feature (1)..(340): Homolog of NCBI NO: 34933235 NR Description: similar to GTP-binding protein NGB [Rattus
  misc_feature (1)..(344): Homolog of NCBI NO: 18977867 NR Description: GTP-binding protein, gtp1/obg family
  misc_feature (1)..(333): Homolog of NCBI NO: 12847799 NR Description: unnamed protein product [Mus musculus]
  misc_feature (1)..(344): Homolog of NCBI NO: 14521033 NR Description: GTP-BINDING PROTEIN, GTP1/OBG FAMILY [Pyrococcus
  misc_feature (1)..(344): Homolog of NCBI NO: 14591132 NR Description: hypothetical protein [Pyrococcus horikoshii]
  misc_feature (1)..(350): Homolog of NCBI NO: 25406691 NR Description: hypothetical protein F23A5.12 [imported] -
  misc_feature (1)..(350): Homolog of NCBI NO: 15220827 NR Description: GTP-binding protein, putative; protein id:
  misc_feature (1)..(346): Homolog of NCBI NO: 34905188 NR Description: putative GTP-binding protein
MPATDILMSAQRKSRNVPPTKGIANIAKRERNKGAKQLDALMKELSVPLRTYTENFPKRRDLHPYERSLIELTFGEGYYEQVLGRVDTLRKRITSVGKQHASVCAKSTTKREAEERLTEGRKKLEEAFQHGKHAIDDLVNVAKALRSMPVVDLHIPTLCLVGSPNVGKSSLVRILSSGKPEVCSYPFTTRGILMGHIVSNQERFQVTDTPGLLTRHDDDRNNIERLTLAVLSYLPIAVLYVHDLSEDCGTSVADQYITYKHIKDRFGDRLWLDVISKCDLLGKKEPISFHDADDDVARYRRLGPEGALQVSVQSEIGVKQLKERVHELLTSQMARIKSTKAEPETQEVGTSVVY

SEQ ID NO: 16913 - DNA, 1296 bp, Zea mays subsp. mays
  misc_feature (1)..(1296): Ceres Seq. ID no. 12415205
  misc_feature: MA Experiment ID: 108522 Result: Up-regulated in Transcription
  misc_feature: MA Experiment 108522 PARAMETER Experiment Name: Zm_42deg_Heat_P Parameter: Age (day) Value: 8
  misc_feature: MA Experiment 108522 PARAMETER Experiment Name: Zm_42deg_Heat_P Parameter: Organism Value: Zea mays
  misc_feature: MA Experiment 108522 PARAMETER Experiment Name: Zm_42deg_Heat_P Parameter: Plant Line Value: 35A19
  misc_feature: MA Experiment 108522 PARAMETER Experiment Name: Zm_42deg_Heat_P Parameter: Temperature (deg C) Value: 42 vs. 22
  misc_feature: MA Experiment 108522 PARAMETER Experiment Name: Zm_42deg_Heat_P Parameter: Timepoint (hr) Value: 1
  misc_feature: MA Experiment 108522 PARAMETER Experiment Name: Zm_42deg_Heat_P Parameter: Tissue Value: Aerial
  misc_feature: MA Experiment ID: 108529 Result: Up-regulated in Transcription
  misc_feature: MA Experiment 108529 PARAMETER Experiment Name: Zm_Imbibed_Seeds_P Parameter: Age (day) Value: 5 vs. 2
  misc_feature: MA Experiment 108529 PARAMETER Experiment Name: Zm_Imbibed_Seeds_P Parameter: Organism Value: Zea mays
  misc_feature: MA Experiment 108529 PARAMETER Experiment Name: Zm_Imbibed_Seeds_P Parameter: Plant Line Value: 35A19
  misc_feature: MA Experiment 108529 PARAMETER Experiment Name: Zm_Imbibed_Seeds_P Parameter: Tissue Value: Roots vs. Embryo
  misc_feature: MA Experiment ID: 108546 Result: Up-regulated in Transcription
  misc_feature: MA Experiment 108546 PARAMETER Experiment Name: Zm_Imbibed_Seeds_P Parameter: Age (day) Value: 3 vs. 2
  misc_feature: MA Experiment 108546 PARAMETER Experiment Name: Zm_Imbibed_Seeds_P Parameter: Organism Value: Zea mays
  misc_feature: MA Experiment 108546 PARAMETER Experiment Name: Zm_Imbibed_Seeds_P Parameter: Plant Line Value: 35A19
  misc_feature: MA Experiment 108546 PARAMETER Experiment Name: Zm_Imbibed_Seeds_P Parameter: Tissue Value: Roots vs. Embryo
  misc_feature: MA Experiment ID: 108547 Result: Down-regulated in Transcription
  misc_feature: MA Experiment 108547 PARAMETER Experiment Name: Zm_Imbibed_Seeds_P Parameter: Age (day) Value: 4 vs. 2
  misc_feature: MA Experiment 108547 PARAMETER Experiment Name: Zm_Imbibed_Seeds_P Parameter: Organism Value: Zea mays
  misc_feature: MA Experiment 108547 PARAMETER Experiment Name: Zm_Imbibed_Seeds_P Parameter: Plant Line Value: 35A19
  misc_feature: MA Experiment 108547 PARAMETER Experiment Name: Zm_Imbibed_Seeds_P Parameter: Tissue Value: Aerial vs. Embryo
  misc_feature: MA Experiment ID: 108689 Result: Down-regulated in Transcription
  misc_feature: MA Experiment 108689 PARAMETER Experiment Name: Zm_Drought_Roots_P Parameter: Age (day) Value: 9
  misc_feature: MA Experiment 108689 PARAMETER Experiment Name: Zm_Drought_Roots_P Parameter: Organism Value: Zea mays
  misc_feature: MA Experiment 108689 PARAMETER Experiment Name: Zm_Drought_Roots_P Parameter: Plant Line Value: 35A19
  misc_feature: MA Experiment 108689 PARAMETER Experiment Name: Zm_Drought_Roots_P Parameter: Timepoint (hr) Value: 24
  misc_feature: MA Experiment 108689 PARAMETER Experiment Name: Zm_Drought_Roots_P Parameter: Tissue Value: Roots
  misc_feature: MA Experiment 108689 PARAMETER Experiment Name: Zm_Drought_Roots_P Parameter: Treatment Value: Drought vs. No Drought
  misc_feature: MA Experiment ID: 20000108 Result: Down-regulated in Transcription
  misc_feature: MA Experiment 20000108 PARAMETER Experiment Name: Zm_Root-Tips_P Parameter: Age (day) Value: 12
  misc_feature: MA Experiment 20000108 PARAMETER Experiment Name: Zm_Root-Tips_P Parameter: Organism Value: Zea mays
  misc_feature: MA Experiment 20000108 PARAMETER Experiment Name: Zm_Root-Tips_P Parameter: Tissue Value: Root tips vs. Root mid region    35
  misc_feature: MA Experiment 20000108 PARAMETER Experiment Name: Zm_Root-Tips_P Parameter: Tissue Value: Root tips vs. Root mid region   Sequence Listing-Misc Features (4)
  misc_feature: MA Experiment ID: 20000492 Result: Up-regulated in Transcription
  misc_feature: MA Experiment 20000492 PARAMETER Experiment Name: Zm_Hybrid_Seed_Dev_P Parameter: DAP Value: 12
  misc_feature: MA Experiment 20000492 PARAMETER Experiment Name: Zm_Hybrid_Seed_Dev_P Parameter: Organism Value: Zea mays
  misc_feature: MA Experiment 20000492 PARAMETER Experiment Name: Zm_Hybrid_Seed_Dev_P Parameter: Plant Line Value: 35A19
  misc_feature: MA Experiment 20000492 PARAMETER Experiment Name: Zm_Hybrid_Seed_Dev_P Parameter: Tissue Value: Fert Kernel vs. Unfert Floret
tacgccaagcgcgcaattaaccctcactaaagggaacaaaagctggagctccaccgcggtggcggccgctctagaactagtggatcccccgggctgcaggaattcgcacgagaccattacctagaacatcctaatcaaaaactagtgtgcagaaacatggcgcgaagcagcagcccagctaggatggccatgttgctgctcttgctctcggccctcgcagtgctcttcccacccgccgtggccgacgacctgctctccgtggacttccacgccgcgtcgtgcccgcagctggaccgcatcgtgcgcaccgccgtgcaggccgccctccggagggagatcgcgctcgccgcgggcctcctccgcatcttcttccacgactgcttcccgcagggctgcgacgcgtccgtgctcctcaagggcaacgccacggagcagaccatggggcccaacaccacgctgcagccgcgggcgctgcagctcatcgacgacatccgcgccaaggtgcacgccgcctgcgggcccaccgtgtcctgcgccgacgtcacggcgctcgccacccgcgccgccgtcgtcgcgtcggggggaccctcctaccccgtgcccctgggccagcgcgacagcctcgccccggcgcccgaggacgacgtcaacgcgctcccgtcgcccaccaccgccagcgtcccggagctcctggcggcgttccggggcaggggcatccgcgacgtggccgacctggtcgcgctctccggtgctcacaccgtcgggagggccatctgccccttcttccaggaccgcgccgacagccaggaggatgacttcgccaggcagctcaaggccgactgcgccagggaccccaaccggctgcagcagctggacgtcgtcacgcccgatgccttcgacaacgtctactacaagaacctcaacgccagccggggcgtcttcacgtccgacatggcgctcatcagggaccctacaacggcgccgatcgtcaggtgcttcgcggggagcaaggacgccttcttcgcccagttcgccacctccatggtcaagctcagcaaggtgcccaggaagccccccgggaacgtcggcgagatccgccgccgcagctgcttcaggaccaataacgccaagatgagcatccttgacgtcgacgatgccgtgggcagcttggcggcggcgtctgcccgttgaccaacaccaactattatattacctgctggctgtggctgctgtacgcctgtactgtactaggcgtcgtcggcgccttacgtgtatgtcctgtacgactgttatctt

SEQ ID NO: 16914 - protein, 344 aa, Zea mays subsp. mays
  peptide (1)..(344): Ceres Seq. ID no. 12415206
  misc_feature (49)..(282): Pfam Name: Peroxidase Pfam Description: Peroxidase
  misc_feature (8)..(329): Homolog of NCBI NO: 7433070 NR Description: probable peroxidase (EC 1.11.1.7), cationic -
  misc_feature (8)..(341): Homolog of NCBI NO: 38345506 NR Description: OSJNBa0039K24.4 [Oryza sativa (japonica
  misc_feature (1)..(324): Homolog of NCBI NO: 7433075 NR Description: probable peroxidase (EC 1.11.1.-) 1 precursor,
  misc_feature (27)..(341): Homolog of NCBI NO: 5777625 NR Description: CAA303713.1 protein [Oryza sativa]
  misc_feature (6)..(341): Homolog of NCBI NO: 5777628 NR Description: CAA303716.1 protein [Oryza sativa]
  misc_feature (1)..(339): Homolog of NCBI NO: 38345507 NR Description: OSJNBa0039K24.8 [Oryza sativa (japonica
  misc_feature (1)..(339): Homolog of NCBI NO: 5777627 NR Description: CAA303715.1 protein [Oryza sativa]
  misc_feature (33)..(341): Homolog of NCBI NO: 5777624 NR Description: CAA303712.1 protein [Oryza sativa]
  misc_feature (9)..(341): Homolog of NCBI NO: 38345511 NR Description: OSJNBa0039K24.14 [Oryza sativa (japonica
  misc_feature (8)..(341): Homolog of NCBI NO: 38345508 NR Description: OSJNBa0039K24.10 [Oryza sativa (japonica
MARSSSPARMAMLLLLLSALAVLFPPAVADDLLSVDFHAASCPQLDRIVRTAVQAALRREIALAAGLLRIFFHDCFPQGCDASVLLKGNATEQTMGPNTTLQPRALQLIDDIRAKVHAACGPTVSCADVTALATRAAVVASGGPSYPVPLGQRDSLAPAPEDDVNALPSPTTASVPELLAAFRGRGIRDVADLVALSGAHTVGRAICPFFQDRADSQEDDFARQLKADCARDPNRLQQLDVVTPDAFDNVYYKNLNASRGVFTSDMALIRDPTTAPIVRCFAGSKDAFFAQFATSMVKLSKVPRKPPGNVGEIRRRSCFRTNNAKMSILDVDDAVGSLAAASAR

SEQ ID NO: 16915 - protein, 335 aa, Zea mays subsp. mays
  peptide (1)..(335): Ceres Seq. ID no. 12415207
  misc_feature (40)..(273): Pfam Name: Peroxidase Pfam Description: Peroxidase
  misc_feature (1)..(320): Homolog of NCBI NO: 7433070 NR Description: probable peroxidase (EC 1.11.1.7), cationic -
  misc_feature (1)..(332): Homolog of NCBI NO: 38345506 NR Description: OSJNBa0039K24.4 [Oryza sativa (japonica
  misc_feature (1)..(315): Homolog of NCBI NO: 7433075 NR Description: probable peroxidase (EC 1.11.1.-) 1 precursor,
  misc_feature (18)..(332): Homolog of NCBI NO: 5777625 NR Description: CAA303713.1 protein [Oryza sativa]
  misc_feature (1)..(332): Homolog of NCBI NO: 5777628 NR Description: CAA303716.1 protein [Oryza sativa]
  misc_feature (1)..(330): Homolog of NCBI NO: 38345507 NR Description: OSJNBa0039K24.8 [Oryza sativa (japonica
  misc_feature (1)..(330): Homolog of NCBI NO: 5777627 NR Description: CAA303715.1 protein [Oryza sativa]
  misc_feature (24)..(332): Homolog of NCBI NO: 5777624 NR Description: CAA303712.1 protein [Oryza sativa]
  misc_feature (1)..(332): Homolog of NCBI NO: 38345511 NR Description: OSJNBa0039K24.14 [Oryza sativa (japonica
  misc_feature (1)..(332): Homolog of NCBI NO: 38345508 NR Description: OSJNBa0039K24.10 [Oryza sativa (japonica
MAMLLLLLSALAVLFPPAVADDLLSVDFHAASCPQLDRIVRTAVQAALRREIALAAGLLRIFFHDCFPQGCDASVLLKGNATEQTMGPNTTLQPRALQLIDDIRAKVHAACGPTVSCADVTALATRAAVVASGGPSYPVPLGQRDSLAPAPEDDVNALPSPTTASVPELLAAFRGRGIRDVADLVALSGAHTVGRAICPFFQDRADSQEDDFARQLKADCARDPNRLQQLDVVTPDAFDNVYYKNLNASRGVFTSDMALIRDPTTAPIVRCFAGSKDAFFAQFATSMVKLSKVPRKPPGNVGEIRRRSCFRTNNAKMSILDVDDAVGSLAAASAR

SEQ ID NO: 16916 - protein, 333 aa, Zea mays subsp. mays
  peptide (1)..(333): Ceres Seq. ID no. 12415208
  misc_feature (38)..(271): Pfam Name: Peroxidase Pfam Description: Peroxidase
  misc_feature (1)..(318): Homolog of NCBI NO: 7433070 NR Description: probable peroxidase (EC 1.11.1.7), cationic -
  misc_feature (1)..(330): Homolog of NCBI NO: 38345506 NR Description: OSJNBa0039K24.4 [Oryza sativa (japonica
  misc_feature (1)..(313): Homolog of NCBI NO: 7433075 NR Description: probable peroxidase (EC 1.11.1.-) 1 precursor,
  misc_feature (16)..(330): Homolog of NCBI NO: 5777625 NR Description: CAA303713.1 protein [Oryza sativa]
  misc_feature (1)..(330): Homolog of NCBI NO: 5777628 NR Description: CAA303716.1 protein [Oryza sativa]
  misc_feature (1)..(328): Homolog of NCBI NO: 38345507 NR Description: OSJNBa0039K24.8 [Oryza sativa (japonica
  misc_feature (1)..(328): Homolog of NCBI NO: 5777627 NR Description: CAA303715.1 protein [Oryza sativa]
  misc_feature (22)..(330): Homolog of NCBI NO: 5777624 NR Description: CAA303712.1 protein [Oryza sativa]
  misc_feature (1)..(330): Homolog of NCBI NO: 38345511 NR Description: OSJNBa0039K24.14 [Oryza sativa (japonica
  misc_feature (1)..(330): Homolog of NCBI NO: 38345508 NR Description: OSJNBa0039K24.10 [Oryza sativa (japonica
MLLLLLSALAVLFPPAVADDLLSVDFHAASCPQLDRIVRTAVQAALRREIALAAGLLRIFFHDCFPQGCDASVLLKGNATEQTMGPNTTLQPRALQLIDDIRAKVHAACGPTVSCADVTALATRAAVVASGGPSYPVPLGQRDSLAPAPEDDVNALPSPTTASVPELLAAFRGRGIRDVADLVALSGAHTVGRAICPFFQDRADSQEDDFARQLKADCARDPNRLQQLDVVTPDAFDNVYYKNLNASRGVFTSDMALIRDPTTAPIVRCFAGSKDAFFAQFATSMVKLSKVPRKPPGNVGEIRRRSCFRTNNAKMSILDVDDAVGSLAAASAR

SEQ ID NO: 16917 - DNA, 931 bp, Zea mays subsp. mays
  misc_feature (1)..(931): Ceres Seq. ID no. 13622442
  misc_feature: MA Experiment ID: 108515 Result: Up-regulated in Transcription
  misc_feature: MA Experiment 108515 PARAMETER Experiment Name: Zm_2mM_SA_P Parameter: Age (day) Value: 8
  misc_feature: MA Experiment 108515 PARAMETER Experiment Name: Zm_2mM_SA_P Parameter: Organism Value: Zea mays
  misc_feature: MA Experiment 108515 PARAMETER Experiment Name: Zm_2mM_SA_P Parameter: Plant Line Value: 35A19
  misc_feature: MA Experiment 108515 PARAMETER Experiment Name: Zm_2mM_SA_P Parameter: Timepoint (hr) Value: 12
  misc_feature: MA Experiment 108515 PARAMETER Experiment Name: Zm_2mM_SA_P Parameter: Tissue Value: Aerial
  misc_feature: MA Experiment 108515 PARAMETER Experiment Name: Zm_2mM_SA_P Parameter: Treatment Value: 2mM SA vs. No Treatment
  misc_feature: MA Experiment ID: 108522 Result: Down-regulated in Transcription
  misc_feature: MA Experiment 108522 PARAMETER Experiment Name: Zm_42deg_Heat_P Parameter: Age (day) Value: 8
  misc_feature: MA Experiment 108522 PARAMETER Experiment Name: Zm_42deg_Heat_P Parameter: Organism Value: Zea mays
  misc_feature: MA Experiment 108522 PARAMETER Experiment Name: Zm_42deg_Heat_P Parameter: Plant Line Value: 35A19
  misc_feature: MA Experiment 108522 PARAMETER Experiment Name: Zm_42deg_Heat_P Parameter: Temperature (deg C) Value: 42 vs. 22
  misc_feature: MA Experiment 108522 PARAMETER Experiment Name: Zm_42deg_Heat_P Parameter: Timepoint (hr) Value: 1
  misc_feature: MA Experiment 108522 PARAMETER Experiment Name: Zm_42deg_Heat_P Parameter: Tissue Value: Aerial
  misc_feature: MA Experiment ID: 108523 Result: Down-regulated in Transcription
  misc_feature: MA Experiment 108523 PARAMETER Experiment Name: Zm_42deg_Heat_P Parameter: Age (day) Value: 8
  misc_feature: MA Experiment 108523 PARAMETER Experiment Name: Zm_42deg_Heat_P Parameter: Organism Value: Zea mays
  misc_feature: MA Experiment 108523 PARAMETER Experiment Name: Zm_42deg_Heat_P Parameter: Plant Line Value: 35A19
  misc_feature: MA Experiment 108523 PARAMETER Experiment Name: Zm_42deg_Heat_P Parameter: Temperature (deg C) Value: 42 vs. 22
  misc_feature: MA Experiment 108523 PARAMETER Experiment Name: Zm_42deg_Heat_P Parameter: Timepoint (hr) Value: 6
  misc_feature: MA Experiment 108523 PARAMETER Experiment Name: Zm_42deg_Heat_P Parameter: Tissue Value: Aerial
  misc_feature: MA Experiment ID: 108526 Result: Up-regulated in Transcription
  misc_feature: MA Experiment 108526 PARAMETER Experiment Name: Zm_5mM_NO_P Parameter: Age (day) Value: 8
  misc_feature: MA Experiment 108526 PARAMETER Experiment Name: Zm_5mM_NO_P Parameter: Organism Value: Zea mays
  misc_feature: MA Experiment 108526 PARAMETER Experiment Name: Zm_5mM_NO_P Parameter: Plant Line Value: 35A19
  misc_feature: MA Experiment 108526 PARAMETER Experiment Name: Zm_5mM_NO_P Parameter: Timepoint (hr) Value: 1
  misc_feature: MA Experiment 108526 PARAMETER Experiment Name: Zm_5mM_NO_P Parameter: Tissue Value: Aerial
  misc_feature: MA Experiment 108526 PARAMETER Experiment Name: Zm_5mM_NO_P Parameter: Treatment Value: 5mM NO vs. No Treatment
  misc_feature: MA Experiment ID: 108527 Result: Up-regulated in Transcription
  misc_feature: MA Experiment 108527 PARAMETER Experiment Name: Zm_5mM_NO_P Parameter: Age (day) Value: 8
  misc_feature: MA Experiment 108527 PARAMETER Experiment Name: Zm_5mM_NO_P Parameter: Organism Value: Zea mays
  misc_feature: MA Experiment 108527 PARAMETER Experiment Name: Zm_5mM_NO_P Parameter: Plant Line Value: 35A19
  misc_feature: MA Experiment 108527 PARAMETER Experiment Name: Zm_5mM_NO_P Parameter: Timepoint (hr) Value: 6
  misc_feature: MA Experiment 108527 PARAMETER Experiment Name: Zm_5mM_NO_P Parameter: Tissue Value: Aerial
  misc_feature: MA Experiment 108527 PARAMETER Experiment Name: Zm_5mM_NO_P Parameter: Treatment Value: 5mM NO vs. No Treatment
  misc_feature: MA Experiment ID: 108528 Result: Down-regulated in Transcription
  misc_feature: MA Experiment 108528 PARAMETER Experiment Name: Zm_Imbibed_Seeds_P Parameter: Age (day) Value: 5 vs. 2
  misc_feature: MA Experiment 108528 PARAMETER Experiment Name: Zm_Imbibed_Seeds_P Parameter: Organism Value: Zea mays
  misc_feature: MA Experiment 108528 PARAMETER Experiment Name: Zm_Imbibed_Seeds_P Parameter: Plant Line Value: 35A19
  misc_feature: MA Experiment 108528 PARAMETER Experiment Name: Zm_Imbibed_Seeds_P Parameter: Tissue Value: Aerial vs. Embryo
  misc_feature: MA Experiment ID: 108530 Result: Down-regulated in Transcription
  misc_feature: MA Experiment 108530 PARAMETER Experiment Name: Zm_Imbibed_Seeds_P Parameter: Age (day) Value: 6 vs. 2
  misc_feature: MA Experiment 108530 PARAMETER Experiment Name: Zm_Imbibed_Seeds_P Parameter: Organism Value: Zea mays
  misc_feature: MA Experiment 108530 PARAMETER Experiment Name: Zm_Imbibed_Seeds_P Parameter: Plant Line Value: 35A19
  misc_feature: MA Experiment 108530 PARAMETER Experiment Name: Zm_Imbibed_Seeds_P Parameter: Tissue Value: Aerial vs. Embryo
  misc_feature: MA Experiment ID: 108535 Result: Down-regulated in Transcription
  misc_feature: MA Experiment 108535 PARAMETER Experiment Name: Zm_Meristem_P Parameter: Age (day) Value: 8
  misc_feature: MA Experiment 108535 PARAMETER Experiment Name: Zm_Meristem_P Parameter: Organism Value: Zea mays
  misc_feature: MA Experiment 108535 PARAMETER Experiment Name: Zm_Meristem_P Parameter: Plant Line Value: 35A19
  misc_feature: MA Experiment 108535 PARAMETER Experiment Name: Zm_Meristem_P Parameter: Tissue Value: Root Meristem vs. Above Root Meristem
  misc_feature: MA Experiment ID: 108536 Result: Up-regulated in Transcription
  misc_feature: MA Experiment 108536 PARAMETER Experiment Name: Zm_Meristem_P Parameter: Age (day) Value: 8
  misc_feature: MA Experiment 108536 PARAMETER Experiment Name: Zm_Meristem_P Parameter: Organism Value: Zea mays
  misc_feature: MA Experiment 108536 PARAMETER Experiment Name: Zm_Meristem_P Parameter: Plant Line Value: 35A19
  misc_feature: MA Experiment 108536 PARAMETER Experiment Name: Zm_Meristem_P Parameter: Tissue Value: Shoot Meristem vs. Above Shoot Meristem
  misc_feature: MA Experiment ID: 108544 Result: Up-regulated in Transcription
  misc_feature: MA Experiment ID: 108545 Result: Down-regulated in Transcription
  misc_feature: MA Experiment 108545 PARAMETER Experiment Name: Zm_Imbibed_Seeds_P Parameter: Age (day) Value: 3 vs. 2
  misc_feature: MA Experiment 108545 PARAMETER Experiment Name: Zm_Imbibed_Seeds_P Parameter: Organism Value: Zea mays
  misc_feature: MA Experiment 108545 PARAMETER Experiment Name: Zm_Imbibed_Seeds_P Parameter: Plant Line Value: 35A19
  misc_feature: MA Experiment 108545 PARAMETER Experiment Name: Zm_Imbibed_Seeds_P Parameter: Tissue Value: Aerial vs. Embryo
  misc_feature: MA Experiment ID: 108546 Result: Up-regulated in Transcription
  misc_feature: MA Experiment 108546 PARAMETER Experiment Name: Zm_Imbibed_Seeds_P Parameter: Age (day) Value: 3 vs. 2
  misc_feature: MA Experiment 108546 PARAMETER Experiment Name: Zm_Imbibed_Seeds_P Parameter: Organism Value: Zea mays
  misc_feature: MA Experiment 108546 PARAMETER Experiment Name: Zm_Imbibed_Seeds_P Parameter: Plant Line Value: 35A19
  misc_feature: MA Experiment 108546 PARAMETER Experiment Name: Zm_Imbibed_Seeds_P Parameter: Tissue Value: Roots vs. Embryo
  misc_feature: MA Experiment ID: 108547 Result: Down-regulated in Transcription
  misc_feature: MA Experiment 108547 PARAMETER Experiment Name: Zm_Imbibed_Seeds_P Parameter: Age (day) Value: 4 vs. 2
  misc_feature: MA Experiment 108547 PARAMETER Experiment Name: Zm_Imbibed_Seeds_P Parameter: Organism Value: Zea mays
  misc_feature: MA Experiment 108547 PARAMETER Experiment Name: Zm_Imbibed_Seeds_P Parameter: Plant Line Value: 35A19
  misc_feature: MA Experiment 108547 PARAMETER Experiment Name: Zm_Imbibed_Seeds_P Parameter: Tissue Value: Aerial vs. Embryo
  misc_feature: MA Experiment ID: 108556 Result: Down-regulated in Transcription
  misc_feature: MA Experiment 108556 PARAMETER Experiment Name: Zm_Drought_P Parameter: Age (day) Value: 9
  misc_feature: MA Experiment 108556 PARAMETER Experiment Name: Zm_Drought_P Parameter: Organism Value: Zea mays
  misc_feature: MA Experiment 108556 PARAMETER Experiment Name: Zm_Drought_P Parameter: Plant Line Value: 35A19
  misc_feature: MA Experiment 108556 PARAMETER Experiment Name: Zm_Drought_P Parameter: Timepoint (hr) Value: 24
  misc_feature: MA Experiment 108556 PARAMETER Experiment Name: Zm_Drought_P Parameter: Tissue Value: Aerial
  misc_feature: MA Experiment 108556 PARAMETER Experiment Name: Zm_Drought_P Parameter: Treatment Value: Drought vs. No Drought
  misc_feature: MA Experiment ID: 20000108 Result: Down-regulated in Transcription
  misc_feature: MA Experiment 20000108 PARAMETER Experiment Name: Zm_Root-Tips_P Parameter: Age (day) Value: 12
  misc_feature: MA Experiment 20000108 PARAMETER Experiment Name: Zm_Root-Tips_P Parameter: Organism Value: Zea mays
  misc_feature: MA Experiment 20000108 PARAMETER Experiment Name: Zm_Root-Tips_P Parameter: Tissue Value: Root tips vs. Root mid region    35
  misc_feature: MA Experiment 20000108 PARAMETER Experiment Name: Zm_Root-Tips_P Parameter: Tissue Value: Root tips vs. Root mid region   Sequence Listing-Misc Features (4)
  misc_feature: MA Experiment ID: 20000477 Result: Up-regulated in Transcription
  misc_feature: MA Experiment 20000477 PARAMETER Experiment Name: Zm_5mM_SA_P Parameter: Age (day) Value: 10
  misc_feature: MA Experiment 20000477 PARAMETER Experiment Name: Zm_5mM_SA_P Parameter: Organism Value: Zea mays
  misc_feature: MA Experiment 20000477 PARAMETER Experiment Name: Zm_5mM_SA_P Parameter: Plant Line Value: 35A19
  misc_feature: MA Experiment 20000477 PARAMETER Experiment Name: Zm_5mM_SA_P Parameter: Timepoint (hr) Value: 48
  misc_feature: MA Experiment 20000477 PARAMETER Experiment Name: Zm_5mM_SA_P Parameter: Tissue Value: Aerial
  misc_feature: MA Experiment 20000477 PARAMETER Experiment Name: Zm_5mM_SA_P Parameter: Treatment Value: 5mM SA vs. No Treatment
  misc_feature: MA Experiment ID: 20000478 Result: Up-regulated in Transcription
  misc_feature: MA Experiment 20000478 PARAMETER Experiment Name: Zm_5mM_SA_P Parameter: Age (day) Value: 11
  misc_feature: MA Experiment 20000478 PARAMETER Experiment Name: Zm_5mM_SA_P Parameter: Organism Value: Zea mays
  misc_feature: MA Experiment 20000478 PARAMETER Experiment Name: Zm_5mM_SA_P Parameter: Plant Line Value: 35A19
  misc_feature: MA Experiment 20000478 PARAMETER Experiment Name: Zm_5mM_SA_P Parameter: Timepoint (hr) Value: 72
  misc_feature: MA Experiment 20000478 PARAMETER Experiment Name: Zm_5mM_SA_P Parameter: Tissue Value: Aerial
  misc_feature: MA Experiment 20000478 PARAMETER Experiment Name: Zm_5mM_SA_P Parameter: Treatment Value: 5mM SA vs. No Treatment
  misc_feature: MA Experiment ID: 20000480 Result: Down-regulated in Transcription
  misc_feature: MA Experiment 20000480 PARAMETER Experiment Name: Zm_Drought_P Parameter: Age (day) Value: 11
  misc_feature: MA Experiment 20000480 PARAMETER Experiment Name: Zm_Drought_P Parameter: Organism Value: Zea mays
  misc_feature: MA Experiment 20000480 PARAMETER Experiment Name: Zm_Drought_P Parameter: Plant Line Value: 35A19
  misc_feature: MA Experiment 20000480 PARAMETER Experiment Name: Zm_Drought_P Parameter: Timepoint (hr) Value: 72
  misc_feature: MA Experiment 20000480 PARAMETER Experiment Name: Zm_Drought_P Parameter: Tissue Value: Aerial
  misc_feature: MA Experiment 20000480 PARAMETER Experiment Name: Zm_Drought_P Parameter: Treatment Value: Drought vs. No Drought
  misc_feature: MA Experiment ID: 20000488 Result: Down-regulated in Transcription
  misc_feature: MA Experiment 20000488 PARAMETER Experiment Name: Zm_50mM_NH4NO3_L_to_H_P Parameter: Organism Value: Zea mays
  misc_feature: MA Experiment 20000488 PARAMETER Experiment Name: Zm_50mM_NH4NO3_L_to_H_P Parameter: Timepoint (hr) Value: 8
  misc_feature: MA Experiment 20000488 PARAMETER Experiment Name: Zm_50mM_NH4NO3_L_to_H_P Parameter: Tissue Value: Leaves
  misc_feature: MA Experiment 20000488 PARAMETER Experiment Name: Zm_50mM_NH4NO3_L_to_H_P Parameter: Treatment Value: 50mM NH4NO3 vs. 100mM Mannitol
  misc_feature: MA Experiment ID: 20001608 Result: Down-regulated in Transcription
  misc_feature: MA Experiment 20001608 PARAMETER Experiment Name: Zm_50ppm_KNO3_L-to-H_P Parameter: Age (day) Value: 21
  misc_feature: MA Experiment 20001608 PARAMETER Experiment Name: Zm_50ppm_KNO3_L-to-H_P Parameter: Organism Value: Zea mays
  misc_feature: MA Experiment 20001608 PARAMETER Experiment Name: Zm_50ppm_KNO3_L-to-H_P Parameter: Plant Line Value: 35A19
  misc_feature: MA Experiment 20001608 PARAMETER Experiment Name: Zm_50ppm_KNO3_L-to-H_P Parameter: Timepoint (hr) Value: 48
  misc_feature: MA Experiment 20001608 PARAMETER Experiment Name: Zm_50ppm_KNO3_L-to-H_P Parameter: Tissue Value: Shoots
  misc_feature: MA Experiment 20001608 PARAMETER Experiment Name: Zm_50ppm_KNO3_L-to-H_P Parameter: Treatment Value: 50ppm KNO3 vs. 50ppm KCl
aggatatgtcacgactcacgacgacggaaacagtagtgctgccagtagagagctctcagaactcgggaaaaaaatgtcagaggccgccgtgcgtgtgatcggcctatggccgagcccgttcgtgatccgcgtcctgatcgccctgaagctgaagggcgtcgagttcgagttcgtggaggaggtggtgggcaggaagagcgagctgctgctgaggtcgaacccggtgcacaagaagatccccgtcctgctccaccacggcaagcccatctccgagtctctgatcgtcgtccagtacatcgacgaggtctggtcctccggcgcgccggccttcctccccgtcgacgctcacgcccgcgccgtccagcggttctgggcgcagtacgtcgacgacaagctgccttgggcgatccgcatactgaagggaacggacgacgggggcatggagcaggcggcggggcagctgtccgcggccctgcagctcctagaggaggctttcgcgcagctcagccaggggaagcgctacttcggcggggacagcgtcgggtacctggacatcgctctggtgtcgcatgtcggctgggtgaaggcggtggagaagatcgccggggtcaccctgctggacaaggccaaggtcccgaacctggtggcgtgggctgatcgtctgtgtgcccacccggccgtggtcgacgccatccctgacgcggacaagttcgttgagttcagcgtcacctatggctccttttcgaagcctatcaatgctcccgccaagtgagcaaaaagggtccgtgcatgctttcgtcattttcactttcactgcgcgtgtgccggtgcgtgtcaaaattgcatagcaaggggattcttctcccacatagatcttcttgtgatcatagtcaccaaatcagctctgaaaatgaagattttctgcccttcc

SEQ ID NO: 16918 - protein, 256 aa, Zea mays subsp. mays
  peptide (1)..(256): Ceres Seq. ID no. 13622443
  misc_feature (30)..(241): Homolog of NCBI NO: 37536352 NR Description: putative glutathione S-transferase
  misc_feature (30)..(252): Homolog of NCBI NO: 6652870 NR Description: glutathione S-transferase 1 [Papaver somniferum]
  misc_feature (27)..(241): Homolog of NCBI NO: 22022398 NR Description: glutathione-S-transferase Cla47 [Triticum
  misc_feature (32)..(241): Homolog of NCBI NO: 11385495 NR Description: glutathione S-transferase GST 22 [Zea mays]
  misc_feature (26)..(240): Homolog of NCBI NO: 9957262 NR Description: unknown [Petroselinum crispum]
  misc_feature (42)..(241): Homolog of NCBI NO: 37535432 NR Description: putative glutathione S-transferase
  misc_feature (19)..(254): Homolog of NCBI NO: 37536248 NR Description: putative glutathione S-transferase
  misc_feature (29)..(256): Homolog of NCBI NO: 37536246 NR Description: putative glutathione S-transferase
  misc_feature (25)..(248): Homolog of NCBI NO: 11385519 NR Description: glutathione S-transferase GST 34 [Zea mays]
  misc_feature (25)..(256): Homolog of NCBI NO: 11385513 NR Description: glutathione S-transferase GST 31 [Zea mays]
GYVTTHDDGNSSAASRELSELGKKMSEAAVRVIGLWPSPFVIRVLIALKLKGVEFEFVEEVVGRKSELLLRSNPVHKKIPVLLHHGKPISESLIVVQYIDEVWSSGAPAFLPVDAHARAVQRFWAQYVDDKLPWAIRILKGTDDGGMEQAAGQLSAALQLLEEAFAQLSQGKRYFGGDSVGYLDIALVSHVGWVKAVEKIAGVTLLDKAKVPNLVAWADRLCAHPAVVDAIPDADKFVEFSVTYGSFSKPINAPAK

SEQ ID NO: 16919 - protein, 232 aa, Zea mays subsp. mays
  peptide (1)..(232): Ceres Seq. ID no. 13622444
  misc_feature (6)..(217): Homolog of NCBI NO: 37536352 NR Description: putative glutathione S-transferase
  misc_feature (6)..(228): Homolog of NCBI NO: 6652870 NR Description: glutathione S-transferase 1 [Papaver somniferum]
  misc_feature (3)..(217): Homolog of NCBI NO: 22022398 NR Description: glutathione-S-transferase Cla47 [Triticum
  misc_feature (8)..(217): Homolog of NCBI NO: 11385495 NR Description: glutathione S-transferase GST 22 [Zea mays]
  misc_feature (2)..(216): Homolog of NCBI NO: 9957262 NR Description: unknown [Petroselinum crispum]
  misc_feature (18)..(217): Homolog of NCBI NO: 37535432 NR Description: putative glutathione S-transferase
  misc_feature (1)..(230): Homolog of NCBI NO: 37536248 NR Description: putative glutathione S-transferase
  misc_feature (5)..(232): Homolog of NCBI NO: 37536246 NR Description: putative glutathione S-transferase
  misc_feature (1)..(224): Homolog of NCBI NO: 11385519 NR Description: glutathione S-transferase GST 34 [Zea mays]
  misc_feature (1)..(232): Homolog of NCBI NO: 11385513 NR Description: glutathione S-transferase GST 31 [Zea mays]
MSEAAVRVIGLWPSPFVIRVLIALKLKGVEFEFVEEVVGRKSELLLRSNPVHKKIPVLLHHGKPISESLIVVQYIDEVWSSGAPAFLPVDAHARAVQRFWAQYVDDKLPWAIRILKGTDDGGMEQAAGQLSAALQLLEEAFAQLSQGKRYFGGDSVGYLDIALVSHVGWVKAVEKIAGVTLLDKAKVPNLVAWADRLCAHPAVVDAIPDADKFVEFSVTYGSFSKPINAPAK

SEQ ID NO: 16920 - protein, 183 aa, Zea mays subsp. mays
  peptide (1)..(183): Ceres Seq. ID no. 13622445
MAEPVRDPRPDRPEAEGRRVRVRGGGGGQEERAAAEVEPGAQEDPRPAPPRQAHLRVSDRRPVHRRGLVLRRAGLPPRRRSRPRRPAVLGAVRRRQAALGDPHTEGNGRRGHGAGGGAAVRGPAAPRGGFRAAQPGEALLRRGQRRVPGHRSGVACRLGEGGGEDRRGHPAGQGQGPEPGGVG

SEQ ID NO: 16921 - DNA, 1956 bp, Zea mays subsp. mays
  misc_feature (1)..(1956): Ceres Seq. ID no. 12358907
  misc_feature: MA Experiment ID: 108527 Result: Up-regulated in Transcription
  misc_feature: MA Experiment 108527 PARAMETER Experiment Name: Zm_5mM_NO_P Parameter: Age (day) Value: 8
  misc_feature: MA Experiment 108527 PARAMETER Experiment Name: Zm_5mM_NO_P Parameter: Organism Value: Zea mays
  misc_feature: MA Experiment 108527 PARAMETER Experiment Name: Zm_5mM_NO_P Parameter: Plant Line Value: 35A19
  misc_feature: MA Experiment 108527 PARAMETER Experiment Name: Zm_5mM_NO_P Parameter: Timepoint (hr) Value: 6
  misc_feature: MA Experiment 108527 PARAMETER Experiment Name: Zm_5mM_NO_P Parameter: Tissue Value: Aerial
  misc_feature: MA Experiment 108527 PARAMETER Experiment Name: Zm_5mM_NO_P Parameter: Treatment Value: 5mM NO vs. No Treatment
agctgtaattttttagagtccctctcaaactttgcttgcttgcgctctccatatatcctgtggaccggagaggatgctctgatctacctgtctgttcttcgatcgagtctgagagatttgggaggaggagggaaacaaagcgaaagagcccatcttttttgtctttttggttcggtttcgtggttgcttcttttggaccccgcggaggagcccaccgtttctacaaaaacccaatctttgctgccttctcagcggtcgagatcgataggtttccagatctgaggctccgtgttctggctgtgagatcggaggcgcagcaatccgagcacgcagctagtagggaaagtatccgagaaaagttgcagattttgctgggggcaacggagcgagaacaagttactgcagaaggaaagggcaaaggtgggggaggcgccggagatgagggatgctatcagctctgatggattatttgaaatcttgctggggtccggcatcaccggctgggcgtccccgcaaaggatcggatgccaccggccgccaggacgggctcctgtggtacaaggacggcgggcaggtcgtcgatggtgagttctccatggccgtggtccaggccaataacctattggaggaccatagccaggttgaatccgggccgcttagcacatcggagcctggactgcaaggcaccttcgtcggggtctacgatgggcacggtggcccggagacagcgcgttacatcaatgaccatctcttcaaccacttgaggagattcgcatctgagcacaagtgcatgtcagcggatgtgattcggaaggtattccgagcgactgaggagggtttcatttctgtggttagtaaccaatggtcattgagacctcaattagcagctgtaggctcttgctgtctagttggtgtggtttgcagcggaactctatatgttgcaaaccttggggactcccgtgctgttctggggagacttgtcaagggaactggggaggttttggcaatgcagctctcagcagaacacaatgcatcctatgtggaggttagacgagagctgcaggcatcacatcctgatgatccccatattgtggtcctaaaacacaatgtttggcgtgtaaagggtattatccagataacaaggtcaattggagatgtgtatctgaagaaaccagaatttaatagagaacctttgcacagcaagtttcgtcttcaggaaacttttaggagaccacttcttagttctgatccagcaattactgtccaccaaatacagccaactgataagttcatcatttttgcatctgatggactctgggaacatcttagtaatcaggaagtggttgacatggtccaaagtagcccgcgtaatggaatcgcacgaaagttagtaaagtctgcagtgcaggaagcagcgaagaagagggagatgcggtattcagacctcaagaaagttgatcggggggtgaggcggcacttccacgacgatataactgtcattgtggtatttttcgattcaaacgccatgacaactgctgcctggagcagaccctcggtctctctccgagggggtgggtttccaatccattcaaacacccttgctccattctcagttcctacagagctaaacaactactgaaaccacgcggtatgtgaaggagccaggcaagaggataaaaaaaaagtaaaggaaaaaggagaaggaaaaacagctgttgtgatcagttgtagtgtatttcaccgttcatgttcatgcaaaacattttttagattctcaagtctcaacctggtgaccagtgcactgatagcaaggtataagattagattattcttagcttttttatcctctttttctctctctcttccttaccctttagattcactcatgggatatcaggtgcttgtacattctttggttcaacttgtgataatagtccatcgcccccctctttcgtc

SEQ ID NO: 16922 - protein, 397 aa, Zea mays subsp. mays
  peptide (1)..(397): Ceres Seq. ID no. 12358908
  misc_feature (47)..(328): Pfam Name: Protein phosphatase 2C Pfam Description: Protein phosphatase 2C
  misc_feature (6)..(393): Homolog of NCBI NO: 7485891 NR Description: hypothetical protein F20M13.80 - Arabidopsis
  misc_feature (1)..(379): Homolog of NCBI NO: 11282001 NR Description: protein phosphatase 2C-like protein - Arabidopsis
  misc_feature (1)..(379): Homolog of NCBI NO: 20340237 NR Description: protein phosphatase 2c-like protein
  misc_feature (1)..(393): Homolog of NCBI NO: 17064756 NR Description: putative protein phosphatase-2c [Arabidopsis
  misc_feature (1)..(393): Homolog of NCBI NO: 22329238 NR Description: putative protein phosphatase-2c
  misc_feature (1)..(396): Homolog of NCBI NO: 7768153 NR Description: protein phosphatase 2C (PP2C) [Fagus sylvatica]
  misc_feature (1)..(389): Homolog of NCBI NO: 18855039 NR Description: putative protein phosphatase [Oryza sativa]
  misc_feature (1)..(396): Homolog of NCBI NO: 11282004 NR Description: protein phosphatase 2C homolog [imported] -
  misc_feature (6)..(392): Homolog of NCBI NO: 13357263 NR Description: putative protein phosphatase 2C
  misc_feature (1)..(392): Homolog of NCBI NO: 37536574 NR Description: putative protein phosphatase 2C
MLSALMDYLKSCWGPASPAGRPRKGSDATGRQDGLLWYKDGGQVVDGEFSMAVVQANNLLEDHSQVESGPLSTSEPGLQGTFVGVYDGHGGPETARYINDHLFNHLRRFASEHKCMSADVIRKVFRATEEGFISVVSNQWSLRPQLAAVGSCCLVGVVCSGTLYVANLGDSRAVLGRLVKGTGEVLAMQLSAEHNASYVEVRRELQASHPDDPHIVVLKHNVWRVKGIIQITRSIGDVYLKKPEFNREPLHSKFRLQETFRRPLLSSDPAITVHQIQPTDKFIIFASDGLWEHLSNQEVVDMVQSSPRNGIARKLVKSAVQEAAKKREMRYSDLKKVDRGVRRHFHDDITVIVVFFDSNAMTTAAWSRPSVSLRGGGFPIHSNTLAPFSVPTELNNY

SEQ ID NO: 16923 - protein, 392 aa, Zea mays subsp. mays
  peptide (1)..(392): Ceres Seq. ID no. 12358909
  misc_feature (42)..(323): Pfam Name: Protein phosphatase 2C Pfam Description: Protein phosphatase 2C
  misc_feature (1)..(388): Homolog of NCBI NO: 7485891 NR Description: hypothetical protein F20M13.80 - Arabidopsis
  misc_feature (1)..(374): Homolog of NCBI NO: 11282001 NR Description: protein phosphatase 2C-like protein - Arabidopsis
  misc_feature (1)..(374): Homolog of NCBI NO: 20340237 NR Description: protein phosphatase 2c-like protein
  misc_feature (1)..(388): Homolog of NCBI NO: 17064756 NR Description: putative protein phosphatase-2c [Arabidopsis
  misc_feature (1)..(388): Homolog of NCBI NO: 22329238 NR Description: putative protein phosphatase-2c
  misc_feature (1)..(391): Homolog of NCBI NO: 7768153 NR Description: protein phosphatase 2C (PP2C) [Fagus sylvatica]
  misc_feature (1)..(384): Homolog of NCBI NO: 18855039 NR Description: putative protein phosphatase [Oryza sativa]
  misc_feature (1)..(391): Homolog of NCBI NO: 11282004 NR Description: protein phosphatase 2C homolog [imported] -
  misc_feature (1)..(387): Homolog of NCBI NO: 13357263 NR Description: putative protein phosphatase 2C
  misc_feature (1)..(387): Homolog of NCBI NO: 37536574 NR Description: putative protein phosphatase 2C
MDYLKSCWGPASPAGRPRKGSDATGRQDGLLWYKDGGQVVDGEFSMAVVQANNLLEDHSQVESGPLSTSEPGLQGTFVGVYDGHGGPETARYINDHLFNHLRRFASEHKCMSADVIRKVFRATEEGFISVVSNQWSLRPQLAAVGSCCLVGVVCSGTLYVANLGDSRAVLGRLVKGTGEVLAMQLSAEHNASYVEVRRELQASHPDDPHIVVLKHNVWRVKGIIQITRSIGDVYLKKPEFNREPLHSKFRLQETFRRPLLSSDPAITVHQIQPTDKFIIFASDGLWEHLSNQEVVDMVQSSPRNGIARKLVKSAVQEAAKKREMRYSDLKKVDRGVRRHFHDDITVIVVFFDSNAMTTAAWSRPSVSLRGGGFPIHSNTLAPFSVPTELNNY

SEQ ID NO: 16924 - protein, 347 aa, Zea mays subsp. mays
  peptide (1)..(347): Ceres Seq. ID no. 12358910
  misc_feature (1)..(278): Pfam Name: Protein phosphatase 2C Pfam Description: Protein phosphatase 2C
  misc_feature (1)..(343): Homolog of NCBI NO: 22329238 NR Description: putative protein phosphatase-2c
  misc_feature (1)..(346): Homolog of NCBI NO: 7768153 NR Description: protein phosphatase 2C (PP2C) [Fagus sylvatica]
  misc_feature (1)..(339): Homolog of NCBI NO: 18855039 NR Description: putative protein phosphatase [Oryza sativa]
  misc_feature (1)..(343): Homolog of NCBI NO: 7485891 NR Description: hypothetical protein F20M13.80 - Arabidopsis
  misc_feature (1)..(329): Homolog of NCBI NO: 20340237 NR Description: protein phosphatase 2c-like protein
  misc_feature (1)..(343): Homolog of NCBI NO: 17064756 NR Description: putative protein phosphatase-2c [Arabidopsis
  misc_feature (1)..(329): Homolog of NCBI NO: 11282001 NR Description: protein phosphatase 2C-like protein - Arabidopsis
  misc_feature (1)..(346): Homolog of NCBI NO: 11282004 NR Description: protein phosphatase 2C homolog [imported] -
  misc_feature (1)..(342): Homolog of NCBI NO: 13357263 NR Description: putative protein phosphatase 2C
  misc_feature (1)..(342): Homolog of NCBI NO: 37536574 NR Description: putative protein phosphatase 2C
MAVVQANNLLEDHSQVESGPLSTSEPGLQGTFVGVYDGHGGPETARYINDHLFNHLRRFASEHKCMSADVIRKVFRATEEGFISVVSNQWSLRPQLAAVGSCCLVGVVCSGTLYVANLGDSRAVLGRLVKGTGEVLAMQLSAEHNASYVEVRRELQASHPDDPHIVVLKHNVWRVKGIIQITRSIGDVYLKKPEFNREPLHSKFRLQETFRRPLLSSDPAITVHQIQPTDKFIIFASDGLWEHLSNQEVVDMVQSSPRNGIARKLVKSAVQEAAKKREMRYSDLKKVDRGVRRHFHDDITVIVVFFDSNAMTTAAWSRPSVSLRGGGFPIHSNTLAPFSVPTELNNY

SEQ ID NO: 16925 - DNA, 1581 bp, Zea mays subsp. mays
  misc_feature (1)..(1581): Ceres Seq. ID no. 12376644
  misc_feature: MA Experiment ID: 108504 Result: Up-regulated in Transcription
  misc_feature: MA Experiment 108504 PARAMETER Experiment Name: Zm_Drought_P Parameter: Age (day) Value: 8
  misc_feature: MA Experiment 108504 PARAMETER Experiment Name: Zm_Drought_P Parameter: Organism Value: Zea mays
  misc_feature: MA Experiment 108504 PARAMETER Experiment Name: Zm_Drought_P Parameter: Plant Line Value: 35A19
  misc_feature: MA Experiment 108504 PARAMETER Experiment Name: Zm_Drought_P Parameter: Timepoint (hr) Value: 12
  misc_feature: MA Experiment 108504 PARAMETER Experiment Name: Zm_Drought_P Parameter: Tissue Value: Aerial
  misc_feature: MA Experiment 108504 PARAMETER Experiment Name: Zm_Drought_P Parameter: Treatment Value: Drought vs. No Drought
  misc_feature: MA Experiment ID: 108534 Result: Down-regulated in Transcription
  misc_feature: MA Experiment 108534 PARAMETER Experiment Name: Zm_4deg_Cold_P Parameter: Age (hr) Value: 8
  misc_feature: MA Experiment 108534 PARAMETER Experiment Name: Zm_4deg_Cold_P Parameter: Organism Value: Zea mays
  misc_feature: MA Experiment 108534 PARAMETER Experiment Name: Zm_4deg_Cold_P Parameter: Plant Line Value: 35A19
  misc_feature: MA Experiment 108534 PARAMETER Experiment Name: Zm_4deg_Cold_P Parameter: Temperature (deg C) Value: 4 vs. 22
  misc_feature: MA Experiment 108534 PARAMETER Experiment Name: Zm_4deg_Cold_P Parameter: Timepoint (hr) Value: 6
  misc_feature: MA Experiment 108534 PARAMETER Experiment Name: Zm_4deg_Cold_P Parameter: Tissue Value: Aerial
  misc_feature: MA Experiment ID: 108535 Result: Down-regulated in Transcription
  misc_feature: MA Experiment 108535 PARAMETER Experiment Name: Zm_Meristem_P Parameter: Age (day) Value: 8
  misc_feature: MA Experiment 108535 PARAMETER Experiment Name: Zm_Meristem_P Parameter: Organism Value: Zea mays
  misc_feature: MA Experiment 108535 PARAMETER Experiment Name: Zm_Meristem_P Parameter: Plant Line Value: 35A19
  misc_feature: MA Experiment 108535 PARAMETER Experiment Name: Zm_Meristem_P Parameter: Tissue Value: Root Meristem vs. Above Root Meristem
  misc_feature: MA Experiment ID: 108540 Result: Up-regulated in Transcription
  misc_feature: MA Experiment 108540 PARAMETER Experiment Name: Zm_20percent_PEG_P Parameter: Age (day) Value: 8
  misc_feature: MA Experiment 108540 PARAMETER Experiment Name: Zm_20percent_PEG_P Parameter: Organism Value: Zea mays
  misc_feature: MA Experiment 108540 PARAMETER Experiment Name: Zm_20percent_PEG_P Parameter: Plant Line Value: 35A19
  misc_feature: MA Experiment 108540 PARAMETER Experiment Name: Zm_20percent_PEG_P Parameter: Timepoint (hr) Value: 6
  misc_feature: MA Experiment 108540 PARAMETER Experiment Name: Zm_20percent_PEG_P Parameter: Tissue Value: Aerial
  misc_feature: MA Experiment 108540 PARAMETER Experiment Name: Zm_20percent_PEG_P Parameter: Treatment Value: 20percent PEG vs. No Treatment
  misc_feature: MA Experiment ID: 108542 Result: Up-regulated in Transcription
  misc_feature: MA Experiment 108542 PARAMETER Experiment Name: Zm_150mM_NaCl_P Parameter: Age (day) Value: 8
  misc_feature: MA Experiment 108542 PARAMETER Experiment Name: Zm_150mM_NaCl_P Parameter: Organism Value: Zea mays
  misc_feature: MA Experiment 108542 PARAMETER Experiment Name: Zm_150mM_NaCl_P Parameter: Plant Line Value: 35A19
  misc_feature: MA Experiment 108542 PARAMETER Experiment Name: Zm_150mM_NaCl_P Parameter: Timepoint (hr) Value: 6
  misc_feature: MA Experiment 108542 PARAMETER Experiment Name: Zm_150mM_NaCl_P Parameter: Tissue Value: Aerial
  misc_feature: MA Experiment 108542 PARAMETER Experiment Name: Zm_150mM_NaCl_P Parameter: Treatment Value: 150mM NaCl vs. No Treatment
  misc_feature: MA Experiment ID: 108543 Result: Up-regulated in Transcription
  misc_feature: MA Experiment ID: 108544 Result: Up-regulated in Transcription
  misc_feature: MA Experiment ID: 108556 Result: Up-regulated in Transcription
  misc_feature: MA Experiment 108556 PARAMETER Experiment Name: Zm_Drought_P Parameter: Age (day) Value: 9
  misc_feature: MA Experiment 108556 PARAMETER Experiment Name: Zm_Drought_P Parameter: Organism Value: Zea mays
  misc_feature: MA Experiment 108556 PARAMETER Experiment Name: Zm_Drought_P Parameter: Plant Line Value: 35A19
  misc_feature: MA Experiment 108556 PARAMETER Experiment Name: Zm_Drought_P Parameter: Timepoint (hr) Value: 24
  misc_feature: MA Experiment 108556 PARAMETER Experiment Name: Zm_Drought_P Parameter: Tissue Value: Aerial
  misc_feature: MA Experiment 108556 PARAMETER Experiment Name: Zm_Drought_P Parameter: Treatment Value: Drought vs. No Drought
  misc_feature: MA Experiment ID: 108559 Result: Up-regulated in Transcription
  misc_feature: MA Experiment 108559 PARAMETER Experiment Name: Zm_5mM_NO_P Parameter: Age (day) Value: 8
  misc_feature: MA Experiment 108559 PARAMETER Experiment Name: Zm_5mM_NO_P Parameter: Organism Value: Zea mays
  misc_feature: MA Experiment 108559 PARAMETER Experiment Name: Zm_5mM_NO_P Parameter: Plant Line Value: 35A19
  misc_feature: MA Experiment 108559 PARAMETER Experiment Name: Zm_5mM_NO_P Parameter: Timepoint (hr) Value: 12
  misc_feature: MA Experiment 108559 PARAMETER Experiment Name: Zm_5mM_NO_P Parameter: Tissue Value: Aerial
  misc_feature: MA Experiment 108559 PARAMETER Experiment Name: Zm_5mM_NO_P Parameter: Treatment Value: 5mM NO vs. No Treatment
  misc_feature: MA Experiment ID: 20000477 Result: Up-regulated in Transcription
  misc_feature: MA Experiment 20000477 PARAMETER Experiment Name: Zm_5mM_SA_P Parameter: Age (day) Value: 10
  misc_feature: MA Experiment 20000477 PARAMETER Experiment Name: Zm_5mM_SA_P Parameter: Organism Value: Zea mays
  misc_feature: MA Experiment 20000477 PARAMETER Experiment Name: Zm_5mM_SA_P Parameter: Plant Line Value: 35A19
  misc_feature: MA Experiment 20000477 PARAMETER Experiment Name: Zm_5mM_SA_P Parameter: Timepoint (hr) Value: 48
  misc_feature: MA Experiment 20000477 PARAMETER Experiment Name: Zm_5mM_SA_P Parameter: Tissue Value: Aerial
  misc_feature: MA Experiment 20000477 PARAMETER Experiment Name: Zm_5mM_SA_P Parameter: Treatment Value: 5mM SA vs. No Treatment
  misc_feature: MA Experiment ID: 20000479 Result: Up-regulated in Transcription
  misc_feature: MA Experiment 20000479 PARAMETER Experiment Name: Zm_Drought_P Parameter: Age (day) Value: 10
  misc_feature: MA Experiment 20000479 PARAMETER Experiment Name: Zm_Drought_P Parameter: Organism Value: Zea mays
  misc_feature: MA Experiment 20000479 PARAMETER Experiment Name: Zm_Drought_P Parameter: Plant Line Value: 35A19
  misc_feature: MA Experiment 20000479 PARAMETER Experiment Name: Zm_Drought_P Parameter: Timepoint (hr) Value: 48
  misc_feature: MA Experiment 20000479 PARAMETER Experiment Name: Zm_Drought_P Parameter: Tissue Value: Aerial
  misc_feature: MA Experiment 20000479 PARAMETER Experiment Name: Zm_Drought_P Parameter: Treatment Value: Drought vs. No Drought
  misc_feature: MA Experiment ID: 20000488 Result: Down-regulated in Transcription
  misc_feature: MA Experiment 20000488 PARAMETER Experiment Name: Zm_50mM_NH4NO3_L_to_H_P Parameter: Organism Value: Zea mays
  misc_feature: MA Experiment 20000488 PARAMETER Experiment Name: Zm_50mM_NH4NO3_L_to_H_P Parameter: Timepoint (hr) Value: 8
  misc_feature: MA Experiment 20000488 PARAMETER Experiment Name: Zm_50mM_NH4NO3_L_to_H_P Parameter: Tissue Value: Leaves
  misc_feature: MA Experiment 20000488 PARAMETER Experiment Name: Zm_50mM_NH4NO3_L_to_H_P Parameter: Treatment Value: 50mM NH4NO3 vs. 100mM Mannitol
  misc_feature: MA Experiment ID: 20000492 Result: Down-regulated in Transcription
  misc_feature: MA Experiment 20000492 PARAMETER Experiment Name: Zm_Hybrid_Seed_Dev_P Parameter: DAP Value: 12
  misc_feature: MA Experiment 20000492 PARAMETER Experiment Name: Zm_Hybrid_Seed_Dev_P Parameter: Organism Value: Zea mays
  misc_feature: MA Experiment 20000492 PARAMETER Experiment Name: Zm_Hybrid_Seed_Dev_P Parameter: Plant Line Value: 35A19
  misc_feature: MA Experiment 20000492 PARAMETER Experiment Name: Zm_Hybrid_Seed_Dev_P Parameter: Tissue Value: Fert Kernel vs. Unfert Floret
gcacgagaccattacctagaacatcctaatcgaaaagaaatgaaactcgcgacagacagttcgtcctctgctccgtggaccctattcctgcgattatctggttgctcacatggacggtgatccgtgatccccggtgaccaagggtgttgaatcctcatgcaggcagaggcagaaacactgcccgaggctgatgcctgatggtgcgatcccgttccctgtcgccatcgagttcgttttttcgttgcttgacagccttaaagcggcgcacgaatgccacgagccactgaggcggcttcccagttcactccaggcccagggcgcccggtcgccatgaactcccgctcctcctccggcggcgtgcggtccgagagctcgctgtcgttgggggagcgcctctgcgcggtcttcttccccgtcatcgccatcgccgaggccgttttcttcgccttcaccgactgcctcgcggacctctgcaccgactccggctcctcgcactcgcgccgcttcggcgcgggcgcgtcctcctccgccgccaggaacagtcggagcaaccattgccagccccaccacagacctttcctacgccgcgccgctcgggtggatggacctcccccaacctccgccagctcgcacgcctcgccgacgagtcccgatgcttctcggtgaacgaggtggaggcgctctttgagctctacaagaagatcagctgctccatcatcgacgacggcctcatccacaaggaagaacttcagctggcactgttcaaaactccaagcggcgagaatctttttcttgatagagtttttttatttgtttgatgagaagaaaaatggtgtgatcgagtttgatgagtttattcattccctaagtgtcttccaccccttggcaccaattgaagacaagatcgattttgcatttaggttgtatgacttgagacaaactgggtttattgagcgtgaagaggttaagcaaatggtaattgctattttgatggaatctgatttaaaattatcagatgacttactcgaggccatcatagataagacatttgaagatgctgatgcggataaggatggaaaaataaataaagaggagtggaaggaatttgcgttacgccaccctaacctgttaaagaatatgacactgccttatctgagggacatcacaaccgtcttccctagtttcgtcttcaacacggcggtggaagattagtcgctccaattgaaggcaataaagcagtactggggattgcttgaggtgcacaaggttcctgaaacctgacggctgttggtcgccttcaaccactgagaatccgatgtgttctgagcatcaaggcagccgccacctgaccatcactcctgctataaattgtaatattataatataaggctcatccggggtggcagatcggcagcgggaacttacctgatataatttcttgctgccgtttttgcgcagcaatggattgagagtcggtagctgtagatacatctagcttccattctgtacgtagggatccaggaactgtaaatacgttctatggaattgtatcggaaagttcctagtacgccagccagatct

SEQ ID NO: 16926 - protein, 131 aa, Zea mays subsp. mays
  peptide (1)..(131): Ceres Seq. ID no. 12376645
  misc_feature (24)..(97): Homolog of NCBI NO: 34913062 NR Description: putative calcium sensor protein
MPRATEAASQFTPGPGRPVAMNSRSSSGGVRSESSLSLGERLCAVFFPVIAIAEAVFFAFTDCLADLCTDSGSSHSRRFGAGASSSAARNSRSNHCQPHHRPFLRRAARVDGPPPTSASSHASPTSPDASR

SEQ ID NO: 16927 - protein, 111 aa, Zea mays subsp. mays
  peptide (1)..(111): Ceres Seq. ID no. 12376646
  misc_feature (4)..(77): Homolog of NCBI NO: 34913062 NR Description: putative calcium sensor protein
MNSRSSSGGVRSESSLSLGERLCAVFFPVIAIAEAVFFAFTDCLADLCTDSGSSHSRRFGAGASSSAARNSRSNHCQPHHRPFLRRAARVDGPPPTSASSHASPTSPDASR

SEQ ID NO: 16928 - protein, 79 aa, Zea mays subsp. mays
  peptide (1)..(79): Ceres Seq. ID no. 12376647
  misc_feature (21)..(49): Pfam Name: EF hand Pfam Description: EF hand
  misc_feature (1)..(79): Homolog of NCBI NO: 15236778 NR Description: calcineurin B-like protein 3
  misc_feature (1)..(79): Homolog of NCBI NO: 25295757 NR Description: protein F1N19.5 [imported] - Arabidopsis thaliana
  misc_feature (1)..(79): Homolog of NCBI NO: 15217657 NR Description: calcineurin B-like protein
  misc_feature (1)..(79): Homolog of NCBI NO: 15237928 NR Description: calcium sensor homolog (gb|AAC26110.1)
  misc_feature (1)..(79): Homolog of NCBI NO: 15238015 NR Description: calcineurin B 1
  misc_feature (1)..(79): Homolog of NCBI NO: 30687272 NR Description: calcineurin B-like protein 3 (CBL3) [Arabidopsis
  misc_feature (1)..(77): Homolog of NCBI NO: 7486208 NR Description: hypothetical protein F26P21.120 - Arabidopsis
  misc_feature (1)..(79): Homolog of NCBI NO: 30689575 NR Description: calcineurin B-like protein (fragment)
  misc_feature (1)..(79): Homolog of NCBI NO: 15234011 NR Description: putative protein (fragment); protein id:
  misc_feature (1)..(62): Homolog of NCBI NO: 34913062 NR Description: putative calcium sensor protein
MVIAILMESDLKLSDDLLEAIIDKTFEDADADKDGKINKEEWKEFALRHPNLLKNMTLPYLRDITTVFPSFVFNTAVED

SEQ ID NO: 16929 - DNA, 1024 bp, Zea mays subsp. mays; identical to SEQ ID NO: 7244
  misc_feature (1)..(1024): Ceres Seq. ID no. 12462326
  misc_feature: MA Experiment ID: 108523 Result: Up-regulated in Transcription
  misc_feature: MA Experiment 108523 PARAMETER Experiment Name: Zm_42deg_Heat_P Parameter: Age (day) Value: 8
  misc_feature: MA Experiment 108523 PARAMETER Experiment Name: Zm_42deg_Heat_P Parameter: Organism Value: Zea mays
  misc_feature: MA Experiment 108523 PARAMETER Experiment Name: Zm_42deg_Heat_P Parameter: Plant Line Value: 35A19
  misc_feature: MA Experiment 108523 PARAMETER Experiment Name: Zm_42deg_Heat_P Parameter: Temperature (deg C) Value: 42 vs. 22
  misc_feature: MA Experiment 108523 PARAMETER Experiment Name: Zm_42deg_Heat_P Parameter: Timepoint (hr) Value: 6
  misc_feature: MA Experiment 108523 PARAMETER Experiment Name: Zm_42deg_Heat_P Parameter: Tissue Value: Aerial
  misc_feature: MA Experiment ID: 108528 Result: Up-regulated in Transcription
  misc_feature: MA Experiment 108528 PARAMETER Experiment Name: Zm_Imbibed_Seeds_P Parameter: Age (day) Value: 5 vs. 2
  misc_feature: MA Experiment 108528 PARAMETER Experiment Name: Zm_Imbibed_Seeds_P Parameter: Organism Value: Zea mays
  misc_feature: MA Experiment 108528 PARAMETER Experiment Name: Zm_Imbibed_Seeds_P Parameter: Plant Line Value: 35A19
  misc_feature: MA Experiment 108528 PARAMETER Experiment Name: Zm_Imbibed_Seeds_P Parameter: Tissue Value: Aerial vs. Embryo
  misc_feature: MA Experiment ID: 108530 Result: Up-regulated in Transcription
  misc_feature: MA Experiment 108530 PARAMETER Experiment Name: Zm_Imbibed_Seeds_P Parameter: Age (day) Value: 6 vs. 2
  misc_feature: MA Experiment 108530 PARAMETER Experiment Name: Zm_Imbibed_Seeds_P Parameter: Organism Value: Zea mays
  misc_feature: MA Experiment 108530 PARAMETER Experiment Name: Zm_Imbibed_Seeds_P Parameter: Plant Line Value: 35A19
  misc_feature: MA Experiment 108530 PARAMETER Experiment Name: Zm_Imbibed_Seeds_P Parameter: Tissue Value: Aerial vs. Embryo
  misc_feature: MA Experiment ID: 108543 Result: Down-regulated in Transcription
  misc_feature: MA Experiment ID: 108545 Result: Up-regulated in Transcription
  misc_feature: MA Experiment 108545 PARAMETER Experiment Name: Zm_Imbibed_Seeds_P Parameter: Age (day) Value: 3 vs. 2
  misc_feature: MA Experiment 108545 PARAMETER Experiment Name: Zm_Imbibed_Seeds_P Parameter: Organism Value: Zea mays
  misc_feature: MA Experiment 108545 PARAMETER Experiment Name: Zm_Imbibed_Seeds_P Parameter: Plant Line Value: 35A19
  misc_feature: MA Experiment 108545 PARAMETER Experiment Name: Zm_Imbibed_Seeds_P Parameter: Tissue Value: Aerial vs. Embryo
  misc_feature: MA Experiment ID: 108547 Result: Up-regulated in Transcription
  misc_feature: MA Experiment 108547 PARAMETER Experiment Name: Zm_Imbibed_Seeds_P Parameter: Age (day) Value: 4 vs. 2
  misc_feature: MA Experiment 108547 PARAMETER Experiment Name: Zm_Imbibed_Seeds_P Parameter: Organism Value: Zea mays
  misc_feature: MA Experiment 108547 PARAMETER Experiment Name: Zm_Imbibed_Seeds_P Parameter: Plant Line Value: 35A19
  misc_feature: MA Experiment 108547 PARAMETER Experiment Name: Zm_Imbibed_Seeds_P Parameter: Tissue Value: Aerial vs. Embryo
  misc_feature: MA Experiment ID: 108688 Result: Down-regulated in Transcription
  misc_feature: MA Experiment 108688 PARAMETER Experiment Name: Zm_Embryos-Flowers__P Parameter: Tissue Value: Immature Flowers vs. Aerial+
  misc_feature: MA Experiment ID: 20000478 Result: Up-regulated in Transcription
  misc_feature: MA Experiment 20000478 PARAMETER Experiment Name: Zm_5mM_SA_P Parameter: Age (day) Value: 11
  misc_feature: MA Experiment 20000478 PARAMETER Experiment Name: Zm_5mM_SA_P Parameter: Organism Value: Zea mays
  misc_feature: MA Experiment 20000478 PARAMETER Experiment Name: Zm_5mM_SA_P Parameter: Plant Line Value: 35A19
  misc_feature: MA Experiment 20000478 PARAMETER Experiment Name: Zm_5mM_SA_P Parameter: Timepoint (hr) Value: 72
  misc_feature: MA Experiment 20000478 PARAMETER Experiment Name: Zm_5mM_SA_P Parameter: Tissue Value: Aerial
  misc_feature: MA Experiment 20000478 PARAMETER Experiment Name: Zm_5mM_SA_P Parameter: Treatment Value: 5mM SA vs. No Treatment
  misc_feature: MA Experiment ID: 20000535 Result: Down-regulated in Transcription
  misc_feature: MA Experiment 20000535 PARAMETER Experiment Name: Zm_Hybrid_Seed_Dev_P Parameter: DAP Value: 30 vs. 12
  misc_feature: MA Experiment 20000535 PARAMETER Experiment Name: Zm_Hybrid_Seed_Dev_P Parameter: Organism Value: Zea mays
  misc_feature: MA Experiment 20000535 PARAMETER Experiment Name: Zm_Hybrid_Seed_Dev_P Parameter: Plant Line Value: 35A19
  misc_feature: MA Experiment 20000535 PARAMETER Experiment Name: Zm_Hybrid_Seed_Dev_P Parameter: Tissue Value: Embryo vs. Unfert Floret

SEQ ID NO: 16930 - protein, 293 aa, Zea mays subsp. mays; identical to SEQ ID NO: 7245
  peptide (1)..(293): Ceres Seq. ID no. 12462327
  misc_feature (46)..(276): Pfam Name: HlyD family secretion protein Pfam Description: HlyD family secretion protein

SEQ ID NO: 16931 - protein, 218 aa, Zea mays subsp. mays; identical to SEQ ID NO: 7246
  peptide (1)..(218): Ceres Seq. ID no. 12462328
  misc_feature (28)..(211): Pfam Name: SOUL heme-binding protein Pfam Description: SOUL heme-binding protein
  misc_feature (1)..(218): Homolog of NCBI NO: 34903864 NR Description: unnamed protein product [Oryza sativa (japonica group)] >gi|8096573|dbj|BAA96146.1| unnamed protein product
  misc_feature (23)..(213): Homolog of NCBI NO: 15220033 NR Description: SOUL-like protein; protein id: At1g17100.1, by cDNA: 29992. [Arabidopsis thaliana] >gi|25372687|pir||G86306
  misc_feature (21)..(218): Homolog of NCBI NO: 18411970 NR Description: expressed protein; protein id: At1g78450.1, by cDNA: 5677. [Arabidopsis thaliana] >gi|25372685|pir||H96812
  misc_feature (21)..(218): Homolog of NCBI NO: 21593898 NR Description: SOUL-like protein [Arabidopsis thaliana]
  misc_feature (1)..(213): Homolog of NCBI NO: 34904402 NR Description: unnamed protein product [Oryza sativa (japonica group)] >gi|7339697|dbj|BAA92902.1| unnamed protein product
  misc_feature (23)..(211): Homolog of NCBI NO: 15218357 NR Description: hypothetical protein; protein id: At1g78460.1
  misc_feature (29)..(213): Homolog of NCBI NO: 28278449 NR Description: Similar to heme binding protein 2 [Danio rerio]
  misc_feature (20)..(209): Homolog of NCBI NO: 7657603 NR Description: heme binding protein 2; putative heme-binding chromosome 6 open reading frame 34 [Homo sapiens]
  misc_feature (27)..(209): Homolog of NCBI NO: 27731687 NR Description: similar to heme binding protein 2; putative
  misc_feature (43)..(209): Homolog of NCBI NO: 15778345 NR Description: C6ORF34B [Homo sapiens]

SEQ ID NO: 16932 - protein, 167 aa, Zea mays subsp. mays; identical to SEQ ID NO: 7247
  peptide (1)..(167): Ceres Seq. ID no. 12462329
  misc_feature (1)..(160): Pfam Name: SOUL heme-binding protein Pfam Description: SOUL heme-binding protein
  misc_feature (1)..(167): Homolog of NCBI NO: 34903864 NR Description: unnamed protein product [Oryza sativa (japonica group)] >gi|8096573|dbj|BAA96146.1| unnamed protein product
  misc_feature (1)..(162): Homolog of NCBI NO: 15220033 NR Description: SOUL-like protein; protein id: At1g17100.1, by cDNA: 29992. [Arabidopsis thaliana] >gi|25372687|pir||G86306
  misc_feature (1)..(167): Homolog of NCBI NO: 18411970 NR Description: expressed protein; protein id: At1g78450.1, by cDNA: 5677. [Arabidopsis thaliana] >gi|25372685|pir||H96812
  misc_feature (1)..(167): Homolog of NCBI NO: 21593898 NR Description: SOUL-like protein [Arabidopsis thaliana]
  misc_feature (1)..(162): Homolog of NCBI NO: 34904402 NR Description: unnamed protein product [Oryza sativa (japonica group)] >gi|7339697|dbj|BAA92902.1| unnamed protein product
  misc_feature (1)..(160): Homolog of NCBI NO: 15218357 NR Description: hypothetical protein; protein id: At1g78460.1
  misc_feature (1)..(162): Homolog of NCBI NO: 28278449 NR Description: Similar to heme binding protein 2 [Danio rerio]
  misc_feature (1)..(158): Homolog of NCBI NO: 7657603 NR Description: heme binding protein 2; putative heme-binding chromosome 6 open reading frame 34 [Homo sapiens]
  misc_feature (1)..(158): Homolog of NCBI NO: 27731687 NR Description: similar to heme binding protein 2; putative
  misc_feature (1)..(158): Homolog of NCBI NO: 15778345 NR Description: C6ORF34B [Homo sapiens]

SEQ ID NO: 16933 - DNA, 2120 bp, Zea mays subsp. mays
  misc_feature (1)..(2120): Ceres Seq. ID no. 12376866
  misc_feature: MA Experiment ID: 108528 Result: Up-regulated in Transcription
  misc_feature: MA Experiment 108528 PARAMETER Experiment Name: Zm_Imbibed_Seeds_P Parameter: Age (day) Value: 5 vs. 2
  misc_feature: MA Experiment 108528 PARAMETER Experiment Name: Zm_Imbibed_Seeds_P Parameter: Organism Value: Zea mays
  misc_feature: MA Experiment 108528 PARAMETER Experiment Name: Zm_Imbibed_Seeds_P Parameter: Plant Line Value: 35A19
  misc_feature: MA Experiment 108528 PARAMETER Experiment Name: Zm_Imbibed_Seeds_P Parameter: Tissue Value: Aerial vs. Embryo
  misc_feature: MA Experiment ID: 108529 Result: Up-regulated in Transcription
  misc_feature: MA Experiment 108529 PARAMETER Experiment Name: Zm_Imbibed_Seeds_P Parameter: Age (day) Value: 5 vs. 2
  misc_feature: MA Experiment 108529 PARAMETER Experiment Name: Zm_Imbibed_Seeds_P Parameter: Organism Value: Zea mays
  misc_feature: MA Experiment 108529 PARAMETER Experiment Name: Zm_Imbibed_Seeds_P Parameter: Plant Line Value: 35A19
  misc_feature: MA Experiment 108529 PARAMETER Experiment Name: Zm_Imbibed_Seeds_P Parameter: Tissue Value: Roots vs. Embryo
  misc_feature: MA Experiment ID: 108530 Result: Up-regulated in Transcription
  misc_feature: MA Experiment 108530 PARAMETER Experiment Name: Zm_Imbibed_Seeds_P Parameter: Age (day) Value: 6 vs. 2
  misc_feature: MA Experiment 108530 PARAMETER Experiment Name: Zm_Imbibed_Seeds_P Parameter: Organism Value: Zea mays
  misc_feature: MA Experiment 108530 PARAMETER Experiment Name: Zm_Imbibed_Seeds_P Parameter: Plant Line Value: 35A19
  misc_feature: MA Experiment 108530 PARAMETER Experiment Name: Zm_Imbibed_Seeds_P Parameter: Tissue Value: Aerial vs. Embryo
  misc_feature: MA Experiment ID: 108543 Result: Up-regulated in Transcription
  misc_feature: MA Experiment ID: 108544 Result: Down-regulated in Transcription
  misc_feature: MA Experiment ID: 108545 Result: Up-regulated in Transcription
  misc_feature: MA Experiment 108545 PARAMETER Experiment Name: Zm_Imbibed_Seeds_P Parameter: Age (day) Value: 3 vs. 2
  misc_feature: MA Experiment 108545 PARAMETER Experiment Name: Zm_Imbibed_Seeds_P Parameter: Organism Value: Zea mays
  misc_feature: MA Experiment 108545 PARAMETER Experiment Name: Zm_Imbibed_Seeds_P Parameter: Plant Line Value: 35A19
  misc_feature: MA Experiment 108545 PARAMETER Experiment Name: Zm_Imbibed_Seeds_P Parameter: Tissue Value: Aerial vs. Embryo
  misc_feature: MA Experiment ID: 108547 Result: Up-regulated in Transcription
  misc_feature: MA Experiment 108547 PARAMETER Experiment Name: Zm_Imbibed_Seeds_P Parameter: Age (day) Value: 4 vs. 2
  misc_feature: MA Experiment 108547 PARAMETER Experiment Name: Zm_Imbibed_Seeds_P Parameter: Organism Value: Zea mays
  misc_feature: MA Experiment 108547 PARAMETER Experiment Name: Zm_Imbibed_Seeds_P Parameter: Plant Line Value: 35A19
  misc_feature: MA Experiment 108547 PARAMETER Experiment Name: Zm_Imbibed_Seeds_P Parameter: Tissue Value: Aerial vs. Embryo
  misc_feature: MA Experiment ID: 108556 Result: Down-regulated in Transcription
  misc_feature: MA Experiment 108556 PARAMETER Experiment Name: Zm_Drought_P Parameter: Age (day) Value: 9
  misc_feature: MA Experiment 108556 PARAMETER Experiment Name: Zm_Drought_P Parameter: Organism Value: Zea mays
  misc_feature: MA Experiment 108556 PARAMETER Experiment Name: Zm_Drought_P Parameter: Plant Line Value: 35A19
  misc_feature: MA Experiment 108556 PARAMETER Experiment Name: Zm_Drought_P Parameter: Timepoint (hr) Value: 24
  misc_feature: MA Experiment 108556 PARAMETER Experiment Name: Zm_Drought_P Parameter: Tissue Value: Aerial
  misc_feature: MA Experiment 108556 PARAMETER Experiment Name: Zm_Drought_P Parameter: Treatment Value: Drought vs. No Drought
  misc_feature: MA Experiment ID: 108597 Result: Down-regulated in Transcription
  misc_feature: MA Experiment 108597 PARAMETER Experiment Name: Zm_100uM_ABA_P Parameter: Age (day) Value: 9
  misc_feature: MA Experiment 108597 PARAMETER Experiment Name: Zm_100uM_ABA_P Parameter: Organism Value: Zea mays
  misc_feature: MA Experiment 108597 PARAMETER Experiment Name: Zm_100uM_ABA_P Parameter: Plant Line Value: 35A19
  misc_feature: MA Experiment 108597 PARAMETER Experiment Name: Zm_100uM_ABA_P Parameter: Timepoint (hr) Value: 24
  misc_feature: MA Experiment 108597 PARAMETER Experiment Name: Zm_100uM_ABA_P Parameter: Tissue Value: Aerial
  misc_feature: MA Experiment 108597 PARAMETER Experiment Name: Zm_100uM_ABA_P Parameter: Treatment Value: 100uM ABA vs. No Treatment
  misc_feature: MA Experiment ID: 108689 Result: Down-regulated in Transcription
  misc_feature: MA Experiment 108689 PARAMETER Experiment Name: Zm_Drought_Roots_P Parameter: Age (day) Value: 9
  misc_feature: MA Experiment 108689 PARAMETER Experiment Name: Zm_Drought_Roots_P Parameter: Organism Value: Zea mays
  misc_feature: MA Experiment 108689 PARAMETER Experiment Name: Zm_Drought_Roots_P Parameter: Plant Line Value: 35A19
  misc_feature: MA Experiment 108689 PARAMETER Experiment Name: Zm_Drought_Roots_P Parameter: Timepoint (hr) Value: 24
  misc_feature: MA Experiment 108689 PARAMETER Experiment Name: Zm_Drought_Roots_P Parameter: Tissue Value: Roots
  misc_feature: MA Experiment 108689 PARAMETER Experiment Name: Zm_Drought_Roots_P Parameter: Treatment Value: Drought vs. No Drought
  misc_feature: MA Experiment ID: 20000480 Result: Down-regulated in Transcription
  misc_feature: MA Experiment 20000480 PARAMETER Experiment Name: Zm_Drought_P Parameter: Age (day) Value: 11
  misc_feature: MA Experiment 20000480 PARAMETER Experiment Name: Zm_Drought_P Parameter: Organism Value: Zea mays
  misc_feature: MA Experiment 20000480 PARAMETER Experiment Name: Zm_Drought_P Parameter: Plant Line Value: 35A19
  misc_feature: MA Experiment 20000480 PARAMETER Experiment Name: Zm_Drought_P Parameter: Timepoint (hr) Value: 72
  misc_feature: MA Experiment 20000480 PARAMETER Experiment Name: Zm_Drought_P Parameter: Tissue Value: Aerial
  misc_feature: MA Experiment 20000480 PARAMETER Experiment Name: Zm_Drought_P Parameter: Treatment Value: Drought vs. No Drought
  misc_feature: MA Experiment ID: 20000533 Result: Down-regulated in Transcription
  misc_feature: MA Experiment 20000533 PARAMETER Experiment Name: Zm_0.001percent_MeJA_P Parameter: Age (day) Value: 11
  misc_feature: MA Experiment 20000533 PARAMETER Experiment Name: Zm_0.001percent_MeJA_P Parameter: Organism Value: Zea mays
  misc_feature: MA Experiment 20000533 PARAMETER Experiment Name: Zm_0.001percent_MeJA_P Parameter: Plant Line Value: 35A19
  misc_feature: MA Experiment 20000533 PARAMETER Experiment Name: Zm_0.001percent_MeJA_P Parameter: Timepoint (hr) Value: 72
  misc_feature: MA Experiment 20000533 PARAMETER Experiment Name: Zm_0.001percent_MeJA_P Parameter: Tissue Value: Aerial
  misc_feature: MA Experiment 20000533 PARAMETER Experiment Name: Zm_0.001percent_MeJA_P Parameter: Treatment Value: 0.001percent MeJA vs. No Treatment
  misc_feature: MA Experiment ID: 20000626 Result: Down-regulated in Transcription
  misc_feature: MA Experiment 20000626 PARAMETER Experiment Name: Zm_Herbicide-Treatments_P Parameter: Timepoint (hr) Value: 12
  misc_feature: MA Experiment 20000626 PARAMETER Experiment Name: Zm_Herbicide-Treatments_P Parameter: Tissue Value: Aerial
  misc_feature: MA Experiment 20000626 PARAMETER Experiment Name: Zm_Herbicide-Treatments_P Parameter: Treatment Value: Roundup vs. No Treatment
gcacgagaccattacctagaacatcctaatcgaaaaaatgtcggagcagcagcagccattgccgcagcctcggagcagcatgcgggaggctctggagaaggaggacaaggagaaggcggcggctgctgcggcggccaaggagaaggcggccgtccccaagaacggcaacggcaacggcggcaagaatggcggcggcgccggcagcggcaacggcggagcgcccccgcagtccggggaggagacggcccgcgagatccaggtggtcagggaggcgtaccgccgcgagacggccgcgccggcctacgtcatacccgaggagccgccggccgtggtcgagctcgtcggctggtacatctacggcttctgctcctacttcatcacccacctgctgctgccggtcctcttcccggccatcatcacgcaggtcgccttccccaactccgacttcacgcccgaccccaagtacaccctcaagggcgtcacctgctccgtccacgagatgtccatgtaccagaggcttaccaagcactccattgtgatcgatggatcccggatgtcaccattgggctggagtggactgtcgtgggcaatcggcatcctcatcgtggcgccgctcctcacccagaccgctcaccatctcgaccgtggccagtaccagtcgctgatcctcattgccgccacgtccttcgggtccttcttctgcctgctaacaggcttcttcaagacggtctgggtgttcctgttctacatcctcttcatcgctggctcgatcatcgtcgctgaggcggtgcacacccgcaaccttgggctgatgatccgtggcctggctgcgcatgactcgggcaagcaccttgtccttcgccgccgcgctgctgccagccagctcagcctgtactgcactgccataggaggcattggagctgccctcatggcagctttcatgtaccacatgctgcggcgcactgaccagctcactggcctctgggtcgtgtccatcttctgtggccttatctggttcatcggcatctgccatggcctcttcacaaacaggcccagcagctcgtcacccaccaccgcattcgagcccaacttcttcaccaagctcagctacagcatgaccctcctccgttacccgcaggccattggcagcctggttgcggtgttcctgtcctctttcgccacaatgtgcatcttcaccagcggcacgctctatgctatcggtggtgtctgcatcaagccggtgctcgtgcttgcgctatggatcctctactttctgttccccttgatctcgctcccgctcctccacccgatccagatcataatccgcgcggacgccgtgcgcatgcagctgctcgggttcataatctgcctgttcgtgtccggtgccgggttctacttcaagagccacaggtggagggctgcccacatcatcgtcatcgccctggtccagagcaccgccaatggcatactgtacgcgttcggccgcatcctgctcctcgatgcctcgccgccggggaaggagggtgcgttctcggtctggtacgcgtttgttcgtgtcaccggtgccatgatcggcttcgctgcctcctccgctggccctgggcgcgcgggagggtcctttgctgctgcgttcctcgggagcttcctgggcatcatcgtgctgatcttcggcaacgtcagcaacatcggggcgctgaaggcggccgggcacctcaaggggatggacgacgagaagaggatgggcggtctcgggatggagaagggcgagggcatgggtagcgccgtcgctgattctggcgagagcagggggagggtatgatgatgactattcgtgacagtgaattcctgggaggtgggggagaaaaggattgcgtcctgtggaggttgtgcttgtgagaaggatttgttctctcttttttttcttgtttctttggccgtgtttcagtgacactgttgatggatcccagtgcttcgcccgtttgatgcatcatggtggtggtggtgatgatggatgacatagtggtaggggagtgtgtgctagttgttaatgtgttatttattcttttgcttgcaagacaattgtaactgatgatcgttagatcatatggttcttccttcgt

SEQ ID NO: 16934 - protein, 593 aa, Zea mays subsp. mays
  peptide (1)..(593): Ceres Seq. ID no. 12376867
  misc_feature (93)..(566): Homolog of NCBI NO: 32470647 NR Description: hypothetical protein [Solanum bulbocastanum]
  misc_feature (1)..(593): Homolog of NCBI NO: 34897922 NR Description: ESTs D23841(R0349) correspond to a region of the predicted
MSEQQQPLPQPRSSMREALEKEDKEKAAAAAAAKEKAAVPKNGNGNGGKNGGGAGSGNGGAPPQSGEETAREIQVVREAYRRETAAPAYVIPEEPPAVVELVGWYIYGFCSYFITHLLLPVLFPAIITQVAFPNSDFTPDPKYTLKGVTCSVHEMSMYQRLTKHSIVIDGSRMSPLGWSGLSWAIGILIVAPLLTQTAHHLDRGQYQSLILIAATSFGSFFCLLTGFFKTVWVFLFYILFIAGSIIVAEAVHTRNLGLMIRGLAAHDSGKHLVLRRRAAASQLSLYCTAIGGIGAALMAAFMYHMLRRTDQLTGLWVVSIFCGLIWFIGICHGLFTNRPSSSSPTTAFEPNFFTKLSYSMTLLRYPQAIGSLVAVFLSSFATMCIFTSGTLYAIGGVCIKPVLVLALWILYFLFPLISLPLLHPIQIIIRADAVRMQLLGFIICLFVSGAGFYFKSHRWRAAHIIVIALVQSTANGILYAFGRILLLDASPPGKEGAFSVWYAFVRVTGAMIGFAASSAGPGRAGGSFAAAFLGSFLGIIVLIFGNVSNIGALKAAGHLKGMDDEKRMGGLGMEKGEGMGSAVADSGESRGRV

SEQ ID NO: 16935 - protein, 579 aa, Zea mays subsp. mays
  peptide (1)..(579): Ceres Seq. ID no. 12376868
  misc_feature (79)..(552): Homolog of NCBI NO: 32470647 NR Description: hypothetical protein [Solanum bulbocastanum]
  misc_feature (1)..(579): Homolog of NCBI NO: 34897922 NR Description: ESTs D23841(R0349) correspond to a region of the predicted
MREALEKEDKEKAAAAAAAKEKAAVPKNGNGNGGKNGGGAGSGNGGAPPQSGEETAREIQVVREAYRRETAAPAYVIPEEPPAVVELVGWYIYGFCSYFITHLLLPVLFPAIITQVAFPNSDFTPDPKYTLKGVTCSVHEMSMYQRLTKHSIVIDGSRMSPLGWSGLSWAIGILIVAPLLTQTAHHLDRGQYQSLILIAATSFGSFFCLLTGFFKTVWVFLFYILFIAGSIIVAEAVHTRNLGLMIRGLAAHDSGKHLVLRRRAAASQLSLYCTAIGGIGAALMAAFMYHMLRRTDQLTGLWVVSIFCGLIWFIGICHGLFTNRPSSSSPTTAFEPNFFTKLSYSMTLLRYPQAIGSLVAVFLSSFATMCIFTSGTLYAIGGVCIKPVLVLALWILYFLFPLISLPLLHPIQIIIRADAVRMQLLGFIICLFVSGAGFYFKSHRWRAAHIIVIALVQSTANGILYAFGRILLLDASPPGKEGAFSVWYAFVRVTGAMIGFAASSAGPGRAGGSFAAAFLGSFLGIIVLIFGNVSNIGALKAAGHLKGMDDEKRMGGLGMEKGEGMGSAVADSGESRGRV

SEQ ID NO: 16936 - protein, 439 aa, Zea mays subsp. mays
  peptide (1)..(439): Ceres Seq. ID no. 12376869
  misc_feature (1)..(412): Homolog of NCBI NO: 32470647 NR Description: hypothetical protein [Solanum bulbocastanum]
  misc_feature (1)..(439): Homolog of NCBI NO: 34897922 NR Description: ESTs D23841(R0349) correspond to a region of the predicted
MSMYQRLTKHSIVIDGSRMSPLGWSGLSWAIGILIVAPLLTQTAHHLDRGQYQSLILIAATSFGSFFCLLTGFFKTVWVFLFYILFIAGSIIVAEAVHTRNLGLMIRGLAAHDSGKHLVLRRRAAASQLSLYCTAIGGIGAALMAAFMYHMLRRTDQLTGLWVVSIFCGLIWFIGICHGLFTNRPSSSSPTTAFEPNFFTKLSYSMTLLRYPQAIGSLVAVFLSSFATMCIFTSGTLYAIGGVCIKPVLVLALWILYFLFPLISLPLLHPIQIIIRADAVRMQLLGFIICLFVSGAGFYFKSHRWRAAHIIVIALVQSTANGILYAFGRILLLDASPPGKEGAFSVWYAFVRVTGAMIGFAASSAGPGRAGGSFAAAFLGSFLGIIVLIFGNVSNIGALKAAGHLKGMDDEKRMGGLGMEKGEGMGSAVADSGESRGRV

SEQ ID NO: 16937 - DNA, 1650 bp, Zea mays subsp. mays
  misc_feature (1)..(1650): Ceres Seq. ID no. 12415075
  misc_feature: MA Experiment ID: 108504 Result: Down-regulated in Transcription
  misc_feature: MA Experiment 108504 PARAMETER Experiment Name: Zm_Drought_P Parameter: Age (day) Value: 8
  misc_feature: MA Experiment 108504 PARAMETER Experiment Name: Zm_Drought_P Parameter: Organism Value: Zea mays
  misc_feature: MA Experiment 108504 PARAMETER Experiment Name: Zm_Drought_P Parameter: Plant Line Value: 35A19
  misc_feature: MA Experiment 108504 PARAMETER Experiment Name: Zm_Drought_P Parameter: Timepoint (hr) Value: 12
  misc_feature: MA Experiment 108504 PARAMETER Experiment Name: Zm_Drought_P Parameter: Tissue Value: Aerial
  misc_feature: MA Experiment 108504 PARAMETER Experiment Name: Zm_Drought_P Parameter: Treatment Value: Drought vs. No Drought
  misc_feature: MA Experiment ID: 108522 Result: Down-regulated in Transcription
  misc_feature: MA Experiment 108522 PARAMETER Experiment Name: Zm_42deg_Heat_P Parameter: Age (day) Value: 8
  misc_feature: MA Experiment 108522 PARAMETER Experiment Name: Zm_42deg_Heat_P Parameter: Organism Value: Zea mays
  misc_feature: MA Experiment 108522 PARAMETER Experiment Name: Zm_42deg_Heat_P Parameter: Plant Line Value: 35A19
  misc_feature: MA Experiment 108522 PARAMETER Experiment Name: Zm_42deg_Heat_P Parameter: Temperature (deg C) Value: 42 vs. 22
  misc_feature: MA Experiment 108522 PARAMETER Experiment Name: Zm_42deg_Heat_P Parameter: Timepoint (hr) Value: 1
  misc_feature: MA Experiment 108522 PARAMETER Experiment Name: Zm_42deg_Heat_P Parameter: Tissue Value: Aerial
  misc_feature: MA Experiment ID: 108529 Result: Up-regulated in Transcription
  misc_feature: MA Experiment 108529 PARAMETER Experiment Name: Zm_Imbibed_Seeds_P Parameter: Age (day) Value: 5 vs. 2
  misc_feature: MA Experiment 108529 PARAMETER Experiment Name: Zm_Imbibed_Seeds_P Parameter: Organism Value: Zea mays
  misc_feature: MA Experiment 108529 PARAMETER Experiment Name: Zm_Imbibed_Seeds_P Parameter: Plant Line Value: 35A19
  misc_feature: MA Experiment 108529 PARAMETER Experiment Name: Zm_Imbibed_Seeds_P Parameter: Tissue Value: Roots vs. Embryo
  misc_feature: MA Experiment ID: 108534 Result: Up-regulated in Transcription
  misc_feature: MA Experiment 108534 PARAMETER Experiment Name: Zm_4deg_Cold_P Parameter: Age (hr) Value: 8
  misc_feature: MA Experiment 108534 PARAMETER Experiment Name: Zm_4deg_Cold_P Parameter: Organism Value: Zea mays
  misc_feature: MA Experiment 108534 PARAMETER Experiment Name: Zm_4deg_Cold_P Parameter: Plant Line Value: 35A19
  misc_feature: MA Experiment 108534 PARAMETER Experiment Name: Zm_4deg_Cold_P Parameter: Temperature (deg C) Value: 4 vs. 22
  misc_feature: MA Experiment 108534 PARAMETER Experiment Name: Zm_4deg_Cold_P Parameter: Timepoint (hr) Value: 6
  misc_feature: MA Experiment 108534 PARAMETER Experiment Name: Zm_4deg_Cold_P Parameter: Tissue Value: Aerial
  misc_feature: MA Experiment ID: 108535 Result: Down-regulated in Transcription
  misc_feature: MA Experiment 108535 PARAMETER Experiment Name: Zm_Meristem_P Parameter: Age (day) Value: 8
  misc_feature: MA Experiment 108535 PARAMETER Experiment Name: Zm_Meristem_P Parameter: Organism Value: Zea mays
  misc_feature: MA Experiment 108535 PARAMETER Experiment Name: Zm_Meristem_P Parameter: Plant Line Value: 35A19
  misc_feature: MA Experiment 108535 PARAMETER Experiment Name: Zm_Meristem_P Parameter: Tissue Value: Root Meristem vs. Above Root Meristem
  misc_feature: MA Experiment ID: 108543 Result: Up-regulated in Transcription
  misc_feature: MA Experiment ID: 108546 Result: Up-regulated in Transcription
  misc_feature: MA Experiment 108546 PARAMETER Experiment Name: Zm_Imbibed_Seeds_P Parameter: Age (day) Value: 3 vs. 2
  misc_feature: MA Experiment 108546 PARAMETER Experiment Name: Zm_Imbibed_Seeds_P Parameter: Organism Value: Zea mays
  misc_feature: MA Experiment 108546 PARAMETER Experiment Name: Zm_Imbibed_Seeds_P Parameter: Plant Line Value: 35A19
  misc_feature: MA Experiment 108546 PARAMETER Experiment Name: Zm_Imbibed_Seeds_P Parameter: Tissue Value: Roots vs. Embryo
  misc_feature: MA Experiment ID: 108556 Result: Down-regulated in Transcription
  misc_feature: MA Experiment 108556 PARAMETER Experiment Name: Zm_Drought_P Parameter: Age (day) Value: 9
  misc_feature: MA Experiment 108556 PARAMETER Experiment Name: Zm_Drought_P Parameter: Organism Value: Zea mays
  misc_feature: MA Experiment 108556 PARAMETER Experiment Name: Zm_Drought_P Parameter: Plant Line Value: 35A19
  misc_feature: MA Experiment 108556 PARAMETER Experiment Name: Zm_Drought_P Parameter: Timepoint (hr) Value: 24
  misc_feature: MA Experiment 108556 PARAMETER Experiment Name: Zm_Drought_P Parameter: Tissue Value: Aerial
  misc_feature: MA Experiment 108556 PARAMETER Experiment Name: Zm_Drought_P Parameter: Treatment Value: Drought vs. No Drought
  misc_feature: MA Experiment ID: 108559 Result: Down-regulated in Transcription
  misc_feature: MA Experiment 108559 PARAMETER Experiment Name: Zm_5mM_NO_P Parameter: Age (day) Value: 8
  misc_feature: MA Experiment 108559 PARAMETER Experiment Name: Zm_5mM_NO_P Parameter: Organism Value: Zea mays
  misc_feature: MA Experiment 108559 PARAMETER Experiment Name: Zm_5mM_NO_P Parameter: Plant Line Value: 35A19
  misc_feature: MA Experiment 108559 PARAMETER Experiment Name: Zm_5mM_NO_P Parameter: Timepoint (hr) Value: 12
  misc_feature: MA Experiment 108559 PARAMETER Experiment Name: Zm_5mM_NO_P Parameter: Tissue Value: Aerial
  misc_feature: MA Experiment 108559 PARAMETER Experiment Name: Zm_5mM_NO_P Parameter: Treatment Value: 5mM NO vs. No Treatment
  misc_feature: MA Experiment ID: 20000479 Result: Down-regulated in Transcription
  misc_feature: MA Experiment 20000479 PARAMETER Experiment Name: Zm_Drought_P Parameter: Age (day) Value: 10
  misc_feature: MA Experiment 20000479 PARAMETER Experiment Name: Zm_Drought_P Parameter: Organism Value: Zea mays
  misc_feature: MA Experiment 20000479 PARAMETER Experiment Name: Zm_Drought_P Parameter: Plant Line Value: 35A19
  misc_feature: MA Experiment 20000479 PARAMETER Experiment Name: Zm_Drought_P Parameter: Timepoint (hr) Value: 48
  misc_feature: MA Experiment 20000479 PARAMETER Experiment Name: Zm_Drought_P Parameter: Tissue Value: Aerial
  misc_feature: MA Experiment 20000479 PARAMETER Experiment Name: Zm_Drought_P Parameter: Treatment Value: Drought vs. No Drought
  misc_feature: MA Experiment ID: 20000533 Result: Down-regulated in Transcription
  misc_feature: MA Experiment 20000533 PARAMETER Experiment Name: Zm_0.001percent_MeJA_P Parameter: Age (day) Value: 11
  misc_feature: MA Experiment 20000533 PARAMETER Experiment Name: Zm_0.001percent_MeJA_P Parameter: Organism Value: Zea mays
  misc_feature: MA Experiment 20000533 PARAMETER Experiment Name: Zm_0.001percent_MeJA_P Parameter: Plant Line Value: 35A19
  misc_feature: MA Experiment 20000533 PARAMETER Experiment Name: Zm_0.001percent_MeJA_P Parameter: Timepoint (hr) Value: 72
  misc_feature: MA Experiment 20000533 PARAMETER Experiment Name: Zm_0.001percent_MeJA_P Parameter: Tissue Value: Aerial
  misc_feature: MA Experiment 20000533 PARAMETER Experiment Name: Zm_0.001percent_MeJA_P Parameter: Treatment Value: 0.001percent MeJA vs. No Treatment
  misc_feature: MA Experiment ID: 20000535 Result: Down-regulated in Transcription
  misc_feature: MA Experiment 20000535 PARAMETER Experiment Name: Zm_Hybrid_Seed_Dev_P Parameter: DAP Value: 30 vs. 12
  misc_feature: MA Experiment 20000535 PARAMETER Experiment Name: Zm_Hybrid_Seed_Dev_P Parameter: Organism Value: Zea mays
  misc_feature: MA Experiment 20000535 PARAMETER Experiment Name: Zm_Hybrid_Seed_Dev_P Parameter: Plant Line Value: 35A19
  misc_feature: MA Experiment 20000535 PARAMETER Experiment Name: Zm_Hybrid_Seed_Dev_P Parameter: Tissue Value: Embryo vs. Unfert Floret
  misc_feature: MA Experiment ID: 20000629 Result: Up-regulated in Transcription
  misc_feature: MA Experiment 20000629 PARAMETER Experiment Name: Zm_Herbicide-Treatments_P Parameter: Timepoint (hr) Value: 12
  misc_feature: MA Experiment 20000629 PARAMETER Experiment Name: Zm_Herbicide-Treatments_P Parameter: Tissue Value: Aerial
  misc_feature: MA Experiment 20000629 PARAMETER Experiment Name: Zm_Herbicide-Treatments_P Parameter: Treatment Value: Trimec vs. No Treatment
  misc_feature: MA Experiment ID: 20001608 Result: Down-regulated in Transcription
  misc_feature: MA Experiment 20001608 PARAMETER Experiment Name: Zm_50ppm_KNO3_L-to-H_P Parameter: Age (day) Value: 21
  misc_feature: MA Experiment 20001608 PARAMETER Experiment Name: Zm_50ppm_KNO3_L-to-H_P Parameter: Organism Value: Zea mays
  misc_feature: MA Experiment 20001608 PARAMETER Experiment Name: Zm_50ppm_KNO3_L-to-H_P Parameter: Plant Line Value: 35A19
  misc_feature: MA Experiment 20001608 PARAMETER Experiment Name: Zm_50ppm_KNO3_L-to-H_P Parameter: Timepoint (hr) Value: 48
  misc_feature: MA Experiment 20001608 PARAMETER Experiment Name: Zm_50ppm_KNO3_L-to-H_P Parameter: Tissue Value: Shoots
  misc_feature: MA Experiment 20001608 PARAMETER Experiment Name: Zm_50ppm_KNO3_L-to-H_P Parameter: Treatment Value: 50ppm KNO3 vs. 50ppm KCl
catcctaatcgaaaagttttaggtagtagctagacgtacgtacgtactcacacgacgatgacgaaggcgtggaggccgatgctggcgtcggccaccaagtgctgcgcggcggaggacgcggcggtggcccccgacggcctggcgcggtgccggccgcagcagtcggagctctcgcggcggctggcgtccttcaggcgcctgtcgtcgctggccaacagcccggcgtcggcggcgggcacggacaaggacggcggcagcgtcaagcaggccggggagatggcgggcccgctgcagctgcactccttcggcctaggcgagctccgcggcgtcacgcacgacttcgccagcagcttcctgctcggggagggcggcttcggcgccgtgtacaagggcttcgtggacgccggcatgcgcccgggcctcgccgcccagcccgtcgccgtcaagcagctcaacgccgcgggcttccagggccaccgggagtggctcgccgaggtcatcttcctgggccagttccgccactcgcacctcgtccgcctgctggggtactgctgcgaggacgaggagcgcctgctcgtctacgagttcatgccgcgcgggagcctcgagaaccacctcttcaggaggatctcggcgacgctaccgtggggcacccggctcaaggtggccatcggcgccgccaagggtctggccttcctccacgccgcgagcacgcccgtcatctacagggacttcaaggcctccaacatcctactcgactcggacttcaccgccaagctgtcggacttcgggctggccaagatggggcccgagggcgaggacacgcacgtgacgacgcgcgtgatgggcacccacggctacgcggcgccggagtacgtgcagacgggccacctgaacgtgaagagcgacgtgtacagcttcggcgtcgtgctcctggagctcctnacggggcggcgcgccatggagcacgtncgcgggcgcagcgcgcacgccgaccagcagctgaaggctcgtggactggacccgnccctacctcagcggcggcagccgccgnctgcgctgcatcatggaccagaggctggcgggccactactccgtcaagggcgcgcgcnccgtggcgcagctggccgtgcagtgcaccgcgcagcagccgcgggacaggccgcgcatggtggctgtcgtcgacgcgctcgacaagctgcaggggctcaaggacatggccgtcaccgtcggcctntggcccgccaccgcgcccgtcgccgggcggaacgccatctccgccaagatccgcgcggaggtcaagggcgccgccggcgcagggtcgcgccggaggagcgcgtcctccaagctgccttagtaatcttgacggctggaccacctgcgtgccacgtcgtacatgtctcctagctagctcgtgtgtaccccgggtgtaggaatcctcttgtgtgttttgtgccacgtcgtcggtgtgtgtatatagtacatactactgtaccgtctagtttaggcgcgttgagattggtgaggcagagagatgttcctccatgcactcactagtacgtacgatccatacctattgctcctggattcatgagatcgttaatagaggtgatgtaaaactttgcaaagtacacatgaatttgaattttg

SEQ ID NO: 16938 - protein, 449 aa, Zea mays subsp. mays
  peptide (1)..(449): Ceres Seq. ID no. 12415076
  misc_feature (79)..(306): Homolog of NCBI NO: 30679085 NR Description: protein kinase family [Arabidopsis thaliana]
  misc_feature (44)..(306): Homolog of NCBI NO: 15238553 NR Description: serine/threonine protein kinase-like; protein id:
  misc_feature (44)..(306): Homolog of NCBI NO: 10176804 NR Description: serine/threonine protein kinase-like [Arabidopsis
  misc_feature (47)..(306): Homolog of NCBI NO: 37534008 NR Description: putative serine/threonine protein kinase
  misc_feature (80)..(306): Homolog of NCBI NO: 14484938 NR Description: auxin-regulated dual specificity cytosolic kinase
  misc_feature (74)..(144): Homolog of NCBI NO: 27436752 NR Description: Putative serine/threonine protein kinase
  misc_feature (144)..(306): Homolog of NCBI NO: 27436752 NR Description: Putative serine/threonine protein kinase
  misc_feature (32)..(331): Homolog of NCBI NO: 30013675 NR Description: Avr9/Cf-9 rapidly elicited protein 264 [Nicotiana
  misc_feature (4)..(306): Homolog of NCBI NO: 15225019 NR Description: putative protein kinase
  misc_feature (1)..(309): Homolog of NCBI NO: 15220535 NR Description: serine/threonine protein kinase, putative
  misc_feature (296)..(296): Xaa is any aa, unknown or other
  misc_feature (305)..(305): Xaa is any aa, unknown or other
  misc_feature (324)..(324): Xaa is any aa, unknown or other
  misc_feature (333)..(333): Xaa is any aa, unknown or other
  misc_feature (352)..(352): Xaa is any aa, unknown or other
  misc_feature (394)..(394): Xaa is any aa, unknown or other
MTKAWRPMLASATKCCAAEDAAVAPDGLARCRPQQSELSRRLASFRRLSSLANSPASAAGTDKDGGSVKQAGEMAGPLQLHSFGLGELRGVTHDFASSFLLGEGGFGAVYKGFVDAGMRPGLAAQPVAVKQLNAAGFQGHREWLAEVIFLGQFRHSHLVRLLGYCCEDEERLLVYEFMPRGSLENHLFRRISATLPWGTRLKVAIGAAKGLAFLHAASTPVIYRDFKASNILLDSDFTAKLSDFGLAKMGPEGEDTHVTTRVMGTHGYAAPEYVQTGHLNVKSDVYSFGVVLLELXTGRRAMEHXRGRSAHADQQLKARGLDPXLPQRRQPPXALHHGPEAGGPLLRQGRAXRGAAGRAVHRAAAAGQAAHGGCRRRARQAAGAQGHGRHRRPXARHRARRRAERHLRQDPRGGQGRRRRRVAPEERVLQAALVILTAGPPACHVVHVS

SEQ ID NO: 16939 - protein, 442 aa, Zea mays subsp. mays
  peptide (1)..(442): Ceres Seq. ID no. 12415077
  misc_feature (72)..(299): Homolog of NCBI NO: 30679085 NR Description: protein kinase family [Arabidopsis thaliana]
  misc_feature (37)..(299): Homolog of NCBI NO: 15238553 NR Description: serine/threonine protein kinase-like; protein id:
  misc_feature (37)..(299): Homolog of NCBI NO: 10176804 NR Description: serine/threonine protein kinase-like [Arabidopsis
  misc_feature (40)..(299): Homolog of NCBI NO: 37534008 NR Description: putative serine/threonine protein kinase
  misc_feature (73)..(299): Homolog of NCBI NO: 14484938 NR Description: auxin-regulated dual specificity cytosolic kinase
  misc_feature (67)..(137): Homolog of NCBI NO: 27436752 NR Description: Putative serine/threonine protein kinase
  misc_feature (137)..(299): Homolog of NCBI NO: 27436752 NR Description: Putative serine/threonine protein kinase
  misc_feature (25)..(324): Homolog of NCBI NO: 30013675 NR Description: Avr9/Cf-9 rapidly elicited protein 264 [Nicotiana
  misc_feature (1)..(299): Homolog of NCBI NO: 15225019 NR Description: putative protein kinase
  misc_feature (1)..(302): Homolog of NCBI NO: 15220535 NR Description: serine/threonine protein kinase, putative
  misc_feature (289)..(289): Xaa is any aa, unknown or other
  misc_feature (298)..(298): Xaa is any aa, unknown or other
  misc_feature (317)..(317): Xaa is any aa, unknown or other
  misc_feature (326)..(326): Xaa is any aa, unknown or other
  misc_feature (345)..(345): Xaa is any aa, unknown or other
  misc_feature (387)..(387): Xaa is any aa, unknown or other
MLASATKCCAAEDAAVAPDGLARCRPQQSELSRRLASFRRLSSLANSPASAAGTDKDGGSVKQAGEMAGPLQLHSFGLGELRGVTHDFASSFLLGEGGFGAVYKGFVDAGMRPGLAAQPVAVKQLNAAGFQGHREWLAEVIFLGQFRHSHLVRLLGYCCEDEERLLVYEFMPRGSLENHLFRRISATLPWGTRLKVAIGAAKGLAFLHAASTPVIYRDFKASNILLDSDFTAKLSDFGLAKMGPEGEDTHVTTRVMGTHGYAAPEYVQTGHLNVKSDVYSFGVVLLELXTGRRAMEHXRGRSAHADQQLKARGLDPXLPQRRQPPXALHHGPEAGGPLLRQGRAXRGAAGRAVHRAAAAGQAAHGGCRRRARQAAGAQGHGRHRRPXARHRARRRAERHLRQDPRGGQGRRRRRVAPEERVLQAALVILTAGPPACHVVHVS

SEQ ID NO: 16940 - protein, 376 aa, Zea mays subsp. mays
  peptide (1)..(376): Ceres Seq. ID no. 12415078
  misc_feature (6)..(233): Homolog of NCBI NO: 30679085 NR Description: protein kinase family [Arabidopsis thaliana]
  misc_feature (1)..(233): Homolog of NCBI NO: 15238553 NR Description: serine/threonine protein kinase-like; protein id:
  misc_feature (1)..(233): Homolog of NCBI NO: 10176804 NR Description: serine/threonine protein kinase-like [Arabidopsis
  misc_feature (1)..(233): Homolog of NCBI NO: 37534008 NR Description: putative serine/threonine protein kinase
  misc_feature (7)..(233): Homolog of NCBI NO: 14484938 NR Description: auxin-regulated dual specificity cytosolic kinase
  misc_feature (1)..(71): Homolog of NCBI NO: 27436752 NR Description: Putative serine/threonine protein kinase
  misc_feature (71)..(233): Homolog of NCBI NO: 27436752 NR Description: Putative serine/threonine protein kinase
  misc_feature (1)..(258): Homolog of NCBI NO: 30013675 NR Description: Avr9/Cf-9 rapidly elicited protein 264 [Nicotiana
  misc_feature (1)..(233): Homolog of NCBI NO: 15225019 NR Description: putative protein kinase
  misc_feature (1)..(236): Homolog of NCBI NO: 15220535 NR Description: serine/threonine protein kinase, putative
  misc_feature (223)..(223): Xaa is any aa, unknown or other
  misc_feature (232)..(232): Xaa is any aa, unknown or other
  misc_feature (251)..(251): Xaa is any aa, unknown or other
  misc_feature (260)..(260): Xaa is any aa, unknown or other
  misc_feature (279)..(279): Xaa is any aa, unknown or other
  misc_feature (321)..(321): Xaa is any aa, unknown or other
MAGPLQLHSFGLGELRGVTHDFASSFLLGEGGFGAVYKGFVDAGMRPGLAAQPVAVKQLNAAGFQGHREWLAEVIFLGQFRHSHLVRLLGYCCEDEERLLVYEFMPRGSLENHLFRRISATLPWGTRLKVAIGAAKGLAFLHAASTPVIYRDFKASNILLDSDFTAKLSDFGLAKMGPEGEDTHVTTRVMGTHGYAAPEYVQTGHLNVKSDVYSFGVVLLELXTGRRAMEHXRGRSAHADQQLKARGLDPXLPQRRQPPXALHHGPEAGGPLLRQGRAXRGAAGRAVHRAAAAGQAAHGGCRRRARQAAGAQGHGRHRRPXARHRARRRAERHLRQDPRGGQGRRRRRVAPEERVLQAALVILTAGPPACHVVHVS

SEQ ID NO: 16941 - DNA, 456 bp, Zea mays subsp. mays
  misc_feature (1)..(456): Ceres Seq. ID no. 1667754
  misc_feature: MA Experiment ID: 108534 Result: Up-regulated in Transcription
  misc_feature: MA Experiment 108534 PARAMETER Experiment Name: Zm_4deg_Cold_P Parameter: Age (hr) Value: 8
  misc_feature: MA Experiment 108534 PARAMETER Experiment Name: Zm_4deg_Cold_P Parameter: Organism Value: Zea mays
  misc_feature: MA Experiment 108534 PARAMETER Experiment Name: Zm_4deg_Cold_P Parameter: Plant Line Value: 35A19
  misc_feature: MA Experiment 108534 PARAMETER Experiment Name: Zm_4deg_Cold_P Parameter: Temperature (deg C) Value: 4 vs. 22
  misc_feature: MA Experiment 108534 PARAMETER Experiment Name: Zm_4deg_Cold_P Parameter: Timepoint (hr) Value: 6
  misc_feature: MA Experiment 108534 PARAMETER Experiment Name: Zm_4deg_Cold_P Parameter: Tissue Value: Aerial
  misc_feature: MA Experiment ID: 108597 Result: Up-regulated in Transcription
  misc_feature: MA Experiment 108597 PARAMETER Experiment Name: Zm_100uM_ABA_P Parameter: Age (day) Value: 9
  misc_feature: MA Experiment 108597 PARAMETER Experiment Name: Zm_100uM_ABA_P Parameter: Organism Value: Zea mays
  misc_feature: MA Experiment 108597 PARAMETER Experiment Name: Zm_100uM_ABA_P Parameter: Plant Line Value: 35A19
  misc_feature: MA Experiment 108597 PARAMETER Experiment Name: Zm_100uM_ABA_P Parameter: Timepoint (hr) Value: 24
  misc_feature: MA Experiment 108597 PARAMETER Experiment Name: Zm_100uM_ABA_P Parameter: Tissue Value: Aerial
  misc_feature: MA Experiment 108597 PARAMETER Experiment Name: Zm_100uM_ABA_P Parameter: Treatment Value: 100uM ABA vs. No Treatment
  misc_feature: MA Experiment ID: 108687 Result: Up-regulated in Transcription
  misc_feature: MA Experiment 108687 PARAMETER Experiment Name: Zm_Embryos-Flowers__P Parameter: Tissue Value: Embryo vs. Aerial+
  misc_feature: MA Experiment ID: 108688 Result: Down-regulated in Transcription
  misc_feature: MA Experiment 108688 PARAMETER Experiment Name: Zm_Embryos-Flowers__P Parameter: Tissue Value: Immature Flowers vs. Aerial+
  misc_feature: MA Experiment ID: 108689 Result: Up-regulated in Transcription
  misc_feature: MA Experiment 108689 PARAMETER Experiment Name: Zm_Drought_Roots_P Parameter: Age (day) Value: 9
  misc_feature: MA Experiment 108689 PARAMETER Experiment Name: Zm_Drought_Roots_P Parameter: Organism Value: Zea mays
  misc_feature: MA Experiment 108689 PARAMETER Experiment Name: Zm_Drought_Roots_P Parameter: Plant Line Value: 35A19
  misc_feature: MA Experiment 108689 PARAMETER Experiment Name: Zm_Drought_Roots_P Parameter: Timepoint (hr) Value: 24
  misc_feature: MA Experiment 108689 PARAMETER Experiment Name: Zm_Drought_Roots_P Parameter: Tissue Value: Roots
  misc_feature: MA Experiment 108689 PARAMETER Experiment Name: Zm_Drought_Roots_P Parameter: Treatment Value: Drought vs. No Drought
  misc_feature: MA Experiment ID: 20000535 Result: Up-regulated in Transcription
  misc_feature: MA Experiment 20000535 PARAMETER Experiment Name: Zm_Hybrid_Seed_Dev_P Parameter: DAP Value: 30 vs. 12
  misc_feature: MA Experiment 20000535 PARAMETER Experiment Name: Zm_Hybrid_Seed_Dev_P Parameter: Organism Value: Zea mays
  misc_feature: MA Experiment 20000535 PARAMETER Experiment Name: Zm_Hybrid_Seed_Dev_P Parameter: Plant Line Value: 35A19
  misc_feature: MA Experiment 20000535 PARAMETER Experiment Name: Zm_Hybrid_Seed_Dev_P Parameter: Tissue Value: Embryo vs. Unfert Floret
aagagcctcctacccatggtaatctattctaggatcttttactgaaaccaaacatacatgcagaacaaggcatatttctgtaaggtgaacccagacgaccttgtgtttggaggctgggacatcagcagcatgaacctggcagatgccatgaccagggccaaggtgctggacattgacctgcagaagcagctcaggccctacatggagtccatggtgccacttcccggtgtctatgatccggacttcatcgccgctaaccagggctctcgtgccaacaatgtcatcaagggcaccaagaaagaacaggtggagcagatcatcaaagatatcagggagtttaaggagaagaacaaagtggacaaggtagttgtgctgtggactgcaaacactgaaaggtacagcaatgtatgtgctggtctcaacgacacaatggagaatctgctggcatctgtggac

SEQ ID NO: 16942 - protein, 133 aa, Zea mays subsp. mays
  peptide (1)..(133): Ceres Seq. ID no. 1667755
  misc_feature (1)..(132): Pfam Name: Myo-inositol-1-phosphate synthase Pfam Description: Myo-inositol-1-phosphate synthase
  misc_feature (1)..(132): Homolog of NCBI NO: 14548088 NR Description: Inositol-3-phosphate synthase
  misc_feature (1)..(132): Homolog of NCBI NO: 32492882 NR Description: myo-inositol-1-phosphate synthase INO1 [Xerophyta
  misc_feature (1)..(132): Homolog of NCBI NO: 7488491 NR Description: inositol-3-phosphate synthase (EC 5.5.1.4)
  misc_feature (1)..(132): Homolog of NCBI NO: 14548099 NR Description: Inositol-3-phosphate synthase
  misc_feature (1)..(132): Homolog of NCBI NO: 18181983 NR Description: myo-inositol-1-phosphate synthase [Avena sativa]
  misc_feature (1)..(132): Homolog of NCBI NO: 14548089 NR Description: Inositol-3-phosphate synthase
  misc_feature (1)..(132): Homolog of NCBI NO: 14548096 NR Description: Inositol-3-phosphate synthase
  misc_feature (1)..(132): Homolog of NCBI NO: 14548091 NR Description: Inositol-3-phosphate synthase
  misc_feature (1)..(132): Homolog of NCBI NO: 14548094 NR Description: Inositol-3-phosphate synthase
  misc_feature (1)..(132): Homolog of NCBI NO: 11762100 NR Description: myo-inositol 1-phosphate synthase [Zea mays]
MQNKAYFCKVNPDDLVFGGWDISSMNLADAMTRAKVLDIDLQKQLRPYMESMVPLPGVYDPDFIAANQGSRANNVIKGTKKEQVEQIIKDIREFKEKNKVDKVVVLWTANTERYSNVCAGLNDTMENLLASVD

SEQ ID NO: 16943 - protein, 109 aa, Zea mays subsp. mays
  peptide (1)..(109): Ceres Seq. ID no. 1667756
  misc_feature (1)..(108): Pfam Name: Myo-inositol-1-phosphate synthase Pfam Description: Myo-inositol-1-phosphate synthase
  misc_feature (1)..(108): Homolog of NCBI NO: 7488491 NR Description: inositol-3-phosphate synthase (EC 5.5.1.4)
  misc_feature (1)..(108): Homolog of NCBI NO: 14548091 NR Description: Inositol-3-phosphate synthase
  misc_feature (1)..(108): Homolog of NCBI NO: 14548099 NR Description: Inositol-3-phosphate synthase
  misc_feature (1)..(108): Homolog of NCBI NO: 14548096 NR Description: Inositol-3-phosphate synthase
  misc_feature (1)..(108): Homolog of NCBI NO: 18181983 NR Description: myo-inositol-1-phosphate synthase [Avena sativa]
  misc_feature (1)..(108): Homolog of NCBI NO: 14548089 NR Description: Inositol-3-phosphate synthase
  misc_feature (1)..(108): Homolog of NCBI NO: 14548088 NR Description: Inositol-3-phosphate synthase
  misc_feature (1)..(108): Homolog of NCBI NO: 32492882 NR Description: myo-inositol-1-phosphate synthase INO1 [Xerophyta
  misc_feature (1)..(108): Homolog of NCBI NO: 14548094 NR Description: Inositol-3-phosphate synthase
  misc_feature (1)..(108): Homolog of NCBI NO: 11762100 NR Description: myo-inositol 1-phosphate synthase [Zea mays]
MNLADAMTRAKVLDIDLQKQLRPYMESMVPLPGVYDPDFIAANQGSRANNVIKGTKKEQVEQIIKDIREFKEKNKVDKVVVLWTANTERYSNVCAGLNDTMENLLASVD

SEQ ID NO: 16944 - protein, 103 aa, Zea mays subsp. mays
  peptide (1)..(103): Ceres Seq. ID no. 1667757
  misc_feature (1)..(102): Pfam Name: Myo-inositol-1-phosphate synthase Pfam Description: Myo-inositol-1-phosphate synthase
  misc_feature (1)..(102): Homolog of NCBI NO: 7488491 NR Description: inositol-3-phosphate synthase (EC 5.5.1.4)
  misc_feature (1)..(102): Homolog of NCBI NO: 14548091 NR Description: Inositol-3-phosphate synthase
  misc_feature (1)..(102): Homolog of NCBI NO: 14548099 NR Description: Inositol-3-phosphate synthase
  misc_feature (1)..(102): Homolog of NCBI NO: 14548096 NR Description: Inositol-3-phosphate synthase
  misc_feature (1)..(102): Homolog of NCBI NO: 18181983 NR Description: myo-inositol-1-phosphate synthase [Avena sativa]
  misc_feature (1)..(102): Homolog of NCBI NO: 14548089 NR Description: Inositol-3-phosphate synthase
  misc_feature (1)..(102): Homolog of NCBI NO: 14548088 NR Description: Inositol-3-phosphate synthase
  misc_feature (1)..(102): Homolog of NCBI NO: 32492882 NR Description: myo-inositol-1-phosphate synthase INO1 [Xerophyta
  misc_feature (1)..(102): Homolog of NCBI NO: 14548094 NR Description: Inositol-3-phosphate synthase
  misc_feature (1)..(102): Homolog of NCBI NO: 11762100 NR Description: myo-inositol 1-phosphate synthase [Zea mays]
MTRAKVLDIDLQKQLRPYMESMVPLPGVYDPDFIAANQGSRANNVIKGTKKEQVEQIIKDIREFKEKNKVDKVVVLWTANTERYSNVCAGLNDTMENLLASVD

SEQ ID NO: 16945 - DNA, 1016 bp, Zea mays subsp. mays
  misc_feature (1)..(1016): Ceres Seq. ID no. 12355029
  misc_feature: MA Experiment ID: 108504 Result: Up-regulated in Transcription
  misc_feature: MA Experiment 108504 PARAMETER Experiment Name: Zm_Drought_P Parameter: Age (day) Value: 8
  misc_feature: MA Experiment 108504 PARAMETER Experiment Name: Zm_Drought_P Parameter: Organism Value: Zea mays
  misc_feature: MA Experiment 108504 PARAMETER Experiment Name: Zm_Drought_P Parameter: Plant Line Value: 35A19
  misc_feature: MA Experiment 108504 PARAMETER Experiment Name: Zm_Drought_P Parameter: Timepoint (hr) Value: 12
  misc_feature: MA Experiment 108504 PARAMETER Experiment Name: Zm_Drought_P Parameter: Tissue Value: Aerial
  misc_feature: MA Experiment 108504 PARAMETER Experiment Name: Zm_Drought_P Parameter: Treatment Value: Drought vs. No Drought
  misc_feature: MA Experiment ID: 108523 Result: Up-regulated in Transcription
  misc_feature: MA Experiment 108523 PARAMETER Experiment Name: Zm_42deg_Heat_P Parameter: Age (day) Value: 8
  misc_feature: MA Experiment 108523 PARAMETER Experiment Name: Zm_42deg_Heat_P Parameter: Organism Value: Zea mays
  misc_feature: MA Experiment 108523 PARAMETER Experiment Name: Zm_42deg_Heat_P Parameter: Plant Line Value: 35A19
  misc_feature: MA Experiment 108523 PARAMETER Experiment Name: Zm_42deg_Heat_P Parameter: Temperature (deg C) Value: 42 vs. 22
  misc_feature: MA Experiment 108523 PARAMETER Experiment Name: Zm_42deg_Heat_P Parameter: Timepoint (hr) Value: 6
  misc_feature: MA Experiment 108523 PARAMETER Experiment Name: Zm_42deg_Heat_P Parameter: Tissue Value: Aerial
  misc_feature: MA Experiment ID: 108527 Result: Up-regulated in Transcription
  misc_feature: MA Experiment 108527 PARAMETER Experiment Name: Zm_5mM_NO_P Parameter: Age (day) Value: 8
  misc_feature: MA Experiment 108527 PARAMETER Experiment Name: Zm_5mM_NO_P Parameter: Organism Value: Zea mays
  misc_feature: MA Experiment 108527 PARAMETER Experiment Name: Zm_5mM_NO_P Parameter: Plant Line Value: 35A19
  misc_feature: MA Experiment 108527 PARAMETER Experiment Name: Zm_5mM_NO_P Parameter: Timepoint (hr) Value: 6
  misc_feature: MA Experiment 108527 PARAMETER Experiment Name: Zm_5mM_NO_P Parameter: Tissue Value: Aerial
  misc_feature: MA Experiment 108527 PARAMETER Experiment Name: Zm_5mM_NO_P Parameter: Treatment Value: 5mM NO vs. No Treatment
  misc_feature: MA Experiment ID: 108535 Result: Down-regulated in Transcription
  misc_feature: MA Experiment 108535 PARAMETER Experiment Name: Zm_Meristem_P Parameter: Age (day) Value: 8
  misc_feature: MA Experiment 108535 PARAMETER Experiment Name: Zm_Meristem_P Parameter: Organism Value: Zea mays
  misc_feature: MA Experiment 108535 PARAMETER Experiment Name: Zm_Meristem_P Parameter: Plant Line Value: 35A19
  misc_feature: MA Experiment 108535 PARAMETER Experiment Name: Zm_Meristem_P Parameter: Tissue Value: Root Meristem vs. Above Root Meristem
  misc_feature: MA Experiment ID: 108540 Result: Up-regulated in Transcription
  misc_feature: MA Experiment 108540 PARAMETER Experiment Name: Zm_20percent_PEG_P Parameter: Age (day) Value: 8
  misc_feature: MA Experiment 108540 PARAMETER Experiment Name: Zm_20percent_PEG_P Parameter: Organism Value: Zea mays
  misc_feature: MA Experiment 108540 PARAMETER Experiment Name: Zm_20percent_PEG_P Parameter: Plant Line Value: 35A19
  misc_feature: MA Experiment 108540 PARAMETER Experiment Name: Zm_20percent_PEG_P Parameter: Timepoint (hr) Value: 6
  misc_feature: MA Experiment 108540 PARAMETER Experiment Name: Zm_20percent_PEG_P Parameter: Tissue Value: Aerial
  misc_feature: MA Experiment 108540 PARAMETER Experiment Name: Zm_20percent_PEG_P Parameter: Treatment Value: 20percent PEG vs. No Treatment
  misc_feature: MA Experiment ID: 108559 Result: Up-regulated in Transcription
  misc_feature: MA Experiment 108559 PARAMETER Experiment Name: Zm_5mM_NO_P Parameter: Age (day) Value: 8
  misc_feature: MA Experiment 108559 PARAMETER Experiment Name: Zm_5mM_NO_P Parameter: Organism Value: Zea mays
  misc_feature: MA Experiment 108559 PARAMETER Experiment Name: Zm_5mM_NO_P Parameter: Plant Line Value: 35A19
  misc_feature: MA Experiment 108559 PARAMETER Experiment Name: Zm_5mM_NO_P Parameter: Timepoint (hr) Value: 12
  misc_feature: MA Experiment 108559 PARAMETER Experiment Name: Zm_5mM_NO_P Parameter: Tissue Value: Aerial
  misc_feature: MA Experiment 108559 PARAMETER Experiment Name: Zm_5mM_NO_P Parameter: Treatment Value: 5mM NO vs. No Treatment
  misc_feature: MA Experiment ID: 108687 Result: Up-regulated in Transcription
  misc_feature: MA Experiment 108687 PARAMETER Experiment Name: Zm_Embryos-Flowers__P Parameter: Tissue Value: Embryo vs. Aerial+
  misc_feature: MA Experiment ID: 108689 Result: Up-regulated in Transcription
  misc_feature: MA Experiment 108689 PARAMETER Experiment Name: Zm_Drought_Roots_P Parameter: Age (day) Value: 9
  misc_feature: MA Experiment 108689 PARAMETER Experiment Name: Zm_Drought_Roots_P Parameter: Organism Value: Zea mays
  misc_feature: MA Experiment 108689 PARAMETER Experiment Name: Zm_Drought_Roots_P Parameter: Plant Line Value: 35A19
  misc_feature: MA Experiment 108689 PARAMETER Experiment Name: Zm_Drought_Roots_P Parameter: Timepoint (hr) Value: 24
  misc_feature: MA Experiment 108689 PARAMETER Experiment Name: Zm_Drought_Roots_P Parameter: Tissue Value: Roots
  misc_feature: MA Experiment 108689 PARAMETER Experiment Name: Zm_Drought_Roots_P Parameter: Treatment Value: Drought vs. No Drought
  misc_feature: MA Experiment ID: 20000488 Result: Down-regulated in Transcription
  misc_feature: MA Experiment 20000488 PARAMETER Experiment Name: Zm_50mM_NH4NO3_L_to_H_P Parameter: Organism Value: Zea mays
  misc_feature: MA Experiment 20000488 PARAMETER Experiment Name: Zm_50mM_NH4NO3_L_to_H_P Parameter: Timepoint (hr) Value: 8
  misc_feature: MA Experiment 20000488 PARAMETER Experiment Name: Zm_50mM_NH4NO3_L_to_H_P Parameter: Tissue Value: Leaves
  misc_feature: MA Experiment 20000488 PARAMETER Experiment Name: Zm_50mM_NH4NO3_L_to_H_P Parameter: Treatment Value: 50mM NH4NO3 vs. 100mM Mannitol
  misc_feature: MA Experiment ID: 20001605 Result: Down-regulated in Transcription
  misc_feature: MA Experiment 20001605 PARAMETER Experiment Name: Zm_50ppm_KNO3_L-to-H_P Parameter: Age (day) Value: 19
  misc_feature: MA Experiment 20001605 PARAMETER Experiment Name: Zm_50ppm_KNO3_L-to-H_P Parameter: Organism Value: Zea mays
  misc_feature: MA Experiment 20001605 PARAMETER Experiment Name: Zm_50ppm_KNO3_L-to-H_P Parameter: Plant Line Value: 35A19
  misc_feature: MA Experiment 20001605 PARAMETER Experiment Name: Zm_50ppm_KNO3_L-to-H_P Parameter: Timepoint (hr) Value: 4
  misc_feature: MA Experiment 20001605 PARAMETER Experiment Name: Zm_50ppm_KNO3_L-to-H_P Parameter: Tissue Value: Shoots
  misc_feature: MA Experiment 20001605 PARAMETER Experiment Name: Zm_50ppm_KNO3_L-to-H_P Parameter: Treatment Value: 50ppm KNO3 vs. 50ppm KCl
ctggtgttcttctataccacgcgtccacgccactgctaagctgctccccgttcgccaggtcggcgaccaggcgaaacgtgctgctgcaagaagaagaataggtacacagacagcatgtccggagttcaggcgatgccggcggccgtgggcgtggcggggctgagagggtcagggttggttagcagcagcagtaccggcttgttcgccggcgactgcaagaggaaggctcgtcgcccggcgtgctcggcctgggccctcaggcagagccggatcggcagcaggagcaggagcaagaggggcctcggcatcgtctgcaacctcgcgggacagtacgaggattccttcgacgacgtccagcggcaactgatgaactacttcacctacaaggccgtgaggaccgtgctgacccagctctacgagctgaacccgcccgagctaccgctggttctacaacttcgtcgctgtcaacaagcctaccgacggcaagcatttcctccgtgctctcgggcaaggagaggcaggagctcgcagagcgagtgatggtcaccaggcttcacctgtacgggaaatggataaagaaatgcgaccatgccaagacgtacgagaagatctccgacgagaacctggcgctgatgcgggagcggctgatggagacggtcatctggccgaccgacgacagcagcacggagaagatcggctgatgcctgatgcctgccgagtcctttcgggttgctgatcaagcttagctccttctattagcatgtagagcagcactctgggtttctctatcagtcagtcagtcagccagccagtcagtgggttgtatataatcggagttgtagtagacagtatacatttctctgggcaggcaatcactgtttgaggtgttaacagtgccgttttgccctcccaattaagcctctacagtcggtctaagtgaagcaaaaatgcttaccttgtagtagctaaatttacatgtgcggggatatacgttgtaatagaatatttctgcgccc

SEQ ID NO: 16946 - protein, 141 aa, Zea mays subsp. mays
  peptide (1)..(141): Ceres Seq. ID no. 12355030
  misc_feature (49)..(106): Homolog of NCBI NO: 33146778 NR Description: unknown protein [Oryza sativa (japonica
  misc_feature (49)..(107): Homolog of NCBI NO: 18420050 NR Description: Expressed protein
  misc_feature (1)..(106): Homolog of NCBI NO: 30103018 NR Description: unknown protein [Oryza sativa (japonica
MSGVQAMPAAVGVAGLRGSGLVSSSSTGLFAGDCKRKARRPACSAWALRQSRIGSRSRSKRGLGIVCNLAGQYEDSFDDVQRQLMNYFTYKAVRTVLTQLYELNPPELPLVLQLRRCQQAYRRQAFPPCSRARRGRSSQSE

SEQ ID NO: 16947 - protein, 135 aa, Zea mays subsp. mays
  peptide (1)..(135): Ceres Seq. ID no. 12355031
  misc_feature (43)..(100): Homolog of NCBI NO: 33146778 NR Description: unknown protein [Oryza sativa (japonica
  misc_feature (43)..(101): Homolog of NCBI NO: 18420050 NR Description: Expressed protein
  misc_feature (1)..(100): Homolog of NCBI NO: 30103018 NR Description: unknown protein [Oryza sativa (japonica
MPAAVGVAGLRGSGLVSSSSTGLFAGDCKRKARRPACSAWALRQSRIGSRSRSKRGLGIVCNLAGQYEDSFDDVQRQLMNYFTYKAVRTVLTQLYELNPPELPLVLQLRRCQQAYRRQAFPPCSRARRGRSSQSE

SEQ ID NO: 16948 - DNA, 1830 bp, Zea mays subsp. mays
  misc_feature (1)..(1830): Ceres Seq. ID no. 12390089
  misc_feature: MA Experiment ID: 108528 Result: Up-regulated in Transcription
  misc_feature: MA Experiment 108528 PARAMETER Experiment Name: Zm_Imbibed_Seeds_P Parameter: Age (day) Value: 5 vs. 2
  misc_feature: MA Experiment 108528 PARAMETER Experiment Name: Zm_Imbibed_Seeds_P Parameter: Organism Value: Zea mays
  misc_feature: MA Experiment 108528 PARAMETER Experiment Name: Zm_Imbibed_Seeds_P Parameter: Plant Line Value: 35A19
  misc_feature: MA Experiment 108528 PARAMETER Experiment Name: Zm_Imbibed_Seeds_P Parameter: Tissue Value: Aerial vs. Embryo
  misc_feature: MA Experiment ID: 108530 Result: Up-regulated in Transcription
  misc_feature: MA Experiment 108530 PARAMETER Experiment Name: Zm_Imbibed_Seeds_P Parameter: Age (day) Value: 6 vs. 2
  misc_feature: MA Experiment 108530 PARAMETER Experiment Name: Zm_Imbibed_Seeds_P Parameter: Organism Value: Zea mays
  misc_feature: MA Experiment 108530 PARAMETER Experiment Name: Zm_Imbibed_Seeds_P Parameter: Plant Line Value: 35A19
  misc_feature: MA Experiment 108530 PARAMETER Experiment Name: Zm_Imbibed_Seeds_P Parameter: Tissue Value: Aerial vs. Embryo
  misc_feature: MA Experiment ID: 108536 Result: Down-regulated in Transcription
  misc_feature: MA Experiment 108536 PARAMETER Experiment Name: Zm_Meristem_P Parameter: Age (day) Value: 8
  misc_feature: MA Experiment 108536 PARAMETER Experiment Name: Zm_Meristem_P Parameter: Organism Value: Zea mays
  misc_feature: MA Experiment 108536 PARAMETER Experiment Name: Zm_Meristem_P Parameter: Plant Line Value: 35A19
  misc_feature: MA Experiment 108536 PARAMETER Experiment Name: Zm_Meristem_P Parameter: Tissue Value: Shoot Meristem vs. Above Shoot Meristem
  misc_feature: MA Experiment ID: 108545 Result: Up-regulated in Transcription
  misc_feature: MA Experiment 108545 PARAMETER Experiment Name: Zm_Imbibed_Seeds_P Parameter: Age (day) Value: 3 vs. 2
  misc_feature: MA Experiment 108545 PARAMETER Experiment Name: Zm_Imbibed_Seeds_P Parameter: Organism Value: Zea mays
  misc_feature: MA Experiment 108545 PARAMETER Experiment Name: Zm_Imbibed_Seeds_P Parameter: Plant Line Value: 35A19
  misc_feature: MA Experiment 108545 PARAMETER Experiment Name: Zm_Imbibed_Seeds_P Parameter: Tissue Value: Aerial vs. Embryo
  misc_feature: MA Experiment ID: 108546 Result: Down-regulated in Transcription
  misc_feature: MA Experiment 108546 PARAMETER Experiment Name: Zm_Imbibed_Seeds_P Parameter: Age (day) Value: 3 vs. 2
  misc_feature: MA Experiment 108546 PARAMETER Experiment Name: Zm_Imbibed_Seeds_P Parameter: Organism Value: Zea mays
  misc_feature: MA Experiment 108546 PARAMETER Experiment Name: Zm_Imbibed_Seeds_P Parameter: Plant Line Value: 35A19
  misc_feature: MA Experiment 108546 PARAMETER Experiment Name: Zm_Imbibed_Seeds_P Parameter: Tissue Value: Roots vs. Embryo
  misc_feature: MA Experiment ID: 108547 Result: Up-regulated in Transcription
  misc_feature: MA Experiment 108547 PARAMETER Experiment Name: Zm_Imbibed_Seeds_P Parameter: Age (day) Value: 4 vs. 2
  misc_feature: MA Experiment 108547 PARAMETER Experiment Name: Zm_Imbibed_Seeds_P Parameter: Organism Value: Zea mays
  misc_feature: MA Experiment 108547 PARAMETER Experiment Name: Zm_Imbibed_Seeds_P Parameter: Plant Line Value: 35A19
  misc_feature: MA Experiment 108547 PARAMETER Experiment Name: Zm_Imbibed_Seeds_P Parameter: Tissue Value: Aerial vs. Embryo
  misc_feature: MA Experiment ID: 108559 Result: Down-regulated in Transcription
  misc_feature: MA Experiment 108559 PARAMETER Experiment Name: Zm_5mM_NO_P Parameter: Age (day) Value: 8
  misc_feature: MA Experiment 108559 PARAMETER Experiment Name: Zm_5mM_NO_P Parameter: Organism Value: Zea mays
  misc_feature: MA Experiment 108559 PARAMETER Experiment Name: Zm_5mM_NO_P Parameter: Plant Line Value: 35A19
  misc_feature: MA Experiment 108559 PARAMETER Experiment Name: Zm_5mM_NO_P Parameter: Timepoint (hr) Value: 12
  misc_feature: MA Experiment 108559 PARAMETER Experiment Name: Zm_5mM_NO_P Parameter: Tissue Value: Aerial
  misc_feature: MA Experiment 108559 PARAMETER Experiment Name: Zm_5mM_NO_P Parameter: Treatment Value: 5mM NO vs. No Treatment
  misc_feature: MA Experiment ID: 108687 Result: Down-regulated in Transcription
  misc_feature: MA Experiment 108687 PARAMETER Experiment Name: Zm_Embryos-Flowers__P Parameter: Tissue Value: Embryo vs. Aerial+
  misc_feature: MA Experiment ID: 20000480 Result: Down-regulated in Transcription
  misc_feature: MA Experiment 20000480 PARAMETER Experiment Name: Zm_Drought_P Parameter: Age (day) Value: 11
  misc_feature: MA Experiment 20000480 PARAMETER Experiment Name: Zm_Drought_P Parameter: Organism Value: Zea mays
  misc_feature: MA Experiment 20000480 PARAMETER Experiment Name: Zm_Drought_P Parameter: Plant Line Value: 35A19
  misc_feature: MA Experiment 20000480 PARAMETER Experiment Name: Zm_Drought_P Parameter: Timepoint (hr) Value: 72
  misc_feature: MA Experiment 20000480 PARAMETER Experiment Name: Zm_Drought_P Parameter: Tissue Value: Aerial
  misc_feature: MA Experiment 20000480 PARAMETER Experiment Name: Zm_Drought_P Parameter: Treatment Value: Drought vs. No Drought
  misc_feature: MA Experiment ID: 20000535 Result: Down-regulated in Transcription
  misc_feature: MA Experiment 20000535 PARAMETER Experiment Name: Zm_Hybrid_Seed_Dev_P Parameter: DAP Value: 30 vs. 12
  misc_feature: MA Experiment 20000535 PARAMETER Experiment Name: Zm_Hybrid_Seed_Dev_P Parameter: Organism Value: Zea mays
  misc_feature: MA Experiment 20000535 PARAMETER Experiment Name: Zm_Hybrid_Seed_Dev_P Parameter: Plant Line Value: 35A19
  misc_feature: MA Experiment 20000535 PARAMETER Experiment Name: Zm_Hybrid_Seed_Dev_P Parameter: Tissue Value: Embryo vs. Unfert Floret
  misc_feature: MA Experiment ID: 20000626 Result: Down-regulated in Transcription
  misc_feature: MA Experiment 20000626 PARAMETER Experiment Name: Zm_Herbicide-Treatments_P Parameter: Timepoint (hr) Value: 12
  misc_feature: MA Experiment 20000626 PARAMETER Experiment Name: Zm_Herbicide-Treatments_P Parameter: Tissue Value: Aerial
  misc_feature: MA Experiment 20000626 PARAMETER Experiment Name: Zm_Herbicide-Treatments_P Parameter: Treatment Value: Roundup vs. No Treatment
  misc_feature: MA Experiment ID: 20001608 Result: Up-regulated in Transcription
  misc_feature: MA Experiment 20001608 PARAMETER Experiment Name: Zm_50ppm_KNO3_L-to-H_P Parameter: Age (day) Value: 21
  misc_feature: MA Experiment 20001608 PARAMETER Experiment Name: Zm_50ppm_KNO3_L-to-H_P Parameter: Organism Value: Zea mays
  misc_feature: MA Experiment 20001608 PARAMETER Experiment Name: Zm_50ppm_KNO3_L-to-H_P Parameter: Plant Line Value: 35A19
  misc_feature: MA Experiment 20001608 PARAMETER Experiment Name: Zm_50ppm_KNO3_L-to-H_P Parameter: Timepoint (hr) Value: 48
  misc_feature: MA Experiment 20001608 PARAMETER Experiment Name: Zm_50ppm_KNO3_L-to-H_P Parameter: Tissue Value: Shoots
  misc_feature: MA Experiment 20001608 PARAMETER Experiment Name: Zm_50ppm_KNO3_L-to-H_P Parameter: Treatment Value: 50ppm KNO3 vs. 50ppm KCl
gcacgagaccattacctagaacatcctaatcgaaaaactgtctcgtcggctcgtcgctccgtagaccccgcgcctccgcctccccgccactcgccggaggctgccgccatcgttatgccatggccgtcatcctctcctccgcggcgccaacgatactgactcgtcccacgcgccctcggaggcagccgaggagcggcctccgcgggggcctcgcgcgcctctcagctgcgctcggcctcgcgcacgcgggcgccggcgccggcgccgcactcgccgcgccgctctcctacgaggagatgctgcgcctctcgtccgactccggcggtgatgttggcgggttcgcgctcccggagctcggcctcgacgggctcgttgacttcgtcaacgataaccctctcgtcgtcgcggcaggcgtcgcggccatcgcagtgccgcttctccttgcgcagcttctcggcggaggcggcagctccaagcccctactccgtcctgtccgccaaggcggcctaccagcggctgctcgaggagcccgacgcgcagctcgtcgacatcaggccgctcaaggatgcacgagaggccggcacgcctgatctcaaggaggctaagaagaaggctgctgccgtaccttacaacggggaggacaaaaacggattcttgaaaaagttgacactaaagttcaaggacccggagaacaccacgctgatcatccttgacaaatttgatgggaactccgaactagttgctgagcttgtgacagccaatggttacaaagctgcttttgcagtgaaggatggtgcagaaggaagccgaggatggaagagcagtaaccttccctggaaggctccgccaaaaggattcagctttgacttgggcgaattatttggggatggttcagatggtttgcctgtgacaattggtctcgctgcagctactggtttgggagtacttgcctacacagagattgaaactttgctacagtttttggggtcagctgctgttgttcagctagtggtaaccaaactcttgtatgccgaggatcgacaaaagacacttaaacagatcgatgagttctttaacaagaaggttgctccgaaggagcttattgacgaaataaaggaaatcgggcaggctctactacctttacctggcgatgctaaaagccaaccagcactagcaacagcgactcaagttgctgccacacaaacagctgcaccagcagaggacgctaccgcagaagccaccacggaatcagatcctgcaacgccaacacctctttcaccttatacaaattacccagatctcaagccgccatcaacccctacgccaccgtcagtggagtctgaagtcgagacgaaggctagcagcaccgtgactgaaggaccagcagtggtcaattctgcacctatagcagacgctgccacgggatcatctcctgccactactaggcccagacctcagtcaccataccctaattatccagatttcaagccaccatcctcgccttcaccgtcagcaccttaatttggcaagagtacaagaaaccgggtctagaggatattaaagaagttgagttgttcatatggagccggcatctcactagaggtgtatgttgtactatgagcgtgacagtgtggctaagtcactgtggcgagttttctgcagcagtaaatatatgatgtaatgttcattagttatcaatgtgctatgattttctttttgttgtcttattttcgatacatgtaaatgtcgaataactagccgtgagaattgagagttcaagcctatagagcttgatatgtttgatcaaagtaaatgtatcttcttaaaaac

SEQ ID NO: 16949 - protein, 397 aa, Zea mays subsp. mays
  peptide (1)..(397): Ceres Seq. ID no. 12390090
  misc_feature (263)..(397): Pfam Name: Glycoprotein GG/GX Pfam Description: Glycoprotein GG/GX
  misc_feature (210)..(397): Homolog of NCBI NO: 21616072 NR Description: Tic62 protein [Pisum sativum]
  misc_feature (224)..(396): Homolog of NCBI NO: 30685117 NR Description: expressed protein [Arabidopsis thaliana]
  misc_feature (224)..(396): Homolog of NCBI NO: 9294698 NR Description: gb|AAC26697.1~gene_id:MCB22.6~similar to unknown
  misc_feature (52)..(174): Homolog of NCBI NO: 18404538 NR Description: rhodanese-like domain protein
  misc_feature (9)..(174): Homolog of NCBI NO: 21593550 NR Description: unknown [Arabidopsis thaliana]
  misc_feature (52)..(164): Homolog of NCBI NO: 34907512 NR Description: B1099D03.26 [Oryza sativa (japonica
  misc_feature (237)..(397): Homolog of NCBI NO: 25407077 NR Description: hypothetical protein AT4g01050 [imported] -
  misc_feature (49)..(333): Homolog of NCBI NO: 25407077 NR Description: hypothetical protein AT4g01050 [imported] -
  misc_feature (49)..(347): Homolog of NCBI NO: 7485232 NR Description: hypothetical protein A_IG002N01.31 - Arabidopsis
  misc_feature (49)..(397): Homolog of NCBI NO: 18411523 NR Description: expressed protein
MLAGSRSRSSASTGSLTSSTITLSSSRQASRPSQCRFSLRSFSAEAAAPSPYSVLSAKAAYQRLLEEPDAQLVDIRPLKDAREAGTPDLKEAKKKAAAVPYNGEDKNGFLKKLTLKFKDPENTTLIILDKFDGNSELVAELVTANGYKAAFAVKDGAEGSRGWKSSNLPWKAPPKGFSFDLGELFGDGSDGLPVTIGLAAATGLGVLAYTEIETLLQFLGSAAVVQLVVTKLLYAEDRQKTLKQIDEFFNKKVAPKELIDEIKEIGQALLPLPGDAKSQPALATATQVAATQTAAPAEDATAEATTESDPATPTPLSPYTNYPDLKPPSTPTPPSVESEVETKASSTVTEGPAVVNSAPIADAATGSSPATTRPRPQSPYPNYPDFKPPSSPSPSAP

SEQ ID NO: 16950 - DNA, 876 bp, Zea mays subsp. mays
  misc_feature (1)..(876): Ceres Seq. ID no. 12375045
  misc_feature: MA Experiment ID: 108504 Result: Down-regulated in Transcription
  misc_feature: MA Experiment 108504 PARAMETER Experiment Name: Zm_Drought_P Parameter: Age (day) Value: 8
  misc_feature: MA Experiment 108504 PARAMETER Experiment Name: Zm_Drought_P Parameter: Organism Value: Zea mays
  misc_feature: MA Experiment 108504 PARAMETER Experiment Name: Zm_Drought_P Parameter: Plant Line Value: 35A19
  misc_feature: MA Experiment 108504 PARAMETER Experiment Name: Zm_Drought_P Parameter: Timepoint (hr) Value: 12
  misc_feature: MA Experiment 108504 PARAMETER Experiment Name: Zm_Drought_P Parameter: Tissue Value: Aerial
  misc_feature: MA Experiment 108504 PARAMETER Experiment Name: Zm_Drought_P Parameter: Treatment Value: Drought vs. No Drought
  misc_feature: MA Experiment ID: 108515 Result: Down-regulated in Transcription
  misc_feature: MA Experiment 108515 PARAMETER Experiment Name: Zm_2mM_SA_P Parameter: Age (day) Value: 8
  misc_feature: MA Experiment 108515 PARAMETER Experiment Name: Zm_2mM_SA_P Parameter: Organism Value: Zea mays
  misc_feature: MA Experiment 108515 PARAMETER Experiment Name: Zm_2mM_SA_P Parameter: Plant Line Value: 35A19
  misc_feature: MA Experiment 108515 PARAMETER Experiment Name: Zm_2mM_SA_P Parameter: Timepoint (hr) Value: 12
  misc_feature: MA Experiment 108515 PARAMETER Experiment Name: Zm_2mM_SA_P Parameter: Tissue Value: Aerial
  misc_feature: MA Experiment 108515 PARAMETER Experiment Name: Zm_2mM_SA_P Parameter: Treatment Value: 2mM SA vs. No Treatment
  misc_feature: MA Experiment ID: 108523 Result: Down-regulated in Transcription
  misc_feature: MA Experiment 108523 PARAMETER Experiment Name: Zm_42deg_Heat_P Parameter: Age (day) Value: 8
  misc_feature: MA Experiment 108523 PARAMETER Experiment Name: Zm_42deg_Heat_P Parameter: Organism Value: Zea mays
  misc_feature: MA Experiment 108523 PARAMETER Experiment Name: Zm_42deg_Heat_P Parameter: Plant Line Value: 35A19
  misc_feature: MA Experiment 108523 PARAMETER Experiment Name: Zm_42deg_Heat_P Parameter: Temperature (deg C) Value: 42 vs. 22
  misc_feature: MA Experiment 108523 PARAMETER Experiment Name: Zm_42deg_Heat_P Parameter: Timepoint (hr) Value: 6
  misc_feature: MA Experiment 108523 PARAMETER Experiment Name: Zm_42deg_Heat_P Parameter: Tissue Value: Aerial
  misc_feature: MA Experiment ID: 108527 Result: Down-regulated in Transcription
  misc_feature: MA Experiment 108527 PARAMETER Experiment Name: Zm_5mM_NO_P Parameter: Age (day) Value: 8
  misc_feature: MA Experiment 108527 PARAMETER Experiment Name: Zm_5mM_NO_P Parameter: Organism Value: Zea mays
  misc_feature: MA Experiment 108527 PARAMETER Experiment Name: Zm_5mM_NO_P Parameter: Plant Line Value: 35A19
  misc_feature: MA Experiment 108527 PARAMETER Experiment Name: Zm_5mM_NO_P Parameter: Timepoint (hr) Value: 6
  misc_feature: MA Experiment 108527 PARAMETER Experiment Name: Zm_5mM_NO_P Parameter: Tissue Value: Aerial
  misc_feature: MA Experiment 108527 PARAMETER Experiment Name: Zm_5mM_NO_P Parameter: Treatment Value: 5mM NO vs. No Treatment
  misc_feature: MA Experiment ID: 108535 Result: Up-regulated in Transcription
  misc_feature: MA Experiment 108535 PARAMETER Experiment Name: Zm_Meristem_P Parameter: Age (day) Value: 8
  misc_feature: MA Experiment 108535 PARAMETER Experiment Name: Zm_Meristem_P Parameter: Organism Value: Zea mays
  misc_feature: MA Experiment 108535 PARAMETER Experiment Name: Zm_Meristem_P Parameter: Plant Line Value: 35A19
  misc_feature: MA Experiment 108535 PARAMETER Experiment Name: Zm_Meristem_P Parameter: Tissue Value: Root Meristem vs. Above Root Meristem
  misc_feature: MA Experiment ID: 108536 Result: Down-regulated in Transcription
  misc_feature: MA Experiment 108536 PARAMETER Experiment Name: Zm_Meristem_P Parameter: Age (day) Value: 8
  misc_feature: MA Experiment 108536 PARAMETER Experiment Name: Zm_Meristem_P Parameter: Organism Value: Zea mays
  misc_feature: MA Experiment 108536 PARAMETER Experiment Name: Zm_Meristem_P Parameter: Plant Line Value: 35A19
  misc_feature: MA Experiment 108536 PARAMETER Experiment Name: Zm_Meristem_P Parameter: Tissue Value: Shoot Meristem vs. Above Shoot Meristem
  misc_feature: MA Experiment ID: 108544 Result: Down-regulated in Transcription
  misc_feature: MA Experiment ID: 108556 Result: Down-regulated in Transcription
  misc_feature: MA Experiment 108556 PARAMETER Experiment Name: Zm_Drought_P Parameter: Age (day) Value: 9
  misc_feature: MA Experiment 108556 PARAMETER Experiment Name: Zm_Drought_P Parameter: Organism Value: Zea mays
  misc_feature: MA Experiment 108556 PARAMETER Experiment Name: Zm_Drought_P Parameter: Plant Line Value: 35A19
  misc_feature: MA Experiment 108556 PARAMETER Experiment Name: Zm_Drought_P Parameter: Timepoint (hr) Value: 24
  misc_feature: MA Experiment 108556 PARAMETER Experiment Name: Zm_Drought_P Parameter: Tissue Value: Aerial
  misc_feature: MA Experiment 108556 PARAMETER Experiment Name: Zm_Drought_P Parameter: Treatment Value: Drought vs. No Drought
  misc_feature: MA Experiment ID: 108597 Result: Down-regulated in Transcription
  misc_feature: MA Experiment 108597 PARAMETER Experiment Name: Zm_100uM_ABA_P Parameter: Age (day) Value: 9
  misc_feature: MA Experiment 108597 PARAMETER Experiment Name: Zm_100uM_ABA_P Parameter: Organism Value: Zea mays
  misc_feature: MA Experiment 108597 PARAMETER Experiment Name: Zm_100uM_ABA_P Parameter: Plant Line Value: 35A19
  misc_feature: MA Experiment 108597 PARAMETER Experiment Name: Zm_100uM_ABA_P Parameter: Timepoint (hr) Value: 24
  misc_feature: MA Experiment 108597 PARAMETER Experiment Name: Zm_100uM_ABA_P Parameter: Tissue Value: Aerial
  misc_feature: MA Experiment 108597 PARAMETER Experiment Name: Zm_100uM_ABA_P Parameter: Treatment Value: 100uM ABA vs. No Treatment
  misc_feature: MA Experiment ID: 20000478 Result: Down-regulated in Transcription
  misc_feature: MA Experiment 20000478 PARAMETER Experiment Name: Zm_5mM_SA_P Parameter: Age (day) Value: 11
  misc_feature: MA Experiment 20000478 PARAMETER Experiment Name: Zm_5mM_SA_P Parameter: Organism Value: Zea mays
  misc_feature: MA Experiment 20000478 PARAMETER Experiment Name: Zm_5mM_SA_P Parameter: Plant Line Value: 35A19
  misc_feature: MA Experiment 20000478 PARAMETER Experiment Name: Zm_5mM_SA_P Parameter: Timepoint (hr) Value: 72
  misc_feature: MA Experiment 20000478 PARAMETER Experiment Name: Zm_5mM_SA_P Parameter: Tissue Value: Aerial
  misc_feature: MA Experiment 20000478 PARAMETER Experiment Name: Zm_5mM_SA_P Parameter: Treatment Value: 5mM SA vs. No Treatment
  misc_feature: MA Experiment ID: 20000479 Result: Down-regulated in Transcription
  misc_feature: MA Experiment 20000479 PARAMETER Experiment Name: Zm_Drought_P Parameter: Age (day) Value: 10
  misc_feature: MA Experiment 20000479 PARAMETER Experiment Name: Zm_Drought_P Parameter: Organism Value: Zea mays
  misc_feature: MA Experiment 20000479 PARAMETER Experiment Name: Zm_Drought_P Parameter: Plant Line Value: 35A19
  misc_feature: MA Experiment 20000479 PARAMETER Experiment Name: Zm_Drought_P Parameter: Timepoint (hr) Value: 48
  misc_feature: MA Experiment 20000479 PARAMETER Experiment Name: Zm_Drought_P Parameter: Tissue Value: Aerial
  misc_feature: MA Experiment 20000479 PARAMETER Experiment Name: Zm_Drought_P Parameter: Treatment Value: Drought vs. No Drought
  misc_feature: MA Experiment ID: 20000488 Result: Up-regulated in Transcription
  misc_feature: MA Experiment 20000488 PARAMETER Experiment Name: Zm_50mM_NH4NO3_L_to_H_P Parameter: Organism Value: Zea mays
  misc_feature: MA Experiment 20000488 PARAMETER Experiment Name: Zm_50mM_NH4NO3_L_to_H_P Parameter: Timepoint (hr) Value: 8
  misc_feature: MA Experiment 20000488 PARAMETER Experiment Name: Zm_50mM_NH4NO3_L_to_H_P Parameter: Tissue Value: Leaves
  misc_feature: MA Experiment 20000488 PARAMETER Experiment Name: Zm_50mM_NH4NO3_L_to_H_P Parameter: Treatment Value: 50mM NH4NO3 vs. 100mM Mannitol
  misc_feature: MA Experiment ID: 20000626 Result: Down-regulated in Transcription
  misc_feature: MA Experiment 20000626 PARAMETER Experiment Name: Zm_Herbicide-Treatments_P Parameter: Timepoint (hr) Value: 12
  misc_feature: MA Experiment 20000626 PARAMETER Experiment Name: Zm_Herbicide-Treatments_P Parameter: Tissue Value: Aerial
  misc_feature: MA Experiment 20000626 PARAMETER Experiment Name: Zm_Herbicide-Treatments_P Parameter: Treatment Value: Roundup vs. No Treatment
aatacgctattcttgctaatcttcaagcaggagagaaaaaagcataagctgagcatccatcaatggcggatgctggcaacgaggccgagggtctgacgctgttgggcctgcacgtgagccccttcgcgttgcgcgtgcgcatggcgctgagcctcaagggcctgagctacgagtacatcgagcaggacctgttccacaagggcgagctcctcctcagctcaaaccccgtgcacaagaaggtgcccgtgctcatccaccacggcaagcccatctgcgagtccctcgccgtcgtggagtacgtcgatgaggtctggcccggcgccgccgccaccatcctccccgccgacccccacggtcgcgccaccgctcgcttctgggccgcctacatcgacggcaagctgtttccggcgtggacagggatcatgaaggcggcgacggaggaagcgagggcggataagctgagggagacgcacgccgcggtcctcaacctggagaaggccttcgccgagatcagctctagctccagcaacgacggcgcggccttcttcggcggcgactccgtcgggtacctggacctcgcgctcgggtgctccctgccgtggttcggggcgctgcgcgccatgctcggcgtcgagatcatcgacgccgcccaggctccgctcctggtggcgtgggccgagcgatttggggagaccccggtggccaaggaggtgctgccgcagccggacgaggctgtggcctacgccaagaagattcaggcctactgggcttctgctaagaactgatgagcaccgaatcctgtcatgatgaaattgaagcagcaatacttgtataacactccaatcatggtgaataaaggcctctaaactgttggtt

SEQ ID NO: 16951 - protein, 240 aa, Zea mays subsp. mays
  peptide (1)..(240): Ceres Seq. ID no. 12375046
  misc_feature (92)..(212): Pfam Name: Glutathione S-transferase, C-terminal domain Pfam Description: Glutathione S-transferase, C-terminal domain
  misc_feature (13)..(240): Homolog of NCBI NO: 11385509 NR Description: glutathione S-transferase GST 29 [Zea mays]
  misc_feature (1)..(238): Homolog of NCBI NO: 33304610 NR Description: tau class GST protein 4 [Oryza sativa (indica
  misc_feature (1)..(238): Homolog of NCBI NO: 33304612 NR Description: tau class GST protein 3 [Oryza sativa (indica
  misc_feature (1)..(238): Homolog of NCBI NO: 37536280 NR Description: putative glutathione S-transferase
  misc_feature (1)..(238): Homolog of NCBI NO: 37536308 NR Description: putative glutathione S-transferase
  misc_feature (4)..(233): Homolog of NCBI NO: 11385517 NR Description: glutathione S-transferase GST 33 [Zea mays]
  misc_feature (4)..(238): Homolog of NCBI NO: 37536352 NR Description: putative glutathione S-transferase
  misc_feature (4)..(238): Homolog of NCBI NO: 37536354 NR Description: putative glutathione S-transferase
  misc_feature (9)..(237): Homolog of NCBI NO: 22022398 NR Description: glutathione-S-transferase Cla47 [Triticum
  misc_feature (1)..(240): Homolog of NCBI NO: 11385503 NR Description: glutathione S-transferase GST 26 [Zea mays]
MADAGNEAEGLTLLGLHVSPFALRVRMALSLKGLSYEYIEQDLFHKGELLLSSNPVHKKVPVLIHHGKPICESLAVVEYVDEVWPGAAATILPADPHGRATARFWAAYIDGKLFPAWTGIMKAATEEARADKLRETHAAVLNLEKAFAEISSSSSNDGAAFFGGDSVGYLDLALGCSLPWFGALRAMLGVEIIDAAQAPLLVAWAERFGETPVAKEVLPQPDEAVAYAKKIQAYWASAKN

SEQ ID NO: 16952 - protein, 214 aa, Zea mays subsp. mays
  peptide (1)..(214): Ceres Seq. ID no. 12375047
  misc_feature (66)..(186): Pfam Name: Glutathione S-transferase, C-terminal domain Pfam Description: Glutathione S-transferase, C-terminal domain
  misc_feature (1)..(214): Homolog of NCBI NO: 11385509 NR Description: glutathione S-transferase GST 29 [Zea mays]
  misc_feature (1)..(212): Homolog of NCBI NO: 33304610 NR Description: tau class GST protein 4 [Oryza sativa (indica
  misc_feature (1)..(212): Homolog of NCBI NO: 33304612 NR Description: tau class GST protein 3 [Oryza sativa (indica
  misc_feature (1)..(212): Homolog of NCBI NO: 37536280 NR Description: putative glutathione S-transferase
  misc_feature (1)..(212): Homolog of NCBI NO: 37536308 NR Description: putative glutathione S-transferase
  misc_feature (1)..(207): Homolog of NCBI NO: 11385517 NR Description: glutathione S-transferase GST 33 [Zea mays]
  misc_feature (1)..(212): Homolog of NCBI NO: 37536352 NR Description: putative glutathione S-transferase
  misc_feature (1)..(212): Homolog of NCBI NO: 37536354 NR Description: putative glutathione S-transferase
  misc_feature (1)..(211): Homolog of NCBI NO: 22022398 NR Description: glutathione-S-transferase Cla47 [Triticum
  misc_feature (1)..(214): Homolog of NCBI NO: 11385503 NR Description: glutathione S-transferase GST 26 [Zea mays]
MALSLKGLSYEYIEQDLFHKGELLLSSNPVHKKVPVLIHHGKPICESLAVVEYVDEVWPGAAATILPADPHGRATARFWAAYIDGKLFPAWTGIMKAATEEARADKLRETHAAVLNLEKAFAEISSSSSNDGAAFFGGDSVGYLDLALGCSLPWFGALRAMLGVEIIDAAQAPLLVAWAERFGETPVAKEVLPQPDEAVAYAKKIQAYWASAKN

SEQ ID NO: 16953 - protein, 120 aa, Zea mays subsp. mays
  peptide (1)..(120): Ceres Seq. ID no. 12375048
  misc_feature (1)..(92): Pfam Name: Glutathione S-transferase, C-terminal domain Pfam Description: Glutathione S-transferase, C-terminal domain
  misc_feature (1)..(120): Homolog of NCBI NO: 11385509 NR Description: glutathione S-transferase GST 29 [Zea mays]
  misc_feature (1)..(118): Homolog of NCBI NO: 33304610 NR Description: tau class GST protein 4 [Oryza sativa (indica
  misc_feature (1)..(118): Homolog of NCBI NO: 33304612 NR Description: tau class GST protein 3 [Oryza sativa (indica
  misc_feature (1)..(118): Homolog of NCBI NO: 37536280 NR Description: putative glutathione S-transferase
  misc_feature (1)..(118): Homolog of NCBI NO: 37536308 NR Description: putative glutathione S-transferase
  misc_feature (1)..(113): Homolog of NCBI NO: 11385517 NR Description: glutathione S-transferase GST 33 [Zea mays]
  misc_feature (1)..(118): Homolog of NCBI NO: 37536352 NR Description: putative glutathione S-transferase
  misc_feature (1)..(118): Homolog of NCBI NO: 37536354 NR Description: putative glutathione S-transferase
  misc_feature (1)..(117): Homolog of NCBI NO: 22022398 NR Description: glutathione-S-transferase Cla47 [Triticum
  misc_feature (1)..(120): Homolog of NCBI NO: 11385503 NR Description: glutathione S-transferase GST 26 [Zea mays]
MKAATEEARADKLRETHAAVLNLEKAFAEISSSSSNDGAAFFGGDSVGYLDLALGCSLPWFGALRAMLGVEIIDAAQAPLLVAWAERFGETPVAKEVLPQPDEAVAYAKKIQAYWASAKN

SEQ ID NO: 16954 - DNA, 1562 bp, Zea mays subsp. mays
  misc_feature (1)..(1562): Ceres Seq. ID no. 12364256
  misc_feature: MA Experiment ID: 108530 Result: Down-regulated in Transcription
  misc_feature: MA Experiment 108530 PARAMETER Experiment Name: Zm_Imbibed_Seeds_P Parameter: Age (day) Value: 6 vs. 2
  misc_feature: MA Experiment 108530 PARAMETER Experiment Name: Zm_Imbibed_Seeds_P Parameter: Organism Value: Zea mays
  misc_feature: MA Experiment 108530 PARAMETER Experiment Name: Zm_Imbibed_Seeds_P Parameter: Plant Line Value: 35A19
  misc_feature: MA Experiment 108530 PARAMETER Experiment Name: Zm_Imbibed_Seeds_P Parameter: Tissue Value: Aerial vs. Embryo
  misc_feature: MA Experiment ID: 108687 Result: Down-regulated in Transcription
  misc_feature: MA Experiment 108687 PARAMETER Experiment Name: Zm_Embryos-Flowers__P Parameter: Tissue Value: Embryo vs. Aerial+
gcacgagaccattacctagaacatcctaatcaaaaaccccactcgaaacaaatcccctcgtcatcgtccccaccgaaaccgcagtaccaccatacccgcgccgacgtgagtacgatggcctcctacttcgccggtccggccatcgtgccgtcgcagcacgccaccgcggcgcccgacaattccgcggtcgccaccccttctccggttaagtcgcgtgacccccgcttctccggatccgcctccaccaccgttcgtcacatcgcccgctccttcgccgccgccgaagccaccggtgatggcgaccttgtcatccctatcgacggcgtcgacgccaccaacgtttggattctggggagggtggtgagcgtggtgaacatggaggccagcgtgtcgttcacgctcgacgacggcaccgggaagatcgcgctcacgcggtggatcgctgaagatattgatgctaaggaagtggctttcgtccagaatggtatatacctcaaggttcaagttactctcgtagggtttcaaactaagcagtatggttttgctcgcgctattcggcctgttaccaatttcaatgaagtggcgctgcacttcattgattgtatttatttgcatttggaaaatgtacggcaaaagatgcaaggtcaattccctcgctccattcaagcaaatgtgtctacttatgagatgcaagctcaagttgctcacagtgttcaaacaaaatcacctgctcatatccccttttctggtggagctagagatcatcaagttgattttgctcctgaagtaaaccatgggcgattcccttcatcagttcaaacaaacacacctactcatgtacccttttctggtggagctagggaacagcaagttcactttactcctcaaccaaatcaattttcagcttacccaggtacaggtggtcatcagcacgatctgcagagtatggttttggaggttatgcaacgaccagatatacttgcacttgaaaatggagtacatgttgatgaagtggcaaggagacttggaatgccaagcgcacaaattatggtcaccgcccggcgtcttgtcaatttggcatgcctctgttccactattgatgattatcatttcaagtctattaaatgattgaccaatgttatcatcttcaagacttggcattttagattattggcagtttttaggtactgaatagcattcgcgtatatgctttaagtatgcacatctagtacatgcatttttctttgtacagagcactgaacacctgtttttagttgccaagctagttactcagattgtcagacatgcagatcggttagaaacttagaatgtcaaaccattggcatgctgcagttgctggatggatctgcttagtactgtttacttgtttactagaatgtcaaaccattgccaagcaagttactcatccatttcttttcatgcttccttccggttgtcatgcttgatcatcttttctaggcccctttttatttttttctcgaaaggcgtaggaaaactgcacccccatatattaagaagaatgaaagaaggttatgcttatg

SEQ ID NO: 16955 - protein, 375 aa, Zea mays subsp. mays
  peptide (1)..(375): Ceres Seq. ID no. 12364257
  misc_feature (130)..(188): Pfam Name: OB-fold nucleic acid binding domain Pfam Description: OB-fold nucleic acid binding domain
  misc_feature (106)..(211): Homolog of NCBI NO: 19074286 NR Description: REPLICATION FACTOR A PROTEIN 2 (32KDA SUBUNIT)
  misc_feature (81)..(206): Homolog of NCBI NO: 21627816 NR Description: possible replication factor-a protein
  misc_feature (43)..(285): Homolog of NCBI NO: 18396383 NR Description: putative replication factor A
  misc_feature (43)..(285): Homolog of NCBI NO: 6728969 NR Description: putative replication factor A [Arabidopsis
  misc_feature (39)..(280): Homolog of NCBI NO: 13516746 NR Description: replication protein A 30kDa
  misc_feature (39)..(280): Homolog of NCBI NO: 9801268 NR Description: replication protein A2 [Oryza sativa]
  misc_feature (291)..(375): Homolog of NCBI NO: 25347925 NR Description: probable replication protein A1 [imported] -
  misc_feature (41)..(208): Homolog of NCBI NO: 25347925 NR Description: probable replication protein A1 [imported] -
  misc_feature (282)..(375): Homolog of NCBI NO: 18400560 NR Description: putative replication protein A1
  misc_feature (41)..(221): Homolog of NCBI NO: 18400560 NR Description: putative replication protein A1
ARDHYLEHPNQKPHSKQIPSSSSPPKPQYHHTRADVSTMASYFAGPAIVPSQHATAAPDNSAVATPSPVKSRDPRFSGSASTTVRHIARSFAAAEATGDGDLVIPIDGVDATNVWILGRVVSVVNMEASVSFTLDDGTGKIALTRWIAEDIDAKEVAFVQNGIYLKVQVTLVGFQTKQYGFARAIRPVTNFNEVALHFIDCIYLHLENVRQKMQGQFPRSIQANVSTYEMQAQVAHSVQTKSPAHIPFSGGARDHQVDFAPEVNHGRFPSSVQTNTPTHVPFSGGAREQQVHFTPQPNQFSAYPGTGGHQHDLQSMVLEVMQRPDILALENGVHVDEVARRLGMPSAQIMVTARRLVNLACLCSTIDDYHFKSIK

SEQ ID NO: 16956 - protein, 337 aa, Zea mays subsp. mays
  peptide (1)..(337): Ceres Seq. ID no. 12364258
  misc_feature (92)..(150): Pfam Name: OB-fold nucleic acid binding domain Pfam Description: OB-fold nucleic acid binding domain
  misc_feature (68)..(173): Homolog of NCBI NO: 19074286 NR Description: REPLICATION FACTOR A PROTEIN 2 (32KDA SUBUNIT)
  misc_feature (43)..(168): Homolog of NCBI NO: 21627816 NR Description: possible replication factor-a protein
  misc_feature (5)..(247): Homolog of NCBI NO: 18396383 NR Description: putative replication factor A
  misc_feature (5)..(247): Homolog of NCBI NO: 6728969 NR Description: putative replication factor A [Arabidopsis
  misc_feature (1)..(242): Homolog of NCBI NO: 13516746 NR Description: replication protein A 30kDa
  misc_feature (1)..(242): Homolog of NCBI NO: 9801268 NR Description: replication protein A2 [Oryza sativa]
  misc_feature (253)..(337): Homolog of NCBI NO: 25347925 NR Description: probable replication protein A1 [imported] -
  misc_feature (3)..(170): Homolog of NCBI NO: 25347925 NR Description: probable replication protein A1 [imported] -
  misc_feature (244)..(337): Homolog of NCBI NO: 18400560 NR Description: putative replication protein A1
  misc_feature (3)..(183): Homolog of NCBI NO: 18400560 NR Description: putative replication protein A1
MASYFAGPAIVPSQHATAAPDNSAVATPSPVKSRDPRFSGSASTTVRHIARSFAAAEATGDGDLVIPIDGVDATNVWILGRVVSVVNMEASVSFTLDDGTGKIALTRWIAEDIDAKEVAFVQNGIYLKVQVTLVGFQTKQYGFARAIRPVTNFNEVALHFIDCIYLHLENVRQKMQGQFPRSIQANVSTYEMQAQVAHSVQTKSPAHIPFSGGARDHQVDFAPEVNHGRFPSSVQTNTPTHVPFSGGAREQQVHFTPQPNQFSAYPGTGGHQHDLQSMVLEVMQRPDILALENGVHVDEVARRLGMPSAQIMVTARRLVNLACLCSTIDDYHFKSIK

SEQ ID NO: 16957 - protein, 250 aa, Zea mays subsp. mays
  peptide (1)..(250): Ceres Seq. ID no. 12364259
  misc_feature (5)..(63): Pfam Name: OB-fold nucleic acid binding domain Pfam Description: OB-fold nucleic acid binding domain
  misc_feature (1)..(86): Homolog of NCBI NO: 19074286 NR Description: REPLICATION FACTOR A PROTEIN 2 (32KDA SUBUNIT)
  misc_feature (1)..(81): Homolog of NCBI NO: 21627816 NR Description: possible replication factor-a protein
  misc_feature (1)..(160): Homolog of NCBI NO: 18396383 NR Description: putative replication factor A
  misc_feature (1)..(160): Homolog of NCBI NO: 6728969 NR Description: putative replication factor A [Arabidopsis
  misc_feature (1)..(155): Homolog of NCBI NO: 13516746 NR Description: replication protein A 30kDa
  misc_feature (1)..(155): Homolog of NCBI NO: 9801268 NR Description: replication protein A2 [Oryza sativa]
  misc_feature (166)..(250): Homolog of NCBI NO: 25347925 NR Description: probable replication protein A1 [imported] -
  misc_feature (1)..(83): Homolog of NCBI NO: 25347925 NR Description: probable replication protein A1 [imported] -
  misc_feature (157)..(250): Homolog of NCBI NO: 18400560 NR Description: putative replication protein A1
  misc_feature (1)..(96): Homolog of NCBI NO: 18400560 NR Description: putative replication protein A1
MEASVSFTLDDGTGKIALTRWIAEDIDAKEVAFVQNGIYLKVQVTLVGFQTKQYGFARAIRPVTNFNEVALHFIDCIYLHLENVRQKMQGQFPRSIQANVSTYEMQAQVAHSVQTKSPAHIPFSGGARDHQVDFAPEVNHGRFPSSVQTNTPTHVPFSGGAREQQVHFTPQPNQFSAYPGTGGHQHDLQSMVLEVMQRPDILALENGVHVDEVARRLGMPSAQIMVTARRLVNLACLCSTIDDYHFKSIK

SEQ ID NO: 16958 - DNA, 848 bp, Zea mays subsp. mays
  misc_feature (1)..(848): Ceres Seq. ID no. 12374850
  misc_feature: MA Experiment ID: 108527 Result: Down-regulated in Transcription
  misc_feature: MA Experiment 108527 PARAMETER Experiment Name: Zm_5mM_NO_P Parameter: Age (day) Value: 8
  misc_feature: MA Experiment 108527 PARAMETER Experiment Name: Zm_5mM_NO_P Parameter: Organism Value: Zea mays
  misc_feature: MA Experiment 108527 PARAMETER Experiment Name: Zm_5mM_NO_P Parameter: Plant Line Value: 35A19
  misc_feature: MA Experiment 108527 PARAMETER Experiment Name: Zm_5mM_NO_P Parameter: Timepoint (hr) Value: 6
  misc_feature: MA Experiment 108527 PARAMETER Experiment Name: Zm_5mM_NO_P Parameter: Tissue Value: Aerial
  misc_feature: MA Experiment 108527 PARAMETER Experiment Name: Zm_5mM_NO_P Parameter: Treatment Value: 5mM NO vs. No Treatment
  misc_feature: MA Experiment ID: 108528 Result: Up-regulated in Transcription
  misc_feature: MA Experiment 108528 PARAMETER Experiment Name: Zm_Imbibed_Seeds_P Parameter: Age (day) Value: 5 vs. 2
  misc_feature: MA Experiment 108528 PARAMETER Experiment Name: Zm_Imbibed_Seeds_P Parameter: Organism Value: Zea mays
  misc_feature: MA Experiment 108528 PARAMETER Experiment Name: Zm_Imbibed_Seeds_P Parameter: Plant Line Value: 35A19
  misc_feature: MA Experiment 108528 PARAMETER Experiment Name: Zm_Imbibed_Seeds_P Parameter: Tissue Value: Aerial vs. Embryo
  misc_feature: MA Experiment ID: 108529 Result: Down-regulated in Transcription
  misc_feature: MA Experiment 108529 PARAMETER Experiment Name: Zm_Imbibed_Seeds_P Parameter: Age (day) Value: 5 vs. 2
  misc_feature: MA Experiment 108529 PARAMETER Experiment Name: Zm_Imbibed_Seeds_P Parameter: Organism Value: Zea mays
  misc_feature: MA Experiment 108529 PARAMETER Experiment Name: Zm_Imbibed_Seeds_P Parameter: Plant Line Value: 35A19
  misc_feature: MA Experiment 108529 PARAMETER Experiment Name: Zm_Imbibed_Seeds_P Parameter: Tissue Value: Roots vs. Embryo
  misc_feature: MA Experiment ID: 108530 Result: Up-regulated in Transcription
  misc_feature: MA Experiment 108530 PARAMETER Experiment Name: Zm_Imbibed_Seeds_P Parameter: Age (day) Value: 6 vs. 2
  misc_feature: MA Experiment 108530 PARAMETER Experiment Name: Zm_Imbibed_Seeds_P Parameter: Organism Value: Zea mays
  misc_feature: MA Experiment 108530 PARAMETER Experiment Name: Zm_Imbibed_Seeds_P Parameter: Plant Line Value: 35A19
  misc_feature: MA Experiment 108530 PARAMETER Experiment Name: Zm_Imbibed_Seeds_P Parameter: Tissue Value: Aerial vs. Embryo
  misc_feature: MA Experiment ID: 108536 Result: Down-regulated in Transcription
  misc_feature: MA Experiment 108536 PARAMETER Experiment Name: Zm_Meristem_P Parameter: Age (day) Value: 8
  misc_feature: MA Experiment 108536 PARAMETER Experiment Name: Zm_Meristem_P Parameter: Organism Value: Zea mays
  misc_feature: MA Experiment 108536 PARAMETER Experiment Name: Zm_Meristem_P Parameter: Plant Line Value: 35A19
  misc_feature: MA Experiment 108536 PARAMETER Experiment Name: Zm_Meristem_P Parameter: Tissue Value: Shoot Meristem vs. Above Shoot Meristem
  misc_feature: MA Experiment ID: 108543 Result: Up-regulated in Transcription
  misc_feature: MA Experiment ID: 108545 Result: Up-regulated in Transcription
  misc_feature: MA Experiment 108545 PARAMETER Experiment Name: Zm_Imbibed_Seeds_P Parameter: Age (day) Value: 3 vs. 2
  misc_feature: MA Experiment 108545 PARAMETER Experiment Name: Zm_Imbibed_Seeds_P Parameter: Organism Value: Zea mays
  misc_feature: MA Experiment 108545 PARAMETER Experiment Name: Zm_Imbibed_Seeds_P Parameter: Plant Line Value: 35A19
  misc_feature: MA Experiment 108545 PARAMETER Experiment Name: Zm_Imbibed_Seeds_P Parameter: Tissue Value: Aerial vs. Embryo
  misc_feature: MA Experiment ID: 108547 Result: Up-regulated in Transcription
  misc_feature: MA Experiment 108547 PARAMETER Experiment Name: Zm_Imbibed_Seeds_P Parameter: Age (day) Value: 4 vs. 2
  misc_feature: MA Experiment 108547 PARAMETER Experiment Name: Zm_Imbibed_Seeds_P Parameter: Organism Value: Zea mays
  misc_feature: MA Experiment 108547 PARAMETER Experiment Name: Zm_Imbibed_Seeds_P Parameter: Plant Line Value: 35A19
  misc_feature: MA Experiment 108547 PARAMETER Experiment Name: Zm_Imbibed_Seeds_P Parameter: Tissue Value: Aerial vs. Embryo
  misc_feature: MA Experiment ID: 108556 Result: Down-regulated in Transcription
  misc_feature: MA Experiment 108556 PARAMETER Experiment Name: Zm_Drought_P Parameter: Age (day) Value: 9
  misc_feature: MA Experiment 108556 PARAMETER Experiment Name: Zm_Drought_P Parameter: Organism Value: Zea mays
  misc_feature: MA Experiment 108556 PARAMETER Experiment Name: Zm_Drought_P Parameter: Plant Line Value: 35A19
  misc_feature: MA Experiment 108556 PARAMETER Experiment Name: Zm_Drought_P Parameter: Timepoint (hr) Value: 24
  misc_feature: MA Experiment 108556 PARAMETER Experiment Name: Zm_Drought_P Parameter: Tissue Value: Aerial
  misc_feature: MA Experiment 108556 PARAMETER Experiment Name: Zm_Drought_P Parameter: Treatment Value: Drought vs. No Drought
  misc_feature: MA Experiment ID: 108559 Result: Down-regulated in Transcription
  misc_feature: MA Experiment 108559 PARAMETER Experiment Name: Zm_5mM_NO_P Parameter: Age (day) Value: 8
  misc_feature: MA Experiment 108559 PARAMETER Experiment Name: Zm_5mM_NO_P Parameter: Organism Value: Zea mays
  misc_feature: MA Experiment 108559 PARAMETER Experiment Name: Zm_5mM_NO_P Parameter: Plant Line Value: 35A19
  misc_feature: MA Experiment 108559 PARAMETER Experiment Name: Zm_5mM_NO_P Parameter: Timepoint (hr) Value: 12
  misc_feature: MA Experiment 108559 PARAMETER Experiment Name: Zm_5mM_NO_P Parameter: Tissue Value: Aerial
  misc_feature: MA Experiment 108559 PARAMETER Experiment Name: Zm_5mM_NO_P Parameter: Treatment Value: 5mM NO vs. No Treatment
  misc_feature: MA Experiment ID: 108597 Result: Down-regulated in Transcription
  misc_feature: MA Experiment 108597 PARAMETER Experiment Name: Zm_100uM_ABA_P Parameter: Age (day) Value: 9
  misc_feature: MA Experiment 108597 PARAMETER Experiment Name: Zm_100uM_ABA_P Parameter: Organism Value: Zea mays
  misc_feature: MA Experiment 108597 PARAMETER Experiment Name: Zm_100uM_ABA_P Parameter: Plant Line Value: 35A19
  misc_feature: MA Experiment 108597 PARAMETER Experiment Name: Zm_100uM_ABA_P Parameter: Timepoint (hr) Value: 24
  misc_feature: MA Experiment 108597 PARAMETER Experiment Name: Zm_100uM_ABA_P Parameter: Tissue Value: Aerial
  misc_feature: MA Experiment 108597 PARAMETER Experiment Name: Zm_100uM_ABA_P Parameter: Treatment Value: 100uM ABA vs. No Treatment
  misc_feature: MA Experiment ID: 108687 Result: Down-regulated in Transcription
  misc_feature: MA Experiment 108687 PARAMETER Experiment Name: Zm_Embryos-Flowers__P Parameter: Tissue Value: Embryo vs. Aerial+
  misc_feature: MA Experiment ID: 20000479 Result: Down-regulated in Transcription
  misc_feature: MA Experiment 20000479 PARAMETER Experiment Name: Zm_Drought_P Parameter: Age (day) Value: 10
  misc_feature: MA Experiment 20000479 PARAMETER Experiment Name: Zm_Drought_P Parameter: Organism Value: Zea mays
  misc_feature: MA Experiment 20000479 PARAMETER Experiment Name: Zm_Drought_P Parameter: Plant Line Value: 35A19
  misc_feature: MA Experiment 20000479 PARAMETER Experiment Name: Zm_Drought_P Parameter: Timepoint (hr) Value: 48
  misc_feature: MA Experiment 20000479 PARAMETER Experiment Name: Zm_Drought_P Parameter: Tissue Value: Aerial
  misc_feature: MA Experiment 20000479 PARAMETER Experiment Name: Zm_Drought_P Parameter: Treatment Value: Drought vs. No Drought
  misc_feature: MA Experiment ID: 20000480 Result: Down-regulated in Transcription
  misc_feature: MA Experiment 20000480 PARAMETER Experiment Name: Zm_Drought_P Parameter: Age (day) Value: 11
  misc_feature: MA Experiment 20000480 PARAMETER Experiment Name: Zm_Drought_P Parameter: Organism Value: Zea mays
  misc_feature: MA Experiment 20000480 PARAMETER Experiment Name: Zm_Drought_P Parameter: Plant Line Value: 35A19
  misc_feature: MA Experiment 20000480 PARAMETER Experiment Name: Zm_Drought_P Parameter: Timepoint (hr) Value: 72
  misc_feature: MA Experiment 20000480 PARAMETER Experiment Name: Zm_Drought_P Parameter: Tissue Value: Aerial
  misc_feature: MA Experiment 20000480 PARAMETER Experiment Name: Zm_Drought_P Parameter: Treatment Value: Drought vs. No Drought
  misc_feature: MA Experiment ID: 20000535 Result: Down-regulated in Transcription
  misc_feature: MA Experiment 20000535 PARAMETER Experiment Name: Zm_Hybrid_Seed_Dev_P Parameter: DAP Value: 30 vs. 12
  misc_feature: MA Experiment 20000535 PARAMETER Experiment Name: Zm_Hybrid_Seed_Dev_P Parameter: Organism Value: Zea mays
  misc_feature: MA Experiment 20000535 PARAMETER Experiment Name: Zm_Hybrid_Seed_Dev_P Parameter: Plant Line Value: 35A19
  misc_feature: MA Experiment 20000535 PARAMETER Experiment Name: Zm_Hybrid_Seed_Dev_P Parameter: Tissue Value: Embryo vs. Unfert Floret
gcccgtgccccacttcatccgcgcgcgcgtcagagactcagagcccaagcatagacgtgcgccttcagcagcgcgcagcgacgtcacctgagcgcgcgacacgccccagcgtccacagttcactgcgcgcgcgtcgtgcaggacaccacaccatggcacctgccgcccctgctgccacgggcgcggcgagccccgccgtcaccaagggcggcggcaaggttgcagcacgctccgtcaggctggggctgcccgcgctgccgccgctgcccggcctcagcctcgccgcgcagggccagacccgggccgcgtcgtccttgtacaagcggctggcgagggacgtggtggccatggccgcgggggagccgcggcgcctcaggctgccaacgaggagctgaccgagttcgtcgacgcgttgaaaaaggagtgggacaggatcgaggacaagtacgcggtgaccacgctcgccgtcgccgccacgcttggcatgtggagcgccggtggagtagtgtcggcaatcgataggctccccgtggttcctggtctgatgcaggccgttggaattggatacagcgggtggttcgcgtaccgaaacctgctattcaagcctgacagggatgctttctttgcgaaggtcagggagatctacgaggatattatcagcgcttaacagatgggagcaccaatgcaaagctcatccaaattaatgaagttcactttaagacatccttctagtttgctgctgttcagttgtttttgctgtgatgtatttcagtgtagcttctaatttggtccttactcagtgcacgtatggataagtaatttggacgttaaatttagttttctggccc

SEQ ID NO: 16959 - protein, 130 aa, Zea mays subsp. mays
  peptide (1)..(130): Ceres Seq. ID no. 12374851
  misc_feature (50)..(120): Homolog of NCBI NO: 37536446 NR Description: hypothetical protein [Oryza sativa (japonica
PCPTSSARASETQSPSIDVRLQQRAATSPERATRPSVHSSLRARRAGHHTMAPAAPAATGAASPAVTKGGGKVAARSVRLGLPALPPLPGLSLAAQGQTRAASSLYKRLARDVVAMAAGEPRRLRLPTRS

SEQ ID NO: 16960 - protein, 80 aa, Zea mays subsp. mays
  peptide (1)..(80): Ceres Seq. ID no. 12374852
  misc_feature (1)..(70): Homolog of NCBI NO: 37536446 NR Description: hypothetical protein [Oryza sativa (japonica
MAPAAPAATGAASPAVTKGGGKVAARSVRLGLPALPPLPGLSLAAQGQTRAASSLYKRLARDVVAMAAGEPRRLRLPTRS

SEQ ID NO: 16961 - DNA, 1213 bp, Zea mays subsp. mays
  misc_feature (1)..(1213): Ceres Seq. ID no. 15175531
  misc_feature: MA Experiment ID: 108504 Result: Down-regulated in Transcription
  misc_feature: MA Experiment 108504 PARAMETER Experiment Name: Zm_Drought_P Parameter: Age (day) Value: 8
  misc_feature: MA Experiment 108504 PARAMETER Experiment Name: Zm_Drought_P Parameter: Organism Value: Zea mays
  misc_feature: MA Experiment 108504 PARAMETER Experiment Name: Zm_Drought_P Parameter: Plant Line Value: 35A19
  misc_feature: MA Experiment 108504 PARAMETER Experiment Name: Zm_Drought_P Parameter: Timepoint (hr) Value: 12
  misc_feature: MA Experiment 108504 PARAMETER Experiment Name: Zm_Drought_P Parameter: Tissue Value: Aerial
  misc_feature: MA Experiment 108504 PARAMETER Experiment Name: Zm_Drought_P Parameter: Treatment Value: Drought vs. No Drought
  misc_feature: MA Experiment ID: 108527 Result: Down-regulated in Transcription
  misc_feature: MA Experiment 108527 PARAMETER Experiment Name: Zm_5mM_NO_P Parameter: Age (day) Value: 8
  misc_feature: MA Experiment 108527 PARAMETER Experiment Name: Zm_5mM_NO_P Parameter: Organism Value: Zea mays
  misc_feature: MA Experiment 108527 PARAMETER Experiment Name: Zm_5mM_NO_P Parameter: Plant Line Value: 35A19
  misc_feature: MA Experiment 108527 PARAMETER Experiment Name: Zm_5mM_NO_P Parameter: Timepoint (hr) Value: 6
  misc_feature: MA Experiment 108527 PARAMETER Experiment Name: Zm_5mM_NO_P Parameter: Tissue Value: Aerial
  misc_feature: MA Experiment 108527 PARAMETER Experiment Name: Zm_5mM_NO_P Parameter: Treatment Value: 5mM NO vs. No Treatment
  misc_feature: MA Experiment ID: 108528 Result: Up-regulated in Transcription
  misc_feature: MA Experiment 108528 PARAMETER Experiment Name: Zm_Imbibed_Seeds_P Parameter: Age (day) Value: 5 vs. 2
  misc_feature: MA Experiment 108528 PARAMETER Experiment Name: Zm_Imbibed_Seeds_P Parameter: Organism Value: Zea mays
  misc_feature: MA Experiment 108528 PARAMETER Experiment Name: Zm_Imbibed_Seeds_P Parameter: Plant Line Value: 35A19
  misc_feature: MA Experiment 108528 PARAMETER Experiment Name: Zm_Imbibed_Seeds_P Parameter: Tissue Value: Aerial vs. Embryo
  misc_feature: MA Experiment ID: 108530 Result: Up-regulated in Transcription
  misc_feature: MA Experiment 108530 PARAMETER Experiment Name: Zm_Imbibed_Seeds_P Parameter: Age (day) Value: 6 vs. 2
  misc_feature: MA Experiment 108530 PARAMETER Experiment Name: Zm_Imbibed_Seeds_P Parameter: Organism Value: Zea mays
  misc_feature: MA Experiment 108530 PARAMETER Experiment Name: Zm_Imbibed_Seeds_P Parameter: Plant Line Value: 35A19
  misc_feature: MA Experiment 108530 PARAMETER Experiment Name: Zm_Imbibed_Seeds_P Parameter: Tissue Value: Aerial vs. Embryo
  misc_feature: MA Experiment ID: 108545 Result: Up-regulated in Transcription
  misc_feature: MA Experiment 108545 PARAMETER Experiment Name: Zm_Imbibed_Seeds_P Parameter: Age (day) Value: 3 vs. 2
  misc_feature: MA Experiment 108545 PARAMETER Experiment Name: Zm_Imbibed_Seeds_P Parameter: Organism Value: Zea mays
  misc_feature: MA Experiment 108545 PARAMETER Experiment Name: Zm_Imbibed_Seeds_P Parameter: Plant Line Value: 35A19
  misc_feature: MA Experiment 108545 PARAMETER Experiment Name: Zm_Imbibed_Seeds_P Parameter: Tissue Value: Aerial vs. Embryo
  misc_feature: MA Experiment ID: 108547 Result: Up-regulated in Transcription
  misc_feature: MA Experiment 108547 PARAMETER Experiment Name: Zm_Imbibed_Seeds_P Parameter: Age (day) Value: 4 vs. 2
  misc_feature: MA Experiment 108547 PARAMETER Experiment Name: Zm_Imbibed_Seeds_P Parameter: Organism Value: Zea mays
  misc_feature: MA Experiment 108547 PARAMETER Experiment Name: Zm_Imbibed_Seeds_P Parameter: Plant Line Value: 35A19
  misc_feature: MA Experiment 108547 PARAMETER Experiment Name: Zm_Imbibed_Seeds_P Parameter: Tissue Value: Aerial vs. Embryo
  misc_feature: MA Experiment ID: 108556 Result: Down-regulated in Transcription
  misc_feature: MA Experiment 108556 PARAMETER Experiment Name: Zm_Drought_P Parameter: Age (day) Value: 9
  misc_feature: MA Experiment 108556 PARAMETER Experiment Name: Zm_Drought_P Parameter: Organism Value: Zea mays
  misc_feature: MA Experiment 108556 PARAMETER Experiment Name: Zm_Drought_P Parameter: Plant Line Value: 35A19
  misc_feature: MA Experiment 108556 PARAMETER Experiment Name: Zm_Drought_P Parameter: Timepoint (hr) Value: 24
  misc_feature: MA Experiment 108556 PARAMETER Experiment Name: Zm_Drought_P Parameter: Tissue Value: Aerial
  misc_feature: MA Experiment 108556 PARAMETER Experiment Name: Zm_Drought_P Parameter: Treatment Value: Drought vs. No Drought
  misc_feature: MA Experiment ID: 108559 Result: Down-regulated in Transcription
  misc_feature: MA Experiment 108559 PARAMETER Experiment Name: Zm_5mM_NO_P Parameter: Age (day) Value: 8
  misc_feature: MA Experiment 108559 PARAMETER Experiment Name: Zm_5mM_NO_P Parameter: Organism Value: Zea mays
  misc_feature: MA Experiment 108559 PARAMETER Experiment Name: Zm_5mM_NO_P Parameter: Plant Line Value: 35A19
  misc_feature: MA Experiment 108559 PARAMETER Experiment Name: Zm_5mM_NO_P Parameter: Timepoint (hr) Value: 12
  misc_feature: MA Experiment 108559 PARAMETER Experiment Name: Zm_5mM_NO_P Parameter: Tissue Value: Aerial
  misc_feature: MA Experiment 108559 PARAMETER Experiment Name: Zm_5mM_NO_P Parameter: Treatment Value: 5mM NO vs. No Treatment
  misc_feature: MA Experiment ID: 108689 Result: Down-regulated in Transcription
  misc_feature: MA Experiment 108689 PARAMETER Experiment Name: Zm_Drought_Roots_P Parameter: Age (day) Value: 9
  misc_feature: MA Experiment 108689 PARAMETER Experiment Name: Zm_Drought_Roots_P Parameter: Organism Value: Zea mays
  misc_feature: MA Experiment 108689 PARAMETER Experiment Name: Zm_Drought_Roots_P Parameter: Plant Line Value: 35A19
  misc_feature: MA Experiment 108689 PARAMETER Experiment Name: Zm_Drought_Roots_P Parameter: Timepoint (hr) Value: 24
  misc_feature: MA Experiment 108689 PARAMETER Experiment Name: Zm_Drought_Roots_P Parameter: Tissue Value: Roots
  misc_feature: MA Experiment 108689 PARAMETER Experiment Name: Zm_Drought_Roots_P Parameter: Treatment Value: Drought vs. No Drought
  misc_feature: MA Experiment ID: 20000477 Result: Down-regulated in Transcription
  misc_feature: MA Experiment 20000477 PARAMETER Experiment Name: Zm_5mM_SA_P Parameter: Age (day) Value: 10
  misc_feature: MA Experiment 20000477 PARAMETER Experiment Name: Zm_5mM_SA_P Parameter: Organism Value: Zea mays
  misc_feature: MA Experiment 20000477 PARAMETER Experiment Name: Zm_5mM_SA_P Parameter: Plant Line Value: 35A19
  misc_feature: MA Experiment 20000477 PARAMETER Experiment Name: Zm_5mM_SA_P Parameter: Timepoint (hr) Value: 48
  misc_feature: MA Experiment 20000477 PARAMETER Experiment Name: Zm_5mM_SA_P Parameter: Tissue Value: Aerial
  misc_feature: MA Experiment 20000477 PARAMETER Experiment Name: Zm_5mM_SA_P Parameter: Treatment Value: 5mM SA vs. No Treatment
  misc_feature: MA Experiment ID: 20000478 Result: Down-regulated in Transcription
  misc_feature: MA Experiment 20000478 PARAMETER Experiment Name: Zm_5mM_SA_P Parameter: Age (day) Value: 11
  misc_feature: MA Experiment 20000478 PARAMETER Experiment Name: Zm_5mM_SA_P Parameter: Organism Value: Zea mays
  misc_feature: MA Experiment 20000478 PARAMETER Experiment Name: Zm_5mM_SA_P Parameter: Plant Line Value: 35A19
  misc_feature: MA Experiment 20000478 PARAMETER Experiment Name: Zm_5mM_SA_P Parameter: Timepoint (hr) Value: 72
  misc_feature: MA Experiment 20000478 PARAMETER Experiment Name: Zm_5mM_SA_P Parameter: Tissue Value: Aerial
  misc_feature: MA Experiment 20000478 PARAMETER Experiment Name: Zm_5mM_SA_P Parameter: Treatment Value: 5mM SA vs. No Treatment
  misc_feature: MA Experiment ID: 20000479 Result: Down-regulated in Transcription
  misc_feature: MA Experiment 20000479 PARAMETER Experiment Name: Zm_Drought_P Parameter: Age (day) Value: 10
  misc_feature: MA Experiment 20000479 PARAMETER Experiment Name: Zm_Drought_P Parameter: Organism Value: Zea mays
  misc_feature: MA Experiment 20000479 PARAMETER Experiment Name: Zm_Drought_P Parameter: Plant Line Value: 35A19
  misc_feature: MA Experiment 20000479 PARAMETER Experiment Name: Zm_Drought_P Parameter: Timepoint (hr) Value: 48
  misc_feature: MA Experiment 20000479 PARAMETER Experiment Name: Zm_Drought_P Parameter: Tissue Value: Aerial
  misc_feature: MA Experiment 20000479 PARAMETER Experiment Name: Zm_Drought_P Parameter: Treatment Value: Drought vs. No Drought
  misc_feature: MA Experiment ID: 20000480 Result: Down-regulated in Transcription
  misc_feature: MA Experiment 20000480 PARAMETER Experiment Name: Zm_Drought_P Parameter: Age (day) Value: 11
  misc_feature: MA Experiment 20000480 PARAMETER Experiment Name: Zm_Drought_P Parameter: Organism Value: Zea mays
  misc_feature: MA Experiment 20000480 PARAMETER Experiment Name: Zm_Drought_P Parameter: Plant Line Value: 35A19
  misc_feature: MA Experiment 20000480 PARAMETER Experiment Name: Zm_Drought_P Parameter: Timepoint (hr) Value: 72
  misc_feature: MA Experiment 20000480 PARAMETER Experiment Name: Zm_Drought_P Parameter: Tissue Value: Aerial
  misc_feature: MA Experiment 20000480 PARAMETER Experiment Name: Zm_Drought_P Parameter: Treatment Value: Drought vs. No Drought
  misc_feature: MA Experiment ID: 20000535 Result: Down-regulated in Transcription
  misc_feature: MA Experiment 20000535 PARAMETER Experiment Name: Zm_Hybrid_Seed_Dev_P Parameter: DAP Value: 30 vs. 12
  misc_feature: MA Experiment 20000535 PARAMETER Experiment Name: Zm_Hybrid_Seed_Dev_P Parameter: Organism Value: Zea mays
  misc_feature: MA Experiment 20000535 PARAMETER Experiment Name: Zm_Hybrid_Seed_Dev_P Parameter: Plant Line Value: 35A19
  misc_feature: MA Experiment 20000535 PARAMETER Experiment Name: Zm_Hybrid_Seed_Dev_P Parameter: Tissue Value: Embryo vs. Unfert Floret
aaccaaccaaaatcgtggctgcggctgtggacaatcggcagcttgcgagtagctccggtacggaggggatcatggaggaggggcggcaactggaagcggcggcgttcggttttccggcgccggtgcagccgggggccacgcgcgtggggtggatcggcatcggcgtcatgggcggcgccatggccaagcgcctcctcgcggcagggtacgcggtcaccgcgtacgctcgcacgccgtccagggcggagagcctcgtcgcggcgggcgcgagcctcgcggactcgccggccgccgtggccgccgcgtccgacgtggtgttcaccatggtcgggaaccccggcgacgtccgcgcggtggtcctggacccggccgccggggccctcgcgggcctccgccgcggcggcgtgctggtggactgcacgagctcctccccgtccctcgcgcgcgaggtcgccgcggccgcggccgcgggcgggctgccacgccgtcgacgcgccggtctccggaggcgacgtgggcgcgcgggacggcacgctggccgtcttcgccggcggcgacgaggccgtcgtcgcctggctcgcgccgctcttcgccagcctcggcagggcgacccgcatgggcgcgccgggcagcggccagagcagcaagatcgccaaccaggtcgcggtggccggcgcggtggtgggcctcggcgaggccgtgtccttcgcccgcgcggcggggctcgacgcgccgctgttcctcggcgcggtgtccaggggcgcggcctggtcgcgcgtcatggacgtcttcggcggccgcttgctccgccgcgagttcgcgtccgggggcagcgtacggtacatcgtcaaggacctcggcatggcgctggaggtcggagacggcggggaggaggaggtcaacgtgctgcctggagcggcgctgtaccggcagatgttctcggccatggtggccaatggcgacgcggacctgagcttgcagggactgatcaccgttatcgagcgcctgaacggcattgcaaagtagcgaaggctgcagcaggcaaggtgctgcttttttgttgatggagactgcaggaaaggtgttcgccggaatgcaacactggacccgaagacgcctgagcttgtgacatggacttgttttttgtattcaaaacactgtttcgagcttgatttgcgtttgtaatttcgcccctaaataaaactttgcttcc

SEQ ID NO: 16962 - protein, 353 aa, Zea mays subsp. mays
  peptide (1)..(353): Ceres Seq. ID no. 15175532
  misc_feature (46)..(156): Pfam Name: NAD binding domain of 6-phosphogluconate dehydrogenase Pfam Description: NAD binding domain of 6-phosphogluconate
  misc_feature (32)..(159): Homolog of NCBI NO: 15600778 NR Description: 3-hydroxyisobutyrate dehydrogenase, putative
  misc_feature (47)..(156): Homolog of NCBI NO: 22982959 NR Description: hypothetical protein [Burkholderia fungorum]
  misc_feature (47)..(159): Homolog of NCBI NO: 23113025 NR Description: hypothetical protein [Desulfitobacterium
  misc_feature (47)..(154): Homolog of NCBI NO: 28379084 NR Description: 3-hydroxyisobutyrate dehydrogenase
  misc_feature (47)..(155): Homolog of NCBI NO: 32472744 NR Description: 3-hydroxyisobutyrate dehydrogenase [Pirellula
  misc_feature (37)..(154): Homolog of NCBI NO: 30698779 NR Description: dehydrogenase -related [Arabidopsis thaliana]
  misc_feature (41)..(155): Homolog of NCBI NO: 15233455 NR Description: expressed protein [Arabidopsis thaliana]
  misc_feature (37)..(154): Homolog of NCBI NO: 25283629 NR Description: probable dehydrogenase F23N20.17
  misc_feature (37)..(154): Homolog of NCBI NO: 18409781 NR Description: dehydrogenase -related [Arabidopsis thaliana]
  misc_feature (40)..(156): Homolog of NCBI NO: 34909392 NR Description: putative dehydrogenase [Oryza sativa (japonica
PTKIVAAAVDNRQLASSSGTEGIMEEGRQLEAAAFGFPAPVQPGATRVGWIGIGVMGGAMAKRLLAAGYAVTAYARTPSRAESLVAAGASLADSPAAVAAASDVVFTMVGNPGDVRAVVLDPAAGALAGLRRGGVLVDCTSSSPSLAREVAAAAAAGGLPRRRRAGLRRRRGRAGRHAGRLRRRRRGRRRLARAALRQPRQGDPHGRAGQRPEQQDRQPGRGGRRGGGPRRGRVLRPRGGARRAAVPRRGVQGRGLVARHGRLRRPLAPPRVRVRGQRTVHRQGPRHGAGGRRRRGGGGQRAAWSGAVPADVLGHGGQWRRGPELAGTDHRYRAPERHCKVAKAAAGKVLLFC

SEQ ID NO: 16963 - protein, 341 aa, Zea mays subsp. mays
  peptide (1)..(341): Ceres Seq. ID no. 15175533
  misc_feature (157)..(291): Homolog of NCBI NO: 15600778 NR Description: 3-hydroxyisobutyrate dehydrogenase, putative
  misc_feature (163)..(330): Homolog of NCBI NO: 22982959 NR Description: hypothetical protein [Burkholderia fungorum]
  misc_feature (159)..(329): Homolog of NCBI NO: 23113025 NR Description: hypothetical protein [Desulfitobacterium
  misc_feature (161)..(332): Homolog of NCBI NO: 28379084 NR Description: 3-hydroxyisobutyrate dehydrogenase
  misc_feature (162)..(339): Homolog of NCBI NO: 32472744 NR Description: 3-hydroxyisobutyrate dehydrogenase [Pirellula
  misc_feature (157)..(340): Homolog of NCBI NO: 30698779 NR Description: dehydrogenase -related [Arabidopsis thaliana]
  misc_feature (160)..(340): Homolog of NCBI NO: 15233455 NR Description: expressed protein [Arabidopsis thaliana]
  misc_feature (145)..(340): Homolog of NCBI NO: 25283629 NR Description: probable dehydrogenase F23N20.17
  misc_feature (145)..(340): Homolog of NCBI NO: 18409781 NR Description: dehydrogenase -related [Arabidopsis thaliana]
  misc_feature (160)..(337): Homolog of NCBI NO: 34909392 NR Description: putative dehydrogenase [Oryza sativa (japonica
NQPKSWLRLWTIGSLRVAPVRRGSWRRGGNWKRRRSVFRRRCSRGPRAWGGSASASWAAPWPSASSRQGTRSPRTLARRPGRRASSRRARASRTRRPPWPPRPTWCSPWSGTPATSARWSWTRPPGPSRASAAAACWWTARAPPRPSRARSPRPRPRAGCHAVDAPVSGGDVGARDGTLAVFAGGDEAVVAWLAPLFASLGRATRMGAPGSGQSSKIANQVAVAGAVVGLGEAVSFARAAGLDAPLFLGAVSRGAAWSRVMDVFGGRLLRREFASGGSVRYIVKDLGMALEVGDGGEEEVNVLPGAALYRQMFSAMVANGDADLSLQGLITVIERLNGIAK

SEQ ID NO: 16964 - protein, 330 aa, Zea mays subsp. mays
  peptide (1)..(330): Ceres Seq. ID no. 15175534
  misc_feature (23)..(133): Pfam Name: NAD binding domain of 6-phosphogluconate dehydrogenase Pfam Description: NAD binding domain of 6-phosphogluconate
  misc_feature (9)..(136): Homolog of NCBI NO: 15600778 NR Description: 3-hydroxyisobutyrate dehydrogenase, putative
  misc_feature (24)..(133): Homolog of NCBI NO: 22982959 NR Description: hypothetical protein [Burkholderia fungorum]
  misc_feature (24)..(136): Homolog of NCBI NO: 23113025 NR Description: hypothetical protein [Desulfitobacterium
  misc_feature (24)..(131): Homolog of NCBI NO: 28379084 NR Description: 3-hydroxyisobutyrate dehydrogenase
  misc_feature (24)..(132): Homolog of NCBI NO: 32472744 NR Description: 3-hydroxyisobutyrate dehydrogenase [Pirellula
  misc_feature (14)..(131): Homolog of NCBI NO: 30698779 NR Description: dehydrogenase -related [Arabidopsis thaliana]
  misc_feature (18)..(132): Homolog of NCBI NO: 15233455 NR Description: expressed protein [Arabidopsis thaliana]
  misc_feature (14)..(131): Homolog of NCBI NO: 25283629 NR Description: probable dehydrogenase F23N20.17
  misc_feature (14)..(131): Homolog of NCBI NO: 18409781 NR Description: dehydrogenase -related [Arabidopsis thaliana]
  misc_feature (17)..(133): Homolog of NCBI NO: 34909392 NR Description: putative dehydrogenase [Oryza sativa (japonica
MEEGRQLEAAAFGFPAPVQPGATRVGWIGIGVMGGAMAKRLLAAGYAVTAYARTPSRAESLVAAGASLADSPAAVAAASDVVFTMVGNPGDVRAVVLDPAAGALAGLRRGGVLVDCTSSSPSLAREVAAAAAAGGLPRRRRAGLRRRRGRAGRHAGRLRRRRRGRRRLARAALRQPRQGDPHGRAGQRPEQQDRQPGRGGRRGGGPRRGRVLRPRGGARRAAVPRRGVQGRGLVARHGRLRRPLAPPRVRVRGQRTVHRQGPRHGAGGRRRRGGGGQRAAWSGAVPADVLGHGGQWRRGPELAGTDHRYRAPERHCKVAKAAAGKVLLFC

SEQ ID NO: 16965 - DNA, 743 bp, Zea mays subsp. mays
  misc_feature (1)..(743): Ceres Seq. ID no. 14301971
  misc_feature: MA Experiment ID: 108523 Result: Down-regulated in Transcription
  misc_feature: MA Experiment 108523 PARAMETER Experiment Name: Zm_42deg_Heat_P Parameter: Age (day) Value: 8
  misc_feature: MA Experiment 108523 PARAMETER Experiment Name: Zm_42deg_Heat_P Parameter: Organism Value: Zea mays
  misc_feature: MA Experiment 108523 PARAMETER Experiment Name: Zm_42deg_Heat_P Parameter: Plant Line Value: 35A19
  misc_feature: MA Experiment 108523 PARAMETER Experiment Name: Zm_42deg_Heat_P Parameter: Temperature (deg C) Value: 42 vs. 22
  misc_feature: MA Experiment 108523 PARAMETER Experiment Name: Zm_42deg_Heat_P Parameter: Timepoint (hr) Value: 6
  misc_feature: MA Experiment 108523 PARAMETER Experiment Name: Zm_42deg_Heat_P Parameter: Tissue Value: Aerial
  misc_feature: MA Experiment ID: 108527 Result: Down-regulated in Transcription
  misc_feature: MA Experiment 108527 PARAMETER Experiment Name: Zm_5mM_NO_P Parameter: Age (day) Value: 8
  misc_feature: MA Experiment 108527 PARAMETER Experiment Name: Zm_5mM_NO_P Parameter: Organism Value: Zea mays
  misc_feature: MA Experiment 108527 PARAMETER Experiment Name: Zm_5mM_NO_P Parameter: Plant Line Value: 35A19
  misc_feature: MA Experiment 108527 PARAMETER Experiment Name: Zm_5mM_NO_P Parameter: Timepoint (hr) Value: 6
  misc_feature: MA Experiment 108527 PARAMETER Experiment Name: Zm_5mM_NO_P Parameter: Tissue Value: Aerial
  misc_feature: MA Experiment 108527 PARAMETER Experiment Name: Zm_5mM_NO_P Parameter: Treatment Value: 5mM NO vs. No Treatment
  misc_feature: MA Experiment ID: 108535 Result: Down-regulated in Transcription
  misc_feature: MA Experiment 108535 PARAMETER Experiment Name: Zm_Meristem_P Parameter: Age (day) Value: 8
  misc_feature: MA Experiment 108535 PARAMETER Experiment Name: Zm_Meristem_P Parameter: Organism Value: Zea mays
  misc_feature: MA Experiment 108535 PARAMETER Experiment Name: Zm_Meristem_P Parameter: Plant Line Value: 35A19
  misc_feature: MA Experiment 108535 PARAMETER Experiment Name: Zm_Meristem_P Parameter: Tissue Value: Root Meristem vs. Above Root Meristem
  misc_feature: MA Experiment ID: 108544 Result: Up-regulated in Transcription
  misc_feature: MA Experiment ID: 20000492 Result: Down-regulated in Transcription
  misc_feature: MA Experiment 20000492 PARAMETER Experiment Name: Zm_Hybrid_Seed_Dev_P Parameter: DAP Value: 12
  misc_feature: MA Experiment 20000492 PARAMETER Experiment Name: Zm_Hybrid_Seed_Dev_P Parameter: Organism Value: Zea mays
  misc_feature: MA Experiment 20000492 PARAMETER Experiment Name: Zm_Hybrid_Seed_Dev_P Parameter: Plant Line Value: 35A19
  misc_feature: MA Experiment 20000492 PARAMETER Experiment Name: Zm_Hybrid_Seed_Dev_P Parameter: Tissue Value: Fert Kernel vs. Unfert Floret
aaggtttaatgtcattagacgactttgacgatgctgaaggcggctccaagctggaacgattctcacgggagacgctggatccatcattgtcatggaaggacgtggagtggctcaagtccatcaccagcctgccgattctgctcaagggcatcgtcaccgcggaagacgcgaggaaggccgtggaggcgtgggcggccggcttgatcgtgtccaaccacggcgcccggcagctggactatgcgccggccaccatctcggcgctcgaagaggtggttaaggcggtggcgggggctgtgccggtgctggtggacggcggcgtccggcgcggcaccgacgtgttgaaggcgctggcgctcggcgccaaggcagtcatggtgggcaggccggtgttctttgggctggcggcgcgcggggaagccggcgcgaggcacgtgatcgagatgttgaacaaggagctggagttggccatggcgctctgcggctgccgtagcgtcgcggaggtcaccagggcgcacgtccagaccgagggcgaccggatcagggccctgctgtgacttataaataagcgaccatatccgaggccgaccaccgtgctgtctgggttgcgatatgatttatatgatacgtgagggcatgtgatcgattgttgcctccacacagataagcttactattgccagagcctgggctggactatgctttcagtgattatctaaatcaaatagactgaatgctaaagggaac

SEQ ID NO: 16966 - protein, 183 aa, Zea mays subsp. mays
  peptide (1)..(183): Ceres Seq. ID no. 14301972
  misc_feature (33)..(174): Pfam Name: FMN-dependent dehydrogenase Pfam Description: FMN-dependent dehydrogenase
  misc_feature (3)..(179): Homolog of NCBI NO: 34395056 NR Description: putative glycolate oxidase
  misc_feature (10)..(177): Homolog of NCBI NO: 27549566 NR Description: glycolate oxidase [Zantedeschia aethiopica]
  misc_feature (3)..(182): Homolog of NCBI NO: 15229497 NR Description: glycolate oxidase [Arabidopsis thaliana]
  misc_feature (14)..(183): Homolog of NCBI NO: 21618144 NR Description: glycolate oxidase, putative [Arabidopsis thaliana]
  misc_feature (14)..(183): Homolog of NCBI NO: 15231792 NR Description: glycolate oxidase -related [Arabidopsis thaliana]
  misc_feature (14)..(183): Homolog of NCBI NO: 9294640 NR Description: glycolate oxidase [Arabidopsis thaliana]
  misc_feature (14)..(183): Homolog of NCBI NO: 21537253 NR Description: glycolate oxidase, putative [Arabidopsis thaliana]
  misc_feature (14)..(183): Homolog of NCBI NO: 15231789 NR Description: glycolate oxidase -related [Arabidopsis thaliana]
  misc_feature (33)..(183): Homolog of NCBI NO: 34906684 NR Description: putative (S)-2-hydroxy-acid oxidase
  misc_feature (1)..(183): Homolog of NCBI NO: 33146942 NR Description: putative (S)-2-hydroxy-acid oxidase
GLMSLDDFDDAEGGSKLERFSRETLDPSLSWKDVEWLKSITSLPILLKGIVTAEDARKAVEAWAAGLIVSNHGARQLDYAPATISALEEVVKAVAGAVPVLVDGGVRRGTDVLKALALGAKAVMVGRPVFFGLAARGEAGARHVIEMLNKELELAMALCGCRSVAEVTRAHVQTEGDRIRALL

SEQ ID NO: 16967 - protein, 181 aa, Zea mays subsp. mays
  peptide (1)..(181): Ceres Seq. ID no. 14301973
  misc_feature (31)..(172): Pfam Name: FMN-dependent dehydrogenase Pfam Description: FMN-dependent dehydrogenase
  misc_feature (1)..(177): Homolog of NCBI NO: 34395056 NR Description: putative glycolate oxidase
  misc_feature (8)..(175): Homolog of NCBI NO: 27549566 NR Description: glycolate oxidase [Zantedeschia aethiopica]
  misc_feature (1)..(180): Homolog of NCBI NO: 15229497 NR Description: glycolate oxidase [Arabidopsis thaliana]
  misc_feature (12)..(181): Homolog of NCBI NO: 21618144 NR Description: glycolate oxidase, putative [Arabidopsis thaliana]
  misc_feature (12)..(181): Homolog of NCBI NO: 15231792 NR Description: glycolate oxidase -related [Arabidopsis thaliana]
  misc_feature (12)..(181): Homolog of NCBI NO: 9294640 NR Description: glycolate oxidase [Arabidopsis thaliana]
  misc_feature (12)..(181): Homolog of NCBI NO: 21537253 NR Description: glycolate oxidase, putative [Arabidopsis thaliana]
  misc_feature (12)..(181): Homolog of NCBI NO: 15231789 NR Description: glycolate oxidase -related [Arabidopsis thaliana]
  misc_feature (31)..(181): Homolog of NCBI NO: 34906684 NR Description: putative (S)-2-hydroxy-acid oxidase
  misc_feature (1)..(181): Homolog of NCBI NO: 33146942 NR Description: putative (S)-2-hydroxy-acid oxidase
MSLDDFDDAEGGSKLERFSRETLDPSLSWKDVEWLKSITSLPILLKGIVTAEDARKAVEAWAAGLIVSNHGARQLDYAPATISALEEVVKAVAGAVPVLVDGGVRRGTDVLKALALGAKAVMVGRPVFFGLAARGEAGARHVIEMLNKELELAMALCGCRSVAEVTRAHVQTEGDRIRALL

SEQ ID NO: 16968 - DNA, 1005 bp, Zea mays subsp. mays
  misc_feature (1)..(1005): Ceres Seq. ID no. 12354677
  misc_feature: MA Experiment ID: 108515 Result: Down-regulated in Transcription
  misc_feature: MA Experiment 108515 PARAMETER Experiment Name: Zm_2mM_SA_P Parameter: Age (day) Value: 8
  misc_feature: MA Experiment 108515 PARAMETER Experiment Name: Zm_2mM_SA_P Parameter: Organism Value: Zea mays
  misc_feature: MA Experiment 108515 PARAMETER Experiment Name: Zm_2mM_SA_P Parameter: Plant Line Value: 35A19
  misc_feature: MA Experiment 108515 PARAMETER Experiment Name: Zm_2mM_SA_P Parameter: Timepoint (hr) Value: 12
  misc_feature: MA Experiment 108515 PARAMETER Experiment Name: Zm_2mM_SA_P Parameter: Tissue Value: Aerial
  misc_feature: MA Experiment 108515 PARAMETER Experiment Name: Zm_2mM_SA_P Parameter: Treatment Value: 2mM SA vs. No Treatment
  misc_feature: MA Experiment ID: 108556 Result: Down-regulated in Transcription
  misc_feature: MA Experiment 108556 PARAMETER Experiment Name: Zm_Drought_P Parameter: Age (day) Value: 9
  misc_feature: MA Experiment 108556 PARAMETER Experiment Name: Zm_Drought_P Parameter: Organism Value: Zea mays
  misc_feature: MA Experiment 108556 PARAMETER Experiment Name: Zm_Drought_P Parameter: Plant Line Value: 35A19
  misc_feature: MA Experiment 108556 PARAMETER Experiment Name: Zm_Drought_P Parameter: Timepoint (hr) Value: 24
  misc_feature: MA Experiment 108556 PARAMETER Experiment Name: Zm_Drought_P Parameter: Tissue Value: Aerial
  misc_feature: MA Experiment 108556 PARAMETER Experiment Name: Zm_Drought_P Parameter: Treatment Value: Drought vs. No Drought
  misc_feature: MA Experiment ID: 108559 Result: Down-regulated in Transcription
  misc_feature: MA Experiment 108559 PARAMETER Experiment Name: Zm_5mM_NO_P Parameter: Age (day) Value: 8
  misc_feature: MA Experiment 108559 PARAMETER Experiment Name: Zm_5mM_NO_P Parameter: Organism Value: Zea mays
  misc_feature: MA Experiment 108559 PARAMETER Experiment Name: Zm_5mM_NO_P Parameter: Plant Line Value: 35A19
  misc_feature: MA Experiment 108559 PARAMETER Experiment Name: Zm_5mM_NO_P Parameter: Timepoint (hr) Value: 12
  misc_feature: MA Experiment 108559 PARAMETER Experiment Name: Zm_5mM_NO_P Parameter: Tissue Value: Aerial
  misc_feature: MA Experiment 108559 PARAMETER Experiment Name: Zm_5mM_NO_P Parameter: Treatment Value: 5mM NO vs. No Treatment
  misc_feature: MA Experiment ID: 108688 Result: Down-regulated in Transcription
  misc_feature: MA Experiment 108688 PARAMETER Experiment Name: Zm_Embryos-Flowers__P Parameter: Tissue Value: Immature Flowers vs. Aerial+
  misc_feature: MA Experiment ID: 20000477 Result: Down-regulated in Transcription
  misc_feature: MA Experiment 20000477 PARAMETER Experiment Name: Zm_5mM_SA_P Parameter: Age (day) Value: 10
  misc_feature: MA Experiment 20000477 PARAMETER Experiment Name: Zm_5mM_SA_P Parameter: Organism Value: Zea mays
  misc_feature: MA Experiment 20000477 PARAMETER Experiment Name: Zm_5mM_SA_P Parameter: Plant Line Value: 35A19
  misc_feature: MA Experiment 20000477 PARAMETER Experiment Name: Zm_5mM_SA_P Parameter: Timepoint (hr) Value: 48
  misc_feature: MA Experiment 20000477 PARAMETER Experiment Name: Zm_5mM_SA_P Parameter: Tissue Value: Aerial
  misc_feature: MA Experiment 20000477 PARAMETER Experiment Name: Zm_5mM_SA_P Parameter: Treatment Value: 5mM SA vs. No Treatment
  misc_feature: MA Experiment ID: 20000478 Result: Down-regulated in Transcription
  misc_feature: MA Experiment 20000478 PARAMETER Experiment Name: Zm_5mM_SA_P Parameter: Age (day) Value: 11
  misc_feature: MA Experiment 20000478 PARAMETER Experiment Name: Zm_5mM_SA_P Parameter: Organism Value: Zea mays
  misc_feature: MA Experiment 20000478 PARAMETER Experiment Name: Zm_5mM_SA_P Parameter: Plant Line Value: 35A19
  misc_feature: MA Experiment 20000478 PARAMETER Experiment Name: Zm_5mM_SA_P Parameter: Timepoint (hr) Value: 72
  misc_feature: MA Experiment 20000478 PARAMETER Experiment Name: Zm_5mM_SA_P Parameter: Tissue Value: Aerial
  misc_feature: MA Experiment 20000478 PARAMETER Experiment Name: Zm_5mM_SA_P Parameter: Treatment Value: 5mM SA vs. No Treatment
  misc_feature: MA Experiment ID: 20000479 Result: Down-regulated in Transcription
  misc_feature: MA Experiment 20000479 PARAMETER Experiment Name: Zm_Drought_P Parameter: Age (day) Value: 10
  misc_feature: MA Experiment 20000479 PARAMETER Experiment Name: Zm_Drought_P Parameter: Organism Value: Zea mays
  misc_feature: MA Experiment 20000479 PARAMETER Experiment Name: Zm_Drought_P Parameter: Plant Line Value: 35A19
  misc_feature: MA Experiment 20000479 PARAMETER Experiment Name: Zm_Drought_P Parameter: Timepoint (hr) Value: 48
  misc_feature: MA Experiment 20000479 PARAMETER Experiment Name: Zm_Drought_P Parameter: Tissue Value: Aerial
  misc_feature: MA Experiment 20000479 PARAMETER Experiment Name: Zm_Drought_P Parameter: Treatment Value: Drought vs. No Drought
  misc_feature: MA Experiment ID: 20000480 Result: Down-regulated in Transcription
  misc_feature: MA Experiment 20000480 PARAMETER Experiment Name: Zm_Drought_P Parameter: Age (day) Value: 11
  misc_feature: MA Experiment 20000480 PARAMETER Experiment Name: Zm_Drought_P Parameter: Organism Value: Zea mays
  misc_feature: MA Experiment 20000480 PARAMETER Experiment Name: Zm_Drought_P Parameter: Plant Line Value: 35A19
  misc_feature: MA Experiment 20000480 PARAMETER Experiment Name: Zm_Drought_P Parameter: Timepoint (hr) Value: 72
  misc_feature: MA Experiment 20000480 PARAMETER Experiment Name: Zm_Drought_P Parameter: Tissue Value: Aerial
  misc_feature: MA Experiment 20000480 PARAMETER Experiment Name: Zm_Drought_P Parameter: Treatment Value: Drought vs. No Drought
  misc_feature: MA Experiment ID: 20000626 Result: Down-regulated in Transcription
  misc_feature: MA Experiment 20000626 PARAMETER Experiment Name: Zm_Herbicide-Treatments_P Parameter: Timepoint (hr) Value: 12
  misc_feature: MA Experiment 20000626 PARAMETER Experiment Name: Zm_Herbicide-Treatments_P Parameter: Tissue Value: Aerial
  misc_feature: MA Experiment 20000626 PARAMETER Experiment Name: Zm_Herbicide-Treatments_P Parameter: Treatment Value: Roundup vs. No Treatment
ataggtagctcactgtactgtaccctagctagctagtcgcttccagtccagagcgtcccgagaccaatggcctgccacaccgtcatcccgcttcttctcttcctcccttccctcttggcagcggctgcggacgacgtcgcccctgctcctgctcctgccccggcggcaccacccgagcccaccaacaacaacctgaccagcatcctggaaaatggcgggcagtacaccactctgctccgcctcctgaacgccacccggataacggaacagatcagcagccaactcaagaactcgtacgacggcctgaccttcttcgcgcccaacgacaacgccttcgccaagctcaaggccgccggcacgctcaacgccctcgcagaccaagaccagatccagctgctgctctaccacgtcctgccccgctactacagcctcgccacgttccagacggccagcaacccgctgcacaccgaggcgtcgggcccctccggcatgtacagtgtcaacgtcaccgccagcaccacgaaccccctggtgaacctttccactggcgtcgtcgacgtgcccatcagcagcacgctgttcgctcgcttcccgttcgccgtctactccgtcgacagcgtgctgctgcccccgcagctattccacacggcttcttctgcgccggcaccaggacagtctgcagaggcgccggtgcctggaaaggcggcaccagggcacaaggggggcgtcccaaagagcggcgacgatgtggcagcgcagccgtccgctgcggtggatggggcacaagacaccagtgtcgccgcggatggtagagggagcgcggcgtggatgacgccggtggttgttttgggtggcatggccctactgctttgcgcgtgagcagtgtgtgcttcgttctgttttgttttccttggcatctctctgatttctctctcgtggccggtttgtatgtactgcccttaaaaatgtaattctgcatttatgataacgatgatacgatggtcc

SEQ ID NO: 16969 - protein, 270 aa, Zea mays subsp. mays
  peptide (1)..(270): Ceres Seq. ID no. 12354678
  misc_feature (45)..(188): Pfam Name: Fasciclin domain Pfam Description: Fasciclin domain
  misc_feature (11)..(255): Homolog of NCBI NO: 15242651 NR Description: fasciclin-like arabinogalactan-protein (FLA11)
  misc_feature (4)..(236): Homolog of NCBI NO: 21553590 NR Description: arabinogalactan protein-like [Arabidopsis
  misc_feature (4)..(236): Homolog of NCBI NO: 15239344 NR Description: fasciclin-like arabinogalactan-protein (FLA12)
  misc_feature (11)..(255): Homolog of NCBI NO: 21553523 NR Description: arabinogalactan protein-like [Arabidopsis
  misc_feature (29)..(207): Homolog of NCBI NO: 25350183 NR Description: probable surface protein [imported] - Arabidopsis
  misc_feature (29)..(207): Homolog of NCBI NO: 18399381 NR Description: fasciclin-like arabinogalactan-protein (FLA6)
  misc_feature (5)..(225): Homolog of NCBI NO: 24417458 NR Description: unknown [Arabidopsis thaliana]
  misc_feature (5)..(225): Homolog of NCBI NO: 18379157 NR Description: fasciclin-like arabinogalactan-protein (FLA9)
  misc_feature (19)..(246): Homolog of NCBI NO: 2129473 NR Description: arabinogalactan-like protein - loblolly pine
  misc_feature (16)..(235): Homolog of NCBI NO: 34910950 NR Description: putative arabinogalactan-like protein
MACHTVIPLLLFLPSLLAAAADDVAPAPAPAPAAPPEPTNNNLTSILENGGQYTTLLRLLNATRITEQISSQLKNSYDGLTFFAPNDNAFAKLKAAGTLNALADQDQIQLLLYHVLPRYYSLATFQTASNPLHTEASGPSGMYSVNVTASTTNPLVNLSTGVVDVPISSTLFARFPFAVYSVDSVLLPPQLFHTASSAPAPGQSAEAPVPGKAAPGHKGGVPKSGDDVAAQPSAAVDGAQDTSVAADGRGSAAWMTPVVVLGGMALLLCA

SEQ ID NO: 16970 - DNA, 1591 bp, Zea mays subsp. mays
  misc_feature (1)..(1591): Ceres Seq. ID no. 12374664
  misc_feature: MA Experiment ID: 108527 Result: Up-regulated in Transcription
  misc_feature: MA Experiment 108527 PARAMETER Experiment Name: Zm_5mM_NO_P Parameter: Age (day) Value: 8
  misc_feature: MA Experiment 108527 PARAMETER Experiment Name: Zm_5mM_NO_P Parameter: Organism Value: Zea mays
  misc_feature: MA Experiment 108527 PARAMETER Experiment Name: Zm_5mM_NO_P Parameter: Plant Line Value: 35A19
  misc_feature: MA Experiment 108527 PARAMETER Experiment Name: Zm_5mM_NO_P Parameter: Timepoint (hr) Value: 6
  misc_feature: MA Experiment 108527 PARAMETER Experiment Name: Zm_5mM_NO_P Parameter: Tissue Value: Aerial
  misc_feature: MA Experiment 108527 PARAMETER Experiment Name: Zm_5mM_NO_P Parameter: Treatment Value: 5mM NO vs. No Treatment
  misc_feature: MA Experiment ID: 108529 Result: Up-regulated in Transcription
  misc_feature: MA Experiment 108529 PARAMETER Experiment Name: Zm_Imbibed_Seeds_P Parameter: Age (day) Value: 5 vs. 2
  misc_feature: MA Experiment 108529 PARAMETER Experiment Name: Zm_Imbibed_Seeds_P Parameter: Organism Value: Zea mays
  misc_feature: MA Experiment 108529 PARAMETER Experiment Name: Zm_Imbibed_Seeds_P Parameter: Plant Line Value: 35A19
  misc_feature: MA Experiment 108529 PARAMETER Experiment Name: Zm_Imbibed_Seeds_P Parameter: Tissue Value: Roots vs. Embryo
  misc_feature: MA Experiment ID: 108534 Result: Up-regulated in Transcription
  misc_feature: MA Experiment 108534 PARAMETER Experiment Name: Zm_4deg_Cold_P Parameter: Age (hr) Value: 8
  misc_feature: MA Experiment 108534 PARAMETER Experiment Name: Zm_4deg_Cold_P Parameter: Organism Value: Zea mays
  misc_feature: MA Experiment 108534 PARAMETER Experiment Name: Zm_4deg_Cold_P Parameter: Plant Line Value: 35A19
  misc_feature: MA Experiment 108534 PARAMETER Experiment Name: Zm_4deg_Cold_P Parameter: Temperature (deg C) Value: 4 vs. 22
  misc_feature: MA Experiment 108534 PARAMETER Experiment Name: Zm_4deg_Cold_P Parameter: Timepoint (hr) Value: 6
  misc_feature: MA Experiment 108534 PARAMETER Experiment Name: Zm_4deg_Cold_P Parameter: Tissue Value: Aerial
  misc_feature: MA Experiment ID: 108535 Result: Down-regulated in Transcription
  misc_feature: MA Experiment 108535 PARAMETER Experiment Name: Zm_Meristem_P Parameter: Age (day) Value: 8
  misc_feature: MA Experiment 108535 PARAMETER Experiment Name: Zm_Meristem_P Parameter: Organism Value: Zea mays
  misc_feature: MA Experiment 108535 PARAMETER Experiment Name: Zm_Meristem_P Parameter: Plant Line Value: 35A19
  misc_feature: MA Experiment 108535 PARAMETER Experiment Name: Zm_Meristem_P Parameter: Tissue Value: Root Meristem vs. Above Root Meristem
  misc_feature: MA Experiment ID: 20000479 Result: Down-regulated in Transcription
  misc_feature: MA Experiment 20000479 PARAMETER Experiment Name: Zm_Drought_P Parameter: Age (day) Value: 10
  misc_feature: MA Experiment 20000479 PARAMETER Experiment Name: Zm_Drought_P Parameter: Organism Value: Zea mays
  misc_feature: MA Experiment 20000479 PARAMETER Experiment Name: Zm_Drought_P Parameter: Plant Line Value: 35A19
  misc_feature: MA Experiment 20000479 PARAMETER Experiment Name: Zm_Drought_P Parameter: Timepoint (hr) Value: 48
  misc_feature: MA Experiment 20000479 PARAMETER Experiment Name: Zm_Drought_P Parameter: Tissue Value: Aerial
  misc_feature: MA Experiment 20000479 PARAMETER Experiment Name: Zm_Drought_P Parameter: Treatment Value: Drought vs. No Drought
  misc_feature: MA Experiment ID: 20000480 Result: Down-regulated in Transcription
  misc_feature: MA Experiment 20000480 PARAMETER Experiment Name: Zm_Drought_P Parameter: Age (day) Value: 11
  misc_feature: MA Experiment 20000480 PARAMETER Experiment Name: Zm_Drought_P Parameter: Organism Value: Zea mays
  misc_feature: MA Experiment 20000480 PARAMETER Experiment Name: Zm_Drought_P Parameter: Plant Line Value: 35A19
  misc_feature: MA Experiment 20000480 PARAMETER Experiment Name: Zm_Drought_P Parameter: Timepoint (hr) Value: 72
  misc_feature: MA Experiment 20000480 PARAMETER Experiment Name: Zm_Drought_P Parameter: Tissue Value: Aerial
  misc_feature: MA Experiment 20000480 PARAMETER Experiment Name: Zm_Drought_P Parameter: Treatment Value: Drought vs. No Drought
  misc_feature: MA Experiment ID: 20000492 Result: Down-regulated in Transcription
  misc_feature: MA Experiment 20000492 PARAMETER Experiment Name: Zm_Hybrid_Seed_Dev_P Parameter: DAP Value: 12
  misc_feature: MA Experiment 20000492 PARAMETER Experiment Name: Zm_Hybrid_Seed_Dev_P Parameter: Organism Value: Zea mays
  misc_feature: MA Experiment 20000492 PARAMETER Experiment Name: Zm_Hybrid_Seed_Dev_P Parameter: Plant Line Value: 35A19
  misc_feature: MA Experiment 20000492 PARAMETER Experiment Name: Zm_Hybrid_Seed_Dev_P Parameter: Tissue Value: Fert Kernel vs. Unfert Floret
  misc_feature: MA Experiment ID: 20001608 Result: Down-regulated in Transcription
  misc_feature: MA Experiment 20001608 PARAMETER Experiment Name: Zm_50ppm_KNO3_L-to-H_P Parameter: Age (day) Value: 21
  misc_feature: MA Experiment 20001608 PARAMETER Experiment Name: Zm_50ppm_KNO3_L-to-H_P Parameter: Organism Value: Zea mays
  misc_feature: MA Experiment 20001608 PARAMETER Experiment Name: Zm_50ppm_KNO3_L-to-H_P Parameter: Plant Line Value: 35A19
  misc_feature: MA Experiment 20001608 PARAMETER Experiment Name: Zm_50ppm_KNO3_L-to-H_P Parameter: Timepoint (hr) Value: 48
  misc_feature: MA Experiment 20001608 PARAMETER Experiment Name: Zm_50ppm_KNO3_L-to-H_P Parameter: Tissue Value: Shoots
  misc_feature: MA Experiment 20001608 PARAMETER Experiment Name: Zm_50ppm_KNO3_L-to-H_P Parameter: Treatment Value: 50ppm KNO3 vs. 50ppm KCl
aaacgctcaacttgaaagtcacaggacagcacacaccccacccacaactaccaaccttctccggaaggccaaatccccccgggccaagggaaacgagggagagagaccctccgcccctctcctctccctctccttccggtgaggcggtgagctatggagtcggcagcggccgcgaagacggtggagcggctggcgcagcgcctggtgccgccggcggagcccacccccactgccccccaccgcctgtcgtggctggaccggtacccgacgcagatggcgctcatcgagtcgctgcacgtcttcaagcccgacccggcgcgtgacgggctcagccccgcggagaccatagagcgggccctcgcacgggcgctggtcgactactacccgctcgccggccgcctcgccgtgtccgagagcgccgggggcctgcacgtcgactgcagcgctgagggcgtctggttcatcgaggccgccgtacggtgccgccttgaggacgtcgactacctcgagtacccgctccagatccccaaggacgagctgctcccgcacccgctgccgaggcccagccacgaggaggagagcaagctcatcctgctcgtccaggtgacggcgttcgcgtgcggcggcttcgtggtgggcttccgcttcagccacgcggtggcggacgggctcggcgcggccaagttcatgggcgcggtgggggagctggcgcgcggggcggaccaggtgtccgtggcgcccacctgggcccgcgacgccatcccagacccgtcgggcgcgctggtcggcagcctccccgagcccacgggcgccaagcgcctcgagtacctggccatcgacatctccgccgactacatcgaccacttcaagtcccagttcgccgcggccacgggcgggggccgctgctcggccttcgaggtcctcatcgccaaggcgtggcagagccgcacccgcgccgcggggttcgaggaccccgacacccccgtgcagctctgcttcgccatgaacgcgcgcccgctcctcggcgcccgcctcccgcggggcggcgccggcttctacggcaactgctactacatcatgcgcgtggcgtccacggccgacaaggtgtcctcgtcgtccgtcaccgacgtggtgaagatcatcagggaggggaagaagcggctgccattggagtttgcgcggtgggcggcgggggaggagggcgccgacggcgtggacccctaccagatcacctccgactaccggacgctgctggtgtcggattggacgcgcctcggcttcgcggaggtggactacgggtggggcccgccagcccacgtggtaccgctgacgaacctggactacatcgccacgtgcatcctcgtcaagccatgggcccacaagccaggggcgaggctcatcacgcagtgcgtgacgcccgaccgcgtctcgcgcttccacgacgccatggtggacatgaactagcgccccgcctcgtcctgcgttcaccacggcctcccgtttgttcatgggtttcttgttttttttcctcctctcagttactgtggtaattattagttggtattataattactaatcacattgctgcctc

SEQ ID NO: 16971 - protein, 436 aa, Zea mays subsp. mays
  peptide (1)..(436): Ceres Seq. ID no. 12374665
  misc_feature (8)..(435): Pfam Name: Transferase family Pfam Description: Transferase family
  misc_feature (5)..(436): Homolog of NCBI NO: 34906150 NR Description: putative 0-deacetylbaccatin III-10-O-acetyl
  misc_feature (2)..(391): Homolog of NCBI NO: 22854880 NR Description: benzoyl coenzyme A: benzyl alcohol benzoyl
  misc_feature (4)..(384): Homolog of NCBI NO: 18034655 NR Description: 10-deacetylbaccatin III-10-O-acetyl transferase
  misc_feature (1)..(391): Homolog of NCBI NO: 37535814 NR Description: putative hypersensitivity-related (hsr)protein
  misc_feature (158)..(432): Homolog of NCBI NO: 18558566 NR Description: putative 0-deacetylbaccatin III-10-O-acetyl
  misc_feature (10)..(428): Homolog of NCBI NO: 38346537 NR Description: OSJNBa0040D17.12 [Oryza sativa (japonica
  misc_feature (6)..(420): Homolog of NCBI NO: 34912654 NR Description: putative acetyl transferase
  misc_feature (7)..(434): Homolog of NCBI NO: 15228696 NR Description: putative protein; protein id: At3g62160.1
  misc_feature (1)..(432): Homolog of NCBI NO: 34912652 NR Description: putative acetyl transferase
  misc_feature (10)..(428): Homolog of NCBI NO: 34906304 NR Description: unnamed protein product [Oryza sativa (japonica
MESAAAAKTVERLAQRLVPPAEPTPTAPHRLSWLDRYPTQMALIESLHVFKPDPARDGLSPAETIERALARALVDYYPLAGRLAVSESAGGLHVDCSAEGVWFIEAAVRCRLEDVDYLEYPLQIPKDELLPHPLPRPSHEEESKLILLVQVTAFACGGFVVGFRFSHAVADGLGAAKFMGAVGELARGADQVSVAPTWARDAIPDPSGALVGSLPEPTGAKRLEYLAIDISADYIDHFKSQFAAATGGGRCSAFEVLIAKAWQSRTRAAGFEDPDTPVQLCFAMNARPLLGARLPRGGAGFYGNCYYIMRVASTADKVSSSSVTDVVKIIREGKKRLPLEFARWAAGEEGADGVDPYQITSDYRTLLVSDWTRLGFAEVDYGWGPPAHVVPLTNLDYIATCILVKPWAHKPGARLITQCVTPDRVSRFHDAMVDMN

SEQ ID NO: 16972 - protein, 396 aa, Zea mays subsp. mays
  peptide (1)..(396): Ceres Seq. ID no. 12374666
  misc_feature (1)..(395): Pfam Name: Transferase family Pfam Description: Transferase family
  misc_feature (1)..(351): Homolog of NCBI NO: 22854880 NR Description: benzoyl coenzyme A: benzyl alcohol benzoyl
  misc_feature (1)..(344): Homolog of NCBI NO: 18034655 NR Description: 10-deacetylbaccatin III-10-O-acetyl transferase
  misc_feature (1)..(351): Homolog of NCBI NO: 37535814 NR Description: putative hypersensitivity-related (hsr)protein
  misc_feature (118)..(392): Homolog of NCBI NO: 18558566 NR Description: putative 0-deacetylbaccatin III-10-O-acetyl
  misc_feature (1)..(388): Homolog of NCBI NO: 38346537 NR Description: OSJNBa0040D17.12 [Oryza sativa (japonica
  misc_feature (1)..(380): Homolog of NCBI NO: 34912654 NR Description: putative acetyl transferase
  misc_feature (1)..(394): Homolog of NCBI NO: 15228696 NR Description: putative protein; protein id: At3g62160.1
  misc_feature (1)..(392): Homolog of NCBI NO: 34912652 NR Description: putative acetyl transferase
  misc_feature (1)..(388): Homolog of NCBI NO: 34906304 NR Description: unnamed protein product [Oryza sativa (japonica
  misc_feature (1)..(396): Homolog of NCBI NO: 34906150 NR Description: putative 0-deacetylbaccatin III-10-O-acetyl
MALIESLHVFKPDPARDGLSPAETIERALARALVDYYPLAGRLAVSESAGGLHVDCSAEGVWFIEAAVRCRLEDVDYLEYPLQIPKDELLPHPLPRPSHEEESKLILLVQVTAFACGGFVVGFRFSHAVADGLGAAKFMGAVGELARGADQVSVAPTWARDAIPDPSGALVGSLPEPTGAKRLEYLAIDISADYIDHFKSQFAAATGGGRCSAFEVLIAKAWQSRTRAAGFEDPDTPVQLCFAMNARPLLGARLPRGGAGFYGNCYYIMRVASTADKVSSSSVTDVVKIIREGKKRLPLEFARWAAGEEGADGVDPYQITSDYRTLLVSDWTRLGFAEVDYGWGPPAHVVPLTNLDYIATCILVKPWAHKPGARLITQCVTPDRVSRFHDAMVDMN

SEQ ID NO: 16973 - protein, 258 aa, Zea mays subsp. mays
  peptide (1)..(258): Ceres Seq. ID no. 12374667
  misc_feature (1)..(257): Pfam Name: Transferase family Pfam Description: Transferase family
  misc_feature (1)..(213): Homolog of NCBI NO: 22854880 NR Description: benzoyl coenzyme A: benzyl alcohol benzoyl
  misc_feature (1)..(206): Homolog of NCBI NO: 18034655 NR Description: 10-deacetylbaccatin III-10-O-acetyl transferase
  misc_feature (1)..(213): Homolog of NCBI NO: 37535814 NR Description: putative hypersensitivity-related (hsr)protein
  misc_feature (1)..(254): Homolog of NCBI NO: 18558566 NR Description: putative 0-deacetylbaccatin III-10-O-acetyl
  misc_feature (1)..(250): Homolog of NCBI NO: 38346537 NR Description: OSJNBa0040D17.12 [Oryza sativa (japonica
  misc_feature (1)..(242): Homolog of NCBI NO: 34912654 NR Description: putative acetyl transferase
  misc_feature (1)..(256): Homolog of NCBI NO: 15228696 NR Description: putative protein; protein id: At3g62160.1
  misc_feature (1)..(254): Homolog of NCBI NO: 34912652 NR Description: putative acetyl transferase
  misc_feature (1)..(250): Homolog of NCBI NO: 34906304 NR Description: unnamed protein product [Oryza sativa (japonica
  misc_feature (1)..(258): Homolog of NCBI NO: 34906150 NR Description: putative 0-deacetylbaccatin III-10-O-acetyl
MGAVGELARGADQVSVAPTWARDAIPDPSGALVGSLPEPTGAKRLEYLAIDISADYIDHFKSQFAAATGGGRCSAFEVLIAKAWQSRTRAAGFEDPDTPVQLCFAMNARPLLGARLPRGGAGFYGNCYYIMRVASTADKVSSSSVTDVVKIIREGKKRLPLEFARWAAGEEGADGVDPYQITSDYRTLLVSDWTRLGFAEVDYGWGPPAHVVPLTNLDYIATCILVKPWAHKPGARLITQCVTPDRVSRFHDAMVDMN

SEQ ID NO: 16974 - DNA, 1486 bp, Zea mays subsp. mays
  misc_feature (1)..(1486): Ceres Seq. ID no. 12435191
  misc_feature: MA Experiment ID: 108528 Result: Up-regulated in Transcription
  misc_feature: MA Experiment 108528 PARAMETER Experiment Name: Zm_Imbibed_Seeds_P Parameter: Age (day) Value: 5 vs. 2
  misc_feature: MA Experiment 108528 PARAMETER Experiment Name: Zm_Imbibed_Seeds_P Parameter: Organism Value: Zea mays
  misc_feature: MA Experiment 108528 PARAMETER Experiment Name: Zm_Imbibed_Seeds_P Parameter: Plant Line Value: 35A19
  misc_feature: MA Experiment 108528 PARAMETER Experiment Name: Zm_Imbibed_Seeds_P Parameter: Tissue Value: Aerial vs. Embryo
  misc_feature: MA Experiment ID: 108545 Result: Up-regulated in Transcription
  misc_feature: MA Experiment 108545 PARAMETER Experiment Name: Zm_Imbibed_Seeds_P Parameter: Age (day) Value: 3 vs. 2
  misc_feature: MA Experiment 108545 PARAMETER Experiment Name: Zm_Imbibed_Seeds_P Parameter: Organism Value: Zea mays
  misc_feature: MA Experiment 108545 PARAMETER Experiment Name: Zm_Imbibed_Seeds_P Parameter: Plant Line Value: 35A19
  misc_feature: MA Experiment 108545 PARAMETER Experiment Name: Zm_Imbibed_Seeds_P Parameter: Tissue Value: Aerial vs. Embryo
  misc_feature: MA Experiment ID: 108547 Result: Up-regulated in Transcription
  misc_feature: MA Experiment 108547 PARAMETER Experiment Name: Zm_Imbibed_Seeds_P Parameter: Age (day) Value: 4 vs. 2
  misc_feature: MA Experiment 108547 PARAMETER Experiment Name: Zm_Imbibed_Seeds_P Parameter: Organism Value: Zea mays
  misc_feature: MA Experiment 108547 PARAMETER Experiment Name: Zm_Imbibed_Seeds_P Parameter: Plant Line Value: 35A19
  misc_feature: MA Experiment 108547 PARAMETER Experiment Name: Zm_Imbibed_Seeds_P Parameter: Tissue Value: Aerial vs. Embryo
aagggcgaggaaaactgaaagcctacgaaaatggtggagctcacctccttatccccagggccaccacgtccttctccgtttactcctcggcgccggccgccgccgacaccacatgtccgtacctcctcgcgtcgtcgcgggaggatcctcggcgccgcgaccgccacgcctggcgccgacgactaccactccaccatccgctccctcaactcccgcggccgccacgtcccccgaaaatccctcgggcagaactacacgctcaactccaaggtgaacgaggagctggtggcggcggcgggggtggaggacggtgacgtcgtgctcgagatcggcccaggcaccggctcgctcacttccgcgctgctccaggccggcgctaccgtatttgccgtcgagaaggacaagcatatggctactcttgttaaagataggtttggatctacagaacagttgaaggtcattgaagaagacatcacaaaatttcacatccgttcccattttcttcctttcatgaaggagaaatacggtgccaccaaaaaacttgcaaaggttgcatcaaacttaccattcaatgtcagcaccgaagttgtcaaactactactcccaatgggggatgttttctctgtcgtggtgctcatgcttcaggatgaaacagcagtacgctttgcagatgcttcaatacaaagtccagagtaccgatctatcaatgtgtttgtggatttttactcggaacctgaatacaagttcagagtagacagagagaattttttccctcggcctaaggttgatggtgctgttatcagcttcaaactaaagaatgcggaggagtatccgccagttagttccccaaaaagcttcttttcaatggtgaattccgctttcatggggaagcgcaagatgcttaggaaatctcttcagcacatatgctcttcttctgacattgaggctgctcttgacaacattggccttccagttacagctagaccttctgatctgattttggatgatttcgtgagattgcacaatcatttagcgaaagtatgactaagaagtgcctttcaaaatgcctaaggaattgcttgttggcatggtgttcaacagttggagtaacttacgcctgaccgcctgagagttgctatgcagctacaggtgccttcagctcagctccggggcgaagccaggaattacatgtagggaagccggccgaaagagccatcttgtaaaaaatgatcgcggttcaactggtttggttactcgcacttatcgtctgtctgagttaatacttgacaaaaaaaaaaacacagctcaactggttaggtttctcgtagtggtggtggtcgttcggggtttattatagatagtgagggtttattgtattttgatcgtagacgctaatcataaactgtaatgaatggacgccttcgttctctctgagtacaaaggccccattgaaatatgtatgagaaacaaagcaaatttagagggc

SEQ ID NO: 16975 - protein, 337 aa, Zea mays subsp. mays
  peptide (1)..(337): Ceres Seq. ID no. 12435192
  misc_feature (67)..(332): Homolog of NCBI NO: 22999516 NR Description: hypothetical protein [Magnetococcus sp. MC-1]
  misc_feature (64)..(337): Homolog of NCBI NO: 15595789 NR Description: rRNA (adenine-N6,N6)-dimethyltransferase
  misc_feature (54)..(336): Homolog of NCBI NO: 15605077 NR Description: Dimethyladenosine Transferase [Chlamydia
  misc_feature (54)..(330): Homolog of NCBI NO: 15835248 NR Description: dimethyladenosine transferase [Chlamydia
  misc_feature (62)..(334): Homolog of NCBI NO: 29840068 NR Description: dimethyladenosine transferase [Chlamydophila
  misc_feature (67)..(334): Homolog of NCBI NO: 23039948 NR Description: hypothetical protein [Trichodesmium erythraeum
  misc_feature (67)..(334): Homolog of NCBI NO: 15618967 NR Description: Dimethyladenosine Transferase [Chlamydophila
  misc_feature (67)..(334): Homolog of NCBI NO: 33242431 NR Description: dimethyladenosine transferase [Chlamydophila
  misc_feature (33)..(233): Homolog of NCBI NO: 25518538 NR Description: hypothetical protein F22M8.1 - Arabidopsis
  misc_feature (33)..(336): Homolog of NCBI NO: 15220982 NR Description: dimethyladenosine transferase, putative; protein
MVELTSLSPGPPRPSPFTPRRRPPPTPHVRTSSRRRGRILGAATATPGADDYHSTIRSLNSRGRHVPRKSLGQNYTLNSKVNEELVAAAGVEDGDVVLEIGPGTGSLTSALLQAGATVFAVEKDKHMATLVKDRFGSTEQLKVIEEDITKFHIRSHFLPFMKEKYGATKKLAKVASNLPFNVSTEVVKLLLPMGDVFSVVVLMLQDETAVRFADASIQSPEYRSINVFVDFYSEPEYKFRVDRENFFPRPKVDGAVISFKLKNAEEYPPVSSPKSFFSMVNSAFMGKRKMLRKSLQHICSSSDIEAALDNIGLPVTARPSDLILDDFVRLHNHLAKV

SEQ ID NO: 16976 - protein, 211 aa, Zea mays subsp. mays
  peptide (1)..(211): Ceres Seq. ID no. 12435193
  misc_feature (1)..(206): Homolog of NCBI NO: 22999516 NR Description: hypothetical protein [Magnetococcus sp. MC-1]
  misc_feature (1)..(211): Homolog of NCBI NO: 15595789 NR Description: rRNA (adenine-N6,N6)-dimethyltransferase
  misc_feature (1)..(210): Homolog of NCBI NO: 15605077 NR Description: Dimethyladenosine Transferase [Chlamydia
  misc_feature (1)..(204): Homolog of NCBI NO: 15835248 NR Description: dimethyladenosine transferase [Chlamydia
  misc_feature (1)..(208): Homolog of NCBI NO: 29840068 NR Description: dimethyladenosine transferase [Chlamydophila
  misc_feature (1)..(208): Homolog of NCBI NO: 23039948 NR Description: hypothetical protein [Trichodesmium erythraeum
  misc_feature (1)..(208): Homolog of NCBI NO: 15618967 NR Description: Dimethyladenosine Transferase [Chlamydophila
  misc_feature (1)..(208): Homolog of NCBI NO: 33242431 NR Description: dimethyladenosine transferase [Chlamydophila
  misc_feature (1)..(107): Homolog of NCBI NO: 25518538 NR Description: hypothetical protein F22M8.1 - Arabidopsis
  misc_feature (1)..(210): Homolog of NCBI NO: 15220982 NR Description: dimethyladenosine transferase, putative; protein
MATLVKDRFGSTEQLKVIEEDITKFHIRSHFLPFMKEKYGATKKLAKVASNLPFNVSTEVVKLLLPMGDVFSVVVLMLQDETAVRFADASIQSPEYRSINVFVDFYSEPEYKFRVDRENFFPRPKVDGAVISFKLKNAEEYPPVSSPKSFFSMVNSAFMGKRKMLRKSLQHICSSSDIEAALDNIGLPVTARPSDLILDDFVRLHNHLAKV

SEQ ID NO: 16977 - protein, 177 aa, Zea mays subsp. mays
  peptide (1)..(177): Ceres Seq. ID no. 12435194
  misc_feature (1)..(172): Homolog of NCBI NO: 22999516 NR Description: hypothetical protein [Magnetococcus sp. MC-1]
  misc_feature (1)..(177): Homolog of NCBI NO: 15595789 NR Description: rRNA (adenine-N6,N6)-dimethyltransferase
  misc_feature (1)..(176): Homolog of NCBI NO: 15605077 NR Description: Dimethyladenosine Transferase [Chlamydia
  misc_feature (1)..(170): Homolog of NCBI NO: 15835248 NR Description: dimethyladenosine transferase [Chlamydia
  misc_feature (1)..(174): Homolog of NCBI NO: 29840068 NR Description: dimethyladenosine transferase [Chlamydophila
  misc_feature (1)..(174): Homolog of NCBI NO: 23039948 NR Description: hypothetical protein [Trichodesmium erythraeum
  misc_feature (1)..(174): Homolog of NCBI NO: 15618967 NR Description: Dimethyladenosine Transferase [Chlamydophila
  misc_feature (1)..(174): Homolog of NCBI NO: 33242431 NR Description: dimethyladenosine transferase [Chlamydophila
  misc_feature (1)..(73): Homolog of NCBI NO: 25518538 NR Description: hypothetical protein F22M8.1 - Arabidopsis
  misc_feature (1)..(176): Homolog of NCBI NO: 15220982 NR Description: dimethyladenosine transferase, putative; protein
MKEKYGATKKLAKVASNLPFNVSTEVVKLLLPMGDVFSVVVLMLQDETAVRFADASIQSPEYRSINVFVDFYSEPEYKFRVDRENFFPRPKVDGAVISFKLKNAEEYPPVSSPKSFFSMVNSAFMGKRKMLRKSLQHICSSSDIEAALDNIGLPVTARPSDLILDDFVRLHNHLAKV

SEQ ID NO: 16978 - DNA, 1471 bp, Zea mays subsp. mays
  misc_feature (1)..(1471): Ceres Seq. ID no. 12435165
  misc_feature: MA Experiment ID: 108528 Result: Down-regulated in Transcription
  misc_feature: MA Experiment 108528 PARAMETER Experiment Name: Zm_Imbibed_Seeds_P Parameter: Age (day) Value: 5 vs. 2
  misc_feature: MA Experiment 108528 PARAMETER Experiment Name: Zm_Imbibed_Seeds_P Parameter: Organism Value: Zea mays
  misc_feature: MA Experiment 108528 PARAMETER Experiment Name: Zm_Imbibed_Seeds_P Parameter: Plant Line Value: 35A19
  misc_feature: MA Experiment 108528 PARAMETER Experiment Name: Zm_Imbibed_Seeds_P Parameter: Tissue Value: Aerial vs. Embryo
  misc_feature: MA Experiment ID: 108529 Result: Up-regulated in Transcription
  misc_feature: MA Experiment 108529 PARAMETER Experiment Name: Zm_Imbibed_Seeds_P Parameter: Age (day) Value: 5 vs. 2
  misc_feature: MA Experiment 108529 PARAMETER Experiment Name: Zm_Imbibed_Seeds_P Parameter: Organism Value: Zea mays
  misc_feature: MA Experiment 108529 PARAMETER Experiment Name: Zm_Imbibed_Seeds_P Parameter: Plant Line Value: 35A19
  misc_feature: MA Experiment 108529 PARAMETER Experiment Name: Zm_Imbibed_Seeds_P Parameter: Tissue Value: Roots vs. Embryo
  misc_feature: MA Experiment ID: 108530 Result: Down-regulated in Transcription
  misc_feature: MA Experiment 108530 PARAMETER Experiment Name: Zm_Imbibed_Seeds_P Parameter: Age (day) Value: 6 vs. 2
  misc_feature: MA Experiment 108530 PARAMETER Experiment Name: Zm_Imbibed_Seeds_P Parameter: Organism Value: Zea mays
  misc_feature: MA Experiment 108530 PARAMETER Experiment Name: Zm_Imbibed_Seeds_P Parameter: Plant Line Value: 35A19
  misc_feature: MA Experiment 108530 PARAMETER Experiment Name: Zm_Imbibed_Seeds_P Parameter: Tissue Value: Aerial vs. Embryo
  misc_feature: MA Experiment ID: 108535 Result: Down-regulated in Transcription
  misc_feature: MA Experiment 108535 PARAMETER Experiment Name: Zm_Meristem_P Parameter: Age (day) Value: 8
  misc_feature: MA Experiment 108535 PARAMETER Experiment Name: Zm_Meristem_P Parameter: Organism Value: Zea mays
  misc_feature: MA Experiment 108535 PARAMETER Experiment Name: Zm_Meristem_P Parameter: Plant Line Value: 35A19
  misc_feature: MA Experiment 108535 PARAMETER Experiment Name: Zm_Meristem_P Parameter: Tissue Value: Root Meristem vs. Above Root Meristem
  misc_feature: MA Experiment ID: 108543 Result: Up-regulated in Transcription
  misc_feature: MA Experiment ID: 108546 Result: Up-regulated in Transcription
  misc_feature: MA Experiment 108546 PARAMETER Experiment Name: Zm_Imbibed_Seeds_P Parameter: Age (day) Value: 3 vs. 2
  misc_feature: MA Experiment 108546 PARAMETER Experiment Name: Zm_Imbibed_Seeds_P Parameter: Organism Value: Zea mays
  misc_feature: MA Experiment 108546 PARAMETER Experiment Name: Zm_Imbibed_Seeds_P Parameter: Plant Line Value: 35A19
  misc_feature: MA Experiment 108546 PARAMETER Experiment Name: Zm_Imbibed_Seeds_P Parameter: Tissue Value: Roots vs. Embryo
atgttccagctcgccggcctgctccacgcgcgcggcttcgccgtcaccgtcttccacacccacttcaacgcgccggacgcgtcccagcacccggcctacgacttcgtccccgtccagttcgacgggacgccggcggacagcgcggacacggtgcgggtgaccgtggagcacgtcctcgccgtgaaccgcgcgtgcgaggccccgttccgggagcgcctggccgcgctgctggaggaggaggaggaggaggtcgcgtgcctcgtcgccgacgcgcacctgctcacgctcatggacgtggcacgcgggctcggcgtgccgactctcgcgctccgcaccggcagcgccgcgtgcttccgctggttcatggcgtttcccatgctctgcgacaagggctacctgtcctctcaagagtcgcaggagccggacatgctggtgacggagctgccgccgtaccgcgtccgtgacatgccgtccgccagcggggccaccctcgggctaatgcgggacctgatttcgcgagcggtgacggccgtgaacgcctcgtcgggtctcatcatcaacacgttcgacgcgctggagacggacgagctggcgtcgctccggcgcggcctcgccgtcccggtgttcgacatcgggccgctgcacgtgcactcgccggcggcctcgagcagcctgctgcggcaggaccgagggtgcctggactggctggacgcgcggggccccgcgtccgtgctctacgtcagcttcggcagcctggccagcatgtccgcggcggacctggtggagacggcatggggcatcgccaacagcggccgccctttcctgtgggtgctccggccgggcctcgtccgcggcgcgccgccgagtcagccgccgccgctgcccgacggcttccacgccgagacgcgcggtcgcggcacggtggtgagctgggcgccgcaggaggaggtcctggcgcaccctgccgtgggcgcgttctggacgcactgcggctggaactccacgctggagggcgtgtgcgccggcgtgccgatgctgtgccgcccctgcttcggcgaccagatggggaacgccaggtacgtggaccacgtgtggcggaccggcctcgcgctccacggcgagctggagaggggcaaggtggaggcggccatctcgacgatgatgggggcaggcgagcccgccacggcgctgcgtgggagggcacgggagctctgtagaagagcggcggagtgcgtggccaaggccggctcgtccgacctcaacgtcgacaagctggtgaaccacatcatgtccctcacggcgcggcggtgccaatagagacttaattatttgagtaacacatactcatctgcataattaagcctgacaaatctgtttgatacaaatccacttgcactggctgtttcaaagtttcaagtttgatggagacatggagcatgaattagttactgttgtacacttgtgcatcttc

SEQ ID NO: 16979 - protein, 438 aa, Zea mays subsp. mays
  peptide (1)..(438): Ceres Seq. ID no. 12435166
  misc_feature (1)..(427): Pfam Name: UDP-glucoronosyl and UDP-glucosyl transferase Pfam Description: UDP-glucoronosyl and UDP-glucosyl transferase
  misc_feature (1)..(431): Homolog of NCBI NO: 15229731 NR Description: glucosyl transferase, putative; protein id:
  misc_feature (1)..(432): Homolog of NCBI NO: 33146634 NR Description: putative UDP-glucosyltransferase
  misc_feature (1)..(423): Homolog of NCBI NO: 34900678 NR Description: glucuronosyl transferase-like protein
  misc_feature (1)..(433): Homolog of NCBI NO: 18033230 NR Description: UDP-glucosyltransferase BX9 [Zea mays]
  misc_feature (1)..(432): Homolog of NCBI NO: 33146633 NR Description: putative UDP-glucosyltransferase
  misc_feature (1)..(432): Homolog of NCBI NO: 34900682 NR Description: glucuronosyl transferase-like protein
  misc_feature (1)..(431): Homolog of NCBI NO: 34395172 NR Description: putative UDP-glucosyltransferase
  misc_feature (1)..(427): Homolog of NCBI NO: 18033228 NR Description: UDP-glucosyltransferase BX8 [Zea mays]
  misc_feature (1)..(432): Homolog of NCBI NO: 34897378 NR Description: putative UDP-glucosyltransferase
  misc_feature (1)..(432): Homolog of NCBI NO: 34900662 NR Description: glucuronosyl transferase-like protein
MFQLAGLLHARGFAVTVFHTHFNAPDASQHPAYDFVPVQFDGTPADSADTVRVTVEHVLAVNRACEAPFRERLAALLEEEEEEVACLVADAHLLTLMDVARGLGVPTLALRTGSAACFRWFMAFPMLCDKGYLSSQESQEPDMLVTELPPYRVRDMPSASGATLGLMRDLISRAVTAVNASSGLIINTFDALETDELASLRRGLAVPVFDIGPLHVHSPAASSSLLRQDRGCLDWLDARGPASVLYVSFGSLASMSAADLVETAWGIANSGRPFLWVLRPGLVRGAPPSQPPPLPDGFHAETRGRGTVVSWAPQEEVLAHPAVGAFWTHCGWNSTLEGVCAGVPMLCRPCFGDQMGNARYVDHVWRTGLALHGELERGKVEAAISTMMGAGEPATALRGRARELCRRAAECVAKAGSSDLNVDKLVNHIMSLTARRCQ

SEQ ID NO: 16980 - protein, 342 aa, Zea mays subsp. mays
  peptide (1)..(342): Ceres Seq. ID no. 12435167
  misc_feature (1)..(331): Pfam Name: UDP-glucoronosyl and UDP-glucosyl transferase Pfam Description: UDP-glucoronosyl and UDP-glucosyl transferase
  misc_feature (1)..(331): Homolog of NCBI NO: 18033228 NR Description: UDP-glucosyltransferase BX8 [Zea mays]
  misc_feature (1)..(336): Homolog of NCBI NO: 34897378 NR Description: putative UDP-glucosyltransferase
  misc_feature (1)..(336): Homolog of NCBI NO: 33146634 NR Description: putative UDP-glucosyltransferase
  misc_feature (1)..(337): Homolog of NCBI NO: 18033230 NR Description: UDP-glucosyltransferase BX9 [Zea mays]
  misc_feature (1)..(336): Homolog of NCBI NO: 34900682 NR Description: glucuronosyl transferase-like protein
  misc_feature (1)..(335): Homolog of NCBI NO: 34395172 NR Description: putative UDP-glucosyltransferase
  misc_feature (1)..(336): Homolog of NCBI NO: 33146633 NR Description: putative UDP-glucosyltransferase
  misc_feature (1)..(327): Homolog of NCBI NO: 34900678 NR Description: glucuronosyl transferase-like protein
  misc_feature (1)..(335): Homolog of NCBI NO: 15229731 NR Description: glucosyl transferase, putative; protein id:
  misc_feature (1)..(336): Homolog of NCBI NO: 34900662 NR Description: glucuronosyl transferase-like protein
MDVARGLGVPTLALRTGSAACFRWFMAFPMLCDKGYLSSQESQEPDMLVTELPPYRVRDMPSASGATLGLMRDLISRAVTAVNASSGLIINTFDALETDELASLRRGLAVPVFDIGPLHVHSPAASSSLLRQDRGCLDWLDARGPASVLYVSFGSLASMSAADLVETAWGIANSGRPFLWVLRPGLVRGAPPSQPPPLPDGFHAETRGRGTVVSWAPQEEVLAHPAVGAFWTHCGWNSTLEGVCAGVPMLCRPCFGDQMGNARYVDHVWRTGLALHGELERGKVEAAISTMMGAGEPATALRGRARELCRRAAECVAKAGSSDLNVDKLVNHIMSLTARRCQ

SEQ ID NO: 16981 - protein, 317 aa, Zea mays subsp. mays
  peptide (1)..(317): Ceres Seq. ID no. 12435168
  misc_feature (1)..(306): Pfam Name: UDP-glucoronosyl and UDP-glucosyl transferase Pfam Description: UDP-glucoronosyl and UDP-glucosyl transferase
  misc_feature (1)..(310): Homolog of NCBI NO: 15229731 NR Description: glucosyl transferase, putative; protein id:
  misc_feature (1)..(311): Homolog of NCBI NO: 33146634 NR Description: putative UDP-glucosyltransferase
  misc_feature (1)..(302): Homolog of NCBI NO: 34900678 NR Description: glucuronosyl transferase-like protein
  misc_feature (1)..(312): Homolog of NCBI NO: 18033230 NR Description: UDP-glucosyltransferase BX9 [Zea mays]
  misc_feature (1)..(311): Homolog of NCBI NO: 33146633 NR Description: putative UDP-glucosyltransferase
  misc_feature (1)..(311): Homolog of NCBI NO: 34900682 NR Description: glucuronosyl transferase-like protein
  misc_feature (1)..(310): Homolog of NCBI NO: 34395172 NR Description: putative UDP-glucosyltransferase
  misc_feature (1)..(306): Homolog of NCBI NO: 18033228 NR Description: UDP-glucosyltransferase BX8 [Zea mays]
  misc_feature (1)..(311): Homolog of NCBI NO: 34897378 NR Description: putative UDP-glucosyltransferase
  misc_feature (1)..(311): Homolog of NCBI NO: 34900662 NR Description: glucuronosyl transferase-like protein
MAFPMLCDKGYLSSQESQEPDMLVTELPPYRVRDMPSASGATLGLMRDLISRAVTAVNASSGLIINTFDALETDELASLRRGLAVPVFDIGPLHVHSPAASSSLLRQDRGCLDWLDARGPASVLYVSFGSLASMSAADLVETAWGIANSGRPFLWVLRPGLVRGAPPSQPPPLPDGFHAETRGRGTVVSWAPQEEVLAHPAVGAFWTHCGWNSTLEGVCAGVPMLCRPCFGDQMGNARYVDHVWRTGLALHGELERGKVEAAISTMMGAGEPATALRGRARELCRRAAECVAKAGSSDLNVDKLVNHIMSLTARRCQ

SEQ ID NO: 16982 - DNA, 1684 bp, Zea mays subsp. mays
  misc_feature (1)..(1684): Ceres Seq. ID no. 12358911
  misc_feature: MA Experiment ID: 108523 Result: Down-regulated in Transcription
  misc_feature: MA Experiment 108523 PARAMETER Experiment Name: Zm_42deg_Heat_P Parameter: Age (day) Value: 8
  misc_feature: MA Experiment 108523 PARAMETER Experiment Name: Zm_42deg_Heat_P Parameter: Organism Value: Zea mays
  misc_feature: MA Experiment 108523 PARAMETER Experiment Name: Zm_42deg_Heat_P Parameter: Plant Line Value: 35A19
  misc_feature: MA Experiment 108523 PARAMETER Experiment Name: Zm_42deg_Heat_P Parameter: Temperature (deg C) Value: 42 vs. 22
  misc_feature: MA Experiment 108523 PARAMETER Experiment Name: Zm_42deg_Heat_P Parameter: Timepoint (hr) Value: 6
  misc_feature: MA Experiment 108523 PARAMETER Experiment Name: Zm_42deg_Heat_P Parameter: Tissue Value: Aerial
  misc_feature: MA Experiment ID: 108535 Result: Down-regulated in Transcription
  misc_feature: MA Experiment 108535 PARAMETER Experiment Name: Zm_Meristem_P Parameter: Age (day) Value: 8
  misc_feature: MA Experiment 108535 PARAMETER Experiment Name: Zm_Meristem_P Parameter: Organism Value: Zea mays
  misc_feature: MA Experiment 108535 PARAMETER Experiment Name: Zm_Meristem_P Parameter: Plant Line Value: 35A19
  misc_feature: MA Experiment 108535 PARAMETER Experiment Name: Zm_Meristem_P Parameter: Tissue Value: Root Meristem vs. Above Root Meristem
  misc_feature: MA Experiment ID: 108536 Result: Down-regulated in Transcription
  misc_feature: MA Experiment 108536 PARAMETER Experiment Name: Zm_Meristem_P Parameter: Age (day) Value: 8
  misc_feature: MA Experiment 108536 PARAMETER Experiment Name: Zm_Meristem_P Parameter: Organism Value: Zea mays
  misc_feature: MA Experiment 108536 PARAMETER Experiment Name: Zm_Meristem_P Parameter: Plant Line Value: 35A19
  misc_feature: MA Experiment 108536 PARAMETER Experiment Name: Zm_Meristem_P Parameter: Tissue Value: Shoot Meristem vs. Above Shoot Meristem
  misc_feature: MA Experiment ID: 108543 Result: Up-regulated in Transcription
  misc_feature: MA Experiment ID: 108556 Result: Down-regulated in Transcription
  misc_feature: MA Experiment 108556 PARAMETER Experiment Name: Zm_Drought_P Parameter: Age (day) Value: 9
  misc_feature: MA Experiment 108556 PARAMETER Experiment Name: Zm_Drought_P Parameter: Organism Value: Zea mays
  misc_feature: MA Experiment 108556 PARAMETER Experiment Name: Zm_Drought_P Parameter: Plant Line Value: 35A19
  misc_feature: MA Experiment 108556 PARAMETER Experiment Name: Zm_Drought_P Parameter: Timepoint (hr) Value: 24
  misc_feature: MA Experiment 108556 PARAMETER Experiment Name: Zm_Drought_P Parameter: Tissue Value: Aerial
  misc_feature: MA Experiment 108556 PARAMETER Experiment Name: Zm_Drought_P Parameter: Treatment Value: Drought vs. No Drought
  misc_feature: MA Experiment ID: 108597 Result: Down-regulated in Transcription
  misc_feature: MA Experiment 108597 PARAMETER Experiment Name: Zm_100uM_ABA_P Parameter: Age (day) Value: 9
  misc_feature: MA Experiment 108597 PARAMETER Experiment Name: Zm_100uM_ABA_P Parameter: Organism Value: Zea mays
  misc_feature: MA Experiment 108597 PARAMETER Experiment Name: Zm_100uM_ABA_P Parameter: Plant Line Value: 35A19
  misc_feature: MA Experiment 108597 PARAMETER Experiment Name: Zm_100uM_ABA_P Parameter: Timepoint (hr) Value: 24
  misc_feature: MA Experiment 108597 PARAMETER Experiment Name: Zm_100uM_ABA_P Parameter: Tissue Value: Aerial
  misc_feature: MA Experiment 108597 PARAMETER Experiment Name: Zm_100uM_ABA_P Parameter: Treatment Value: 100uM ABA vs. No Treatment
  misc_feature: MA Experiment ID: 20000477 Result: Down-regulated in Transcription
  misc_feature: MA Experiment 20000477 PARAMETER Experiment Name: Zm_5mM_SA_P Parameter: Age (day) Value: 10
  misc_feature: MA Experiment 20000477 PARAMETER Experiment Name: Zm_5mM_SA_P Parameter: Organism Value: Zea mays
  misc_feature: MA Experiment 20000477 PARAMETER Experiment Name: Zm_5mM_SA_P Parameter: Plant Line Value: 35A19
  misc_feature: MA Experiment 20000477 PARAMETER Experiment Name: Zm_5mM_SA_P Parameter: Timepoint (hr) Value: 48
  misc_feature: MA Experiment 20000477 PARAMETER Experiment Name: Zm_5mM_SA_P Parameter: Tissue Value: Aerial
  misc_feature: MA Experiment 20000477 PARAMETER Experiment Name: Zm_5mM_SA_P Parameter: Treatment Value: 5mM SA vs. No Treatment
  misc_feature: MA Experiment ID: 20000478 Result: Down-regulated in Transcription
  misc_feature: MA Experiment 20000478 PARAMETER Experiment Name: Zm_5mM_SA_P Parameter: Age (day) Value: 11
  misc_feature: MA Experiment 20000478 PARAMETER Experiment Name: Zm_5mM_SA_P Parameter: Organism Value: Zea mays
  misc_feature: MA Experiment 20000478 PARAMETER Experiment Name: Zm_5mM_SA_P Parameter: Plant Line Value: 35A19
  misc_feature: MA Experiment 20000478 PARAMETER Experiment Name: Zm_5mM_SA_P Parameter: Timepoint (hr) Value: 72
  misc_feature: MA Experiment 20000478 PARAMETER Experiment Name: Zm_5mM_SA_P Parameter: Tissue Value: Aerial
  misc_feature: MA Experiment 20000478 PARAMETER Experiment Name: Zm_5mM_SA_P Parameter: Treatment Value: 5mM SA vs. No Treatment
  misc_feature: MA Experiment ID: 20000479 Result: Down-regulated in Transcription
  misc_feature: MA Experiment 20000479 PARAMETER Experiment Name: Zm_Drought_P Parameter: Age (day) Value: 10
  misc_feature: MA Experiment 20000479 PARAMETER Experiment Name: Zm_Drought_P Parameter: Organism Value: Zea mays
  misc_feature: MA Experiment 20000479 PARAMETER Experiment Name: Zm_Drought_P Parameter: Plant Line Value: 35A19
  misc_feature: MA Experiment 20000479 PARAMETER Experiment Name: Zm_Drought_P Parameter: Timepoint (hr) Value: 48
  misc_feature: MA Experiment 20000479 PARAMETER Experiment Name: Zm_Drought_P Parameter: Tissue Value: Aerial
  misc_feature: MA Experiment 20000479 PARAMETER Experiment Name: Zm_Drought_P Parameter: Treatment Value: Drought vs. No Drought
  misc_feature: MA Experiment ID: 20000480 Result: Down-regulated in Transcription
  misc_feature: MA Experiment 20000480 PARAMETER Experiment Name: Zm_Drought_P Parameter: Age (day) Value: 11
  misc_feature: MA Experiment 20000480 PARAMETER Experiment Name: Zm_Drought_P Parameter: Organism Value: Zea mays
  misc_feature: MA Experiment 20000480 PARAMETER Experiment Name: Zm_Drought_P Parameter: Plant Line Value: 35A19
  misc_feature: MA Experiment 20000480 PARAMETER Experiment Name: Zm_Drought_P Parameter: Timepoint (hr) Value: 72
  misc_feature: MA Experiment 20000480 PARAMETER Experiment Name: Zm_Drought_P Parameter: Tissue Value: Aerial
  misc_feature: MA Experiment 20000480 PARAMETER Experiment Name: Zm_Drought_P Parameter: Treatment Value: Drought vs. No Drought
  misc_feature: MA Experiment ID: 20000488 Result: Down-regulated in Transcription
  misc_feature: MA Experiment 20000488 PARAMETER Experiment Name: Zm_50mM_NH4NO3_L_to_H_P Parameter: Organism Value: Zea mays
  misc_feature: MA Experiment 20000488 PARAMETER Experiment Name: Zm_50mM_NH4NO3_L_to_H_P Parameter: Timepoint (hr) Value: 8
  misc_feature: MA Experiment 20000488 PARAMETER Experiment Name: Zm_50mM_NH4NO3_L_to_H_P Parameter: Tissue Value: Leaves
  misc_feature: MA Experiment 20000488 PARAMETER Experiment Name: Zm_50mM_NH4NO3_L_to_H_P Parameter: Treatment Value: 50mM NH4NO3 vs. 100mM Mannitol
  misc_feature: MA Experiment ID: 20000533 Result: Down-regulated in Transcription
  misc_feature: MA Experiment 20000533 PARAMETER Experiment Name: Zm_0.001percent_MeJA_P Parameter: Age (day) Value: 11
  misc_feature: MA Experiment 20000533 PARAMETER Experiment Name: Zm_0.001percent_MeJA_P Parameter: Organism Value: Zea mays
  misc_feature: MA Experiment 20000533 PARAMETER Experiment Name: Zm_0.001percent_MeJA_P Parameter: Plant Line Value: 35A19
  misc_feature: MA Experiment 20000533 PARAMETER Experiment Name: Zm_0.001percent_MeJA_P Parameter: Timepoint (hr) Value: 72
  misc_feature: MA Experiment 20000533 PARAMETER Experiment Name: Zm_0.001percent_MeJA_P Parameter: Tissue Value: Aerial
  misc_feature: MA Experiment 20000533 PARAMETER Experiment Name: Zm_0.001percent_MeJA_P Parameter: Treatment Value: 0.001percent MeJA vs. No Treatment
  misc_feature: MA Experiment ID: 20000626 Result: Down-regulated in Transcription
  misc_feature: MA Experiment 20000626 PARAMETER Experiment Name: Zm_Herbicide-Treatments_P Parameter: Timepoint (hr) Value: 12
  misc_feature: MA Experiment 20000626 PARAMETER Experiment Name: Zm_Herbicide-Treatments_P Parameter: Tissue Value: Aerial
  misc_feature: MA Experiment 20000626 PARAMETER Experiment Name: Zm_Herbicide-Treatments_P Parameter: Treatment Value: Roundup vs. No Treatment
  misc_feature: MA Experiment ID: 20001608 Result: Up-regulated in Transcription
  misc_feature: MA Experiment 20001608 PARAMETER Experiment Name: Zm_50ppm_KNO3_L-to-H_P Parameter: Age (day) Value: 21
  misc_feature: MA Experiment 20001608 PARAMETER Experiment Name: Zm_50ppm_KNO3_L-to-H_P Parameter: Organism Value: Zea mays
  misc_feature: MA Experiment 20001608 PARAMETER Experiment Name: Zm_50ppm_KNO3_L-to-H_P Parameter: Plant Line Value: 35A19
  misc_feature: MA Experiment 20001608 PARAMETER Experiment Name: Zm_50ppm_KNO3_L-to-H_P Parameter: Timepoint (hr) Value: 48
  misc_feature: MA Experiment 20001608 PARAMETER Experiment Name: Zm_50ppm_KNO3_L-to-H_P Parameter: Tissue Value: Shoots
  misc_feature: MA Experiment 20001608 PARAMETER Experiment Name: Zm_50ppm_KNO3_L-to-H_P Parameter: Treatment Value: 50ppm KNO3 vs. 50ppm KCl
aaggatcccaatgctatatgctactcgactacatactgctgagtacatcagtactcagatagcccgagtcggaccacactgcttgcacagtagaagatgataggcgatgaactggattccgatgtggttgtacgctacttcagaggcaagagcatcctgatcactggatcaacaggtttcctggggaaagtgctcgtggagaagatactgagggttcagccggacgtgaagaagctcttcctcctcgttcgagccgccgatgacgagtctgccaagcagagggtcgagaccgaggtgacaggaaaggagatctttcaggttctgaaagaaaagcacggtaacgggttcgaaggtttcgtccaagaaaaaatctgccctctgccaggagacgtcatgcacgagaacttgggcctaggccctgccaaactgagacaagtgtgcaaggaaatagacatcgttgtaaacggagctgcaactacgaatttctacgaaagatacgatgtggctttcgacacaaatgtcatgggagccaagcacatatgcgagttcgccaagaggtgcagcaaactcaagatgctgctacatgtttcaacagcttatgtagctggtgaacaggaaggggtggtgctggagaagccattccgtttgggcgaaaccctgagggaaggcacgcacctggacatcgagtccgaactaaacctgataaaagagacgaggagagaactgaaggccagccgttgttcagaaaaggctgagaggagaagcatgaaggagcttggcctcaagagggcaagggagttcgggtggcccaacacctatgtgttcaccaaggcaatgggggagatgctgctgggcgcccacctccggggagacgtgccggtcgtcatcgtccggcctagtatcataaccagcatcctcaaggagccattgcctggatggatggaagggatcaggacgattgactcgttcatcatcggctacgccaagcaggctctgtccatcttcttagttgacctcgacctgatcatggacgtgattcccggggacatggtggtgaacgccatgatggtggccatggcggcgcactcggaggagcgggggcagcagactagcatctaccacctgacgtcgtcggtgcggcacccggcgccctacgccgtcctcgcggagtgcggccgccgctacttcctccacaacccactcaggtccgggggcaagaacagcgagcccgtgcggcctagcaggatgcgcttcttccgcaccctccccgggttccgcgcctacatggccatcaagttcaggcttccccttgagatccttcgcctgctcaacattgtcctgtgcggtgctctctcccggcgccacgacgagctcagccgcaagtacagatacgtcatgcatatcgcagagctgtacgcgccttactccttgttcaaaggatgcttcgatgactccaacacggagaggctgagggcggcgatggcgaacaggagcagcggatatgacttgggtttcgatcccatgtgcgtagactgggacgactatttctacagggttcacatccccggtgttgtcaagtacctgtgtggttactaggttaatacatatttaagatccggagagagccaaatgtatcttcgcatgttttaatacacaaatatgtcgctgtagtttgcagattatt

SEQ ID NO: 16983 - protein, 499 aa, Zea mays subsp. mays
  peptide (1)..(499): Ceres Seq. ID no. 12358912
  misc_feature (292)..(496): Pfam Name: Male sterility protein Pfam Description: Male sterility protein
  misc_feature (4)..(496): Homolog of NCBI NO: 5020215 NR Description: acyl CoA reductase [Simmondsia chinensis]
  misc_feature (12)..(496): Homolog of NCBI NO: 15242260 NR Description: male sterility 2-like protein (emb|CAA68191.1)
  misc_feature (6)..(495): Homolog of NCBI NO: 38346864 NR Description: OSJNBb0002N06.4 [Oryza sativa (japonica
  misc_feature (6)..(495): Homolog of NCBI NO: 38346871 NR Description: OSJNBb0002N06.11 [Oryza sativa (japonica
  misc_feature (6)..(465): Homolog of NCBI NO: 34394121 NR Description: putative fatty acyl coA reductase
  misc_feature (4)..(496): Homolog of NCBI NO: 22003090 NR Description: fatty acyl coA reductase [Triticum aestivum]
  misc_feature (4)..(496): Homolog of NCBI NO: 22003082 NR Description: fatty acyl coA reductase [Triticum aestivum]
  misc_feature (339)..(496): Homolog of NCBI NO: 22003086 NR Description: fatty acyl coA reductase [Triticum aestivum]
  misc_feature (1)..(391): Homolog of NCBI NO: 22003086 NR Description: fatty acyl coA reductase [Triticum aestivum]
  misc_feature (6)..(497): Homolog of NCBI NO: 35215152 NR Description: putative fatty acyl coA reductase
MIGDELDSDVVVRYFRGKSILITGSTGFLGKVLVEKILRVQPDVKKLFLLVRAADDESAKQRVETEVTGKEIFQVLKEKHGNGFEGFVQEKICPLPGDVMHENLGLGPAKLRQVCKEIDIVVNGAATTNFYERYDVAFDTNVMGAKHICEFAKRCSKLKMLLHVSTAYVAGEQEGVVLEKPFRLGETLREGTHLDIESELNLIKETRRELKASRCSEKAERRSMKELGLKRAREFGWPNTYVFTKAMGEMLLGAHLRGDVPVVIVRPSIITSILKEPLPGWMEGIRTIDSFIIGYAKQALSIFLVDLDLIMDVIPGDMVVNAMMVAMAAHSEERGQQTSIYHLTSSVRHPAPYAVLAECGRRYFLHNPLRSGGKNSEPVRPSRMRFFRTLPGFRAYMAIKFRLPLEILRLLNIVLCGALSRRHDELSRKYRYVMHIAELYAPYSLFKGCFDDSNTERLRAAMANRSSGYDLGFDPMCVDWDDYFYRVHIPGVVKYLCGY

SEQ ID NO: 16984 - protein, 400 aa, Zea mays subsp. mays
  peptide (1)..(400): Ceres Seq. ID no. 12358913
  misc_feature (193)..(397): Pfam Name: Male sterility protein Pfam Description: Male sterility protein
  misc_feature (1)..(397): Homolog of NCBI NO: 5020215 NR Description: acyl CoA reductase [Simmondsia chinensis]
  misc_feature (1)..(397): Homolog of NCBI NO: 15242260 NR Description: male sterility 2-like protein (emb|CAA68191.1)
  misc_feature (1)..(396): Homolog of NCBI NO: 38346864 NR Description: OSJNBb0002N06.4 [Oryza sativa (japonica
  misc_feature (1)..(396): Homolog of NCBI NO: 38346871 NR Description: OSJNBb0002N06.11 [Oryza sativa (japonica
  misc_feature (1)..(366): Homolog of NCBI NO: 34394121 NR Description: putative fatty acyl coA reductase
  misc_feature (1)..(397): Homolog of NCBI NO: 22003090 NR Description: fatty acyl coA reductase [Triticum aestivum]
  misc_feature (1)..(397): Homolog of NCBI NO: 22003082 NR Description: fatty acyl coA reductase [Triticum aestivum]
  misc_feature (240)..(397): Homolog of NCBI NO: 22003086 NR Description: fatty acyl coA reductase [Triticum aestivum]
  misc_feature (1)..(292): Homolog of NCBI NO: 22003086 NR Description: fatty acyl coA reductase [Triticum aestivum]
  misc_feature (1)..(398): Homolog of NCBI NO: 35215152 NR Description: putative fatty acyl coA reductase
MHENLGLGPAKLRQVCKEIDIVVNGAATTNFYERYDVAFDTNVMGAKHICEFAKRCSKLKMLLHVSTAYVAGEQEGVVLEKPFRLGETLREGTHLDIESELNLIKETRRELKASRCSEKAERRSMKELGLKRAREFGWPNTYVFTKAMGEMLLGAHLRGDVPVVIVRPSIITSILKEPLPGWMEGIRTIDSFIIGYAKQALSIFLVDLDLIMDVIPGDMVVNAMMVAMAAHSEERGQQTSIYHLTSSVRHPAPYAVLAECGRRYFLHNPLRSGGKNSEPVRPSRMRFFRTLPGFRAYMAIKFRLPLEILRLLNIVLCGALSRRHDELSRKYRYVMHIAELYAPYSLFKGCFDDSNTERLRAAMANRSSGYDLGFDPMCVDWDDYFYRVHIPGVVKYLCGY

SEQ ID NO: 16985 - protein, 357 aa, Zea mays subsp. mays
  peptide (1)..(357): Ceres Seq. ID no. 12358914
  misc_feature (150)..(354): Pfam Name: Male sterility protein Pfam Description: Male sterility protein
  misc_feature (1)..(354): Homolog of NCBI NO: 5020215 NR Description: acyl CoA reductase [Simmondsia chinensis]
  misc_feature (1)..(354): Homolog of NCBI NO: 15242260 NR Description: male sterility 2-like protein (emb|CAA68191.1)
  misc_feature (1)..(353): Homolog of NCBI NO: 38346864 NR Description: OSJNBb0002N06.4 [Oryza sativa (japonica
  misc_feature (1)..(353): Homolog of NCBI NO: 38346871 NR Description: OSJNBb0002N06.11 [Oryza sativa (japonica
  misc_feature (1)..(323): Homolog of NCBI NO: 34394121 NR Description: putative fatty acyl coA reductase
  misc_feature (1)..(354): Homolog of NCBI NO: 22003090 NR Description: fatty acyl coA reductase [Triticum aestivum]
  misc_feature (1)..(354): Homolog of NCBI NO: 22003082 NR Description: fatty acyl coA reductase [Triticum aestivum]
  misc_feature (197)..(354): Homolog of NCBI NO: 22003086 NR Description: fatty acyl coA reductase [Triticum aestivum]
  misc_feature (1)..(249): Homolog of NCBI NO: 22003086 NR Description: fatty acyl coA reductase [Triticum aestivum]
  misc_feature (1)..(355): Homolog of NCBI NO: 35215152 NR Description: putative fatty acyl coA reductase
MGAKHICEFAKRCSKLKMLLHVSTAYVAGEQEGVVLEKPFRLGETLREGTHLDIESELNLIKETRRELKASRCSEKAERRSMKELGLKRAREFGWPNTYVFTKAMGEMLLGAHLRGDVPVVIVRPSIITSILKEPLPGWMEGIRTIDSFIIGYAKQALSIFLVDLDLIMDVIPGDMVVNAMMVAMAAHSEERGQQTSIYHLTSSVRHPAPYAVLAECGRRYFLHNPLRSGGKNSEPVRPSRMRFFRTLPGFRAYMAIKFRLPLEILRLLNIVLCGALSRRHDELSRKYRYVMHIAELYAPYSLFKGCFDDSNTERLRAAMANRSSGYDLGFDPMCVDWDDYFYRVHIPGVVKYLCGY

SEQ ID NO: 16986 - DNA, 1584 bp, Zea mays subsp. mays
  misc_feature (1)..(1584): Ceres Seq. ID no. 12383435
  misc_feature: MA Experiment ID: 108535 Result: Down-regulated in Transcription
  misc_feature: MA Experiment 108535 PARAMETER Experiment Name: Zm_Meristem_P Parameter: Age (day) Value: 8
  misc_feature: MA Experiment 108535 PARAMETER Experiment Name: Zm_Meristem_P Parameter: Organism Value: Zea mays
  misc_feature: MA Experiment 108535 PARAMETER Experiment Name: Zm_Meristem_P Parameter: Plant Line Value: 35A19
  misc_feature: MA Experiment 108535 PARAMETER Experiment Name: Zm_Meristem_P Parameter: Tissue Value: Root Meristem vs. Above Root Meristem
  misc_feature: MA Experiment ID: 108546 Result: Up-regulated in Transcription
  misc_feature: MA Experiment 108546 PARAMETER Experiment Name: Zm_Imbibed_Seeds_P Parameter: Age (day) Value: 3 vs. 2
  misc_feature: MA Experiment 108546 PARAMETER Experiment Name: Zm_Imbibed_Seeds_P Parameter: Organism Value: Zea mays
  misc_feature: MA Experiment 108546 PARAMETER Experiment Name: Zm_Imbibed_Seeds_P Parameter: Plant Line Value: 35A19
  misc_feature: MA Experiment 108546 PARAMETER Experiment Name: Zm_Imbibed_Seeds_P Parameter: Tissue Value: Roots vs. Embryo
  misc_feature: MA Experiment ID: 108689 Result: Down-regulated in Transcription
  misc_feature: MA Experiment 108689 PARAMETER Experiment Name: Zm_Drought_Roots_P Parameter: Age (day) Value: 9
  misc_feature: MA Experiment 108689 PARAMETER Experiment Name: Zm_Drought_Roots_P Parameter: Organism Value: Zea mays
  misc_feature: MA Experiment 108689 PARAMETER Experiment Name: Zm_Drought_Roots_P Parameter: Plant Line Value: 35A19
  misc_feature: MA Experiment 108689 PARAMETER Experiment Name: Zm_Drought_Roots_P Parameter: Timepoint (hr) Value: 24
  misc_feature: MA Experiment 108689 PARAMETER Experiment Name: Zm_Drought_Roots_P Parameter: Tissue Value: Roots
  misc_feature: MA Experiment 108689 PARAMETER Experiment Name: Zm_Drought_Roots_P Parameter: Treatment Value: Drought vs. No Drought
  misc_feature: MA Experiment ID: 20000480 Result: Down-regulated in Transcription
  misc_feature: MA Experiment 20000480 PARAMETER Experiment Name: Zm_Drought_P Parameter: Age (day) Value: 11
  misc_feature: MA Experiment 20000480 PARAMETER Experiment Name: Zm_Drought_P Parameter: Organism Value: Zea mays
  misc_feature: MA Experiment 20000480 PARAMETER Experiment Name: Zm_Drought_P Parameter: Plant Line Value: 35A19
  misc_feature: MA Experiment 20000480 PARAMETER Experiment Name: Zm_Drought_P Parameter: Timepoint (hr) Value: 72
  misc_feature: MA Experiment 20000480 PARAMETER Experiment Name: Zm_Drought_P Parameter: Tissue Value: Aerial
  misc_feature: MA Experiment 20000480 PARAMETER Experiment Name: Zm_Drought_P Parameter: Treatment Value: Drought vs. No Drought
ctacgccaagcccgcaattaaccctcactaaagggaacaaaagctggagctccaccgcggtggcggccgctctagaactagtggatcccccgggctgcaggaattcgcacgagaccattacctagaacatcctaatcgaaaaacccacacctacacctacacattacagccagtactgctgtcacctcacttagcaaagctaatacgtatgtcatagcagcttgccaccatggcgagcatcaccgtgacaaggaaatcccaatccttcgtcgtgccatcgtccacgccaactccgacgaccgagacgctcgagttgtcggccatcgaccgcgttccaggcctgcgccacacggtgcgatccctgcacgtgttccgccgcaaggacgccgccgcctccgccgcccactacgatgctgctgccgccggcaggccggccgaggtgatccgcgcggcgctgtcccgcgcgctggtggactaccgcccgttcgccggccgtttcgtcggctcactgtacgccggggaggcgagcgttgagtgcaccgacgacggtgcgtggttcgtggacgctgtcacagattgcagcctcgaggacgtgaacggcctcgactacccgcttatggtctccgaggaagagctgctgccggctccagaggaaggtgttgacccaaccagtattccgattatgatgcaggtcacggaatttgcttgtggaggatttgtggtggggctagtcgcagtgcacacccttgctgacgggctcggtgcagctcaattcatcaatgcaatttctgagtttgcccgtggagtagttaaacctacaatagcacctatatgggcacgggagttaataccaaacccacctaaaatgcctcctgggccaccaccatccttcgagtgcttcgggttcaaacattttgttatggatgtggcagttaacaatattgcacatgtcaagagtgaatactttcaaaccaatggacactattgctctacatttgatgttgccattgccaaggtttggcaagctaggacaagggcaatcaagtacgaaccaaatttcaaggtgcatgtttgcttctttgccaacactcgccacctcctcacacatgtgctacccaaggttggtggcttctatggaaattgcttctatccagtgactgtcacagcaactgctgaggtagttgctagttcaagattgcttgatgtgattaggatgataagggatgggaaggctaggcttcctttagagttttccagatggtccacgggcaatgtgaaagtagacccatatcaactaacattcaagcacaatgttctatttgtgtccgattggacacggcttggattctttgaagttgactatgggtggggtgtaccaaaccatatcctccctttcacttatgcagactacatggctgtagcagttcttggggctccaccgtctatgaagaaggggactcgaataatgacacaatgtgtcgaggaggagcatctcgtggacttcaaggccgagatgaaagccttcttttaggtcctcggattttacttgaaagttcaaacattatgcatttatgtgttcaattc

SEQ ID NO: 16987 - protein, 433 aa, Zea mays subsp. mays
  peptide (1)..(433): Ceres Seq. ID no. 12383436
  misc_feature (5)..(425): Pfam Name: Transferase family Pfam Description: Transferase family
  misc_feature (11)..(431): Homolog of NCBI NO: 28380211 NR Description: Taxadien-5-alpha-ol O-acetyltransferase
  misc_feature (3)..(432): Homolog of NCBI NO: 38346537 NR Description: OSJNBa0040D17.12 [Oryza sativa (japonica
  misc_feature (10)..(431): Homolog of NCBI NO: 28380187 NR Description: Taxadien-5-alpha-ol O-acetyltransferase
  misc_feature (8)..(431): Homolog of NCBI NO: 28558088 NR Description: 3'-N-debenzoyl-2'-deoxytaxol N-benzoyltransferase
  misc_feature (3)..(421): Homolog of NCBI NO: 15228696 NR Description: putative protein; protein id: At3g62160.1
  misc_feature (1)..(432): Homolog of NCBI NO: 34912652 NR Description: putative acetyl transferase
  misc_feature (1)..(430): Homolog of NCBI NO: 34912654 NR Description: putative acetyl transferase
  misc_feature (162)..(432): Homolog of NCBI NO: 18558566 NR Description: putative 0-deacetylbaccatin III-10-O-acetyl
  misc_feature (25)..(430): Homolog of NCBI NO: 34906304 NR Description: unnamed protein product [Oryza sativa (japonica
  misc_feature (2)..(425): Homolog of NCBI NO: 34906150 NR Description: putative 0-deacetylbaccatin III-10-O-acetyl
MASITVTRKSQSFVVPSSTPTPTTETLELSAIDRVPGLRHTVRSLHVFRRKDAAASAAHYDAAAAGRPAEVIRAALSRALVDYRPFAGRFVGSLYAGEASVECTDDGAWFVDAVTDCSLEDVNGLDYPLMVSEEELLPAPEEGVDPTSIPIMMQVTEFACGGFVVGLVAVHTLADGLGAAQFINAISEFARGVVKPTIAPIWARELIPNPPKMPPGPPPSFECFGFKHFVMDVAVNNIAHVKSEYFQTNGHYCSTFDVAIAKVWQARTRAIKYEPNFKVHVCFFANTRHLLTHVLPKVGGFYGNCFYPVTVTATAEVVASSRLLDVIRMIRDGKARLPLEFSRWSTGNVKVDPYQLTFKHNVLFVSDWTRLGFFEVDYGWGVPNHILPFTYADYMAVAVLGAPPSMKKGTRIMTQCVEEEHLVDFKAEMKAFF

SEQ ID NO: 16988 - protein, 304 aa, Zea mays subsp. mays
  peptide (1)..(304): Ceres Seq. ID no. 12383437
  misc_feature (1)..(296): Pfam Name: Transferase family Pfam Description: Transferase family
  misc_feature (1)..(302): Homolog of NCBI NO: 28380211 NR Description: Taxadien-5-alpha-ol O-acetyltransferase
  misc_feature (1)..(303): Homolog of NCBI NO: 38346537 NR Description: OSJNBa0040D17.12 [Oryza sativa (japonica
  misc_feature (1)..(302): Homolog of NCBI NO: 28380187 NR Description: Taxadien-5-alpha-ol O-acetyltransferase
  misc_feature (1)..(302): Homolog of NCBI NO: 28558088 NR Description: 3'-N-debenzoyl-2'-deoxytaxol N-benzoyltransferase
  misc_feature (1)..(292): Homolog of NCBI NO: 15228696 NR Description: putative protein; protein id: At3g62160.1
  misc_feature (1)..(303): Homolog of NCBI NO: 34912652 NR Description: putative acetyl transferase
  misc_feature (1)..(301): Homolog of NCBI NO: 34912654 NR Description: putative acetyl transferase
  misc_feature (33)..(303): Homolog of NCBI NO: 18558566 NR Description: putative 0-deacetylbaccatin III-10-O-acetyl
  misc_feature (1)..(301): Homolog of NCBI NO: 34906304 NR Description: unnamed protein product [Oryza sativa (japonica
  misc_feature (1)..(296): Homolog of NCBI NO: 34906150 NR Description: putative 0-deacetylbaccatin III-10-O-acetyl
MVSEEELLPAPEEGVDPTSIPIMMQVTEFACGGFVVGLVAVHTLADGLGAAQFINAISEFARGVVKPTIAPIWARELIPNPPKMPPGPPPSFECFGFKHFVMDVAVNNIAHVKSEYFQTNGHYCSTFDVAIAKVWQARTRAIKYEPNFKVHVCFFANTRHLLTHVLPKVGGFYGNCFYPVTVTATAEVVASSRLLDVIRMIRDGKARLPLEFSRWSTGNVKVDPYQLTFKHNVLFVSDWTRLGFFEVDYGWGVPNHILPFTYADYMAVAVLGAPPSMKKGTRIMTQCVEEEHLVDFKAEMKAFF

SEQ ID NO: 16989 - protein, 282 aa, Zea mays subsp. mays
  peptide (1)..(282): Ceres Seq. ID no. 12383438
  misc_feature (1)..(274): Pfam Name: Transferase family Pfam Description: Transferase family
  misc_feature (1)..(280): Homolog of NCBI NO: 28380211 NR Description: Taxadien-5-alpha-ol O-acetyltransferase
  misc_feature (1)..(281): Homolog of NCBI NO: 38346537 NR Description: OSJNBa0040D17.12 [Oryza sativa (japonica
  misc_feature (1)..(280): Homolog of NCBI NO: 28380187 NR Description: Taxadien-5-alpha-ol O-acetyltransferase
  misc_feature (1)..(280): Homolog of NCBI NO: 28558088 NR Description: 3'-N-debenzoyl-2'-deoxytaxol N-benzoyltransferase
  misc_feature (1)..(270): Homolog of NCBI NO: 15228696 NR Description: putative protein; protein id: At3g62160.1
  misc_feature (1)..(281): Homolog of NCBI NO: 34912652 NR Description: putative acetyl transferase
  misc_feature (1)..(279): Homolog of NCBI NO: 34912654 NR Description: putative acetyl transferase
  misc_feature (11)..(281): Homolog of NCBI NO: 18558566 NR Description: putative 0-deacetylbaccatin III-10-O-acetyl
  misc_feature (1)..(279): Homolog of NCBI NO: 34906304 NR Description: unnamed protein product [Oryza sativa (japonica
  misc_feature (1)..(274): Homolog of NCBI NO: 34906150 NR Description: putative 0-deacetylbaccatin III-10-O-acetyl
MMQVTEFACGGFVVGLVAVHTLADGLGAAQFINAISEFARGVVKPTIAPIWARELIPNPPKMPPGPPPSFECFGFKHFVMDVAVNNIAHVKSEYFQTNGHYCSTFDVAIAKVWQARTRAIKYEPNFKVHVCFFANTRHLLTHVLPKVGGFYGNCFYPVTVTATAEVVASSRLLDVIRMIRDGKARLPLEFSRWSTGNVKVDPYQLTFKHNVLFVSDWTRLGFFEVDYGWGVPNHILPFTYADYMAVAVLGAPPSMKKGTRIMTQCVEEEHLVDFKAEMKAFF

SEQ ID NO: 16990 - DNA, 1252 bp, Zea mays subsp. mays
  misc_feature (1)..(1252): Ceres Seq. ID no. 12360776
  misc_feature: MA Experiment ID: 108528 Result: Up-regulated in Transcription
  misc_feature: MA Experiment 108528 PARAMETER Experiment Name: Zm_Imbibed_Seeds_P Parameter: Age (day) Value: 5 vs. 2
  misc_feature: MA Experiment 108528 PARAMETER Experiment Name: Zm_Imbibed_Seeds_P Parameter: Organism Value: Zea mays
  misc_feature: MA Experiment 108528 PARAMETER Experiment Name: Zm_Imbibed_Seeds_P Parameter: Plant Line Value: 35A19
  misc_feature: MA Experiment 108528 PARAMETER Experiment Name: Zm_Imbibed_Seeds_P Parameter: Tissue Value: Aerial vs. Embryo
  misc_feature: MA Experiment ID: 108530 Result: Up-regulated in Transcription
  misc_feature: MA Experiment 108530 PARAMETER Experiment Name: Zm_Imbibed_Seeds_P Parameter: Age (day) Value: 6 vs. 2
  misc_feature: MA Experiment 108530 PARAMETER Experiment Name: Zm_Imbibed_Seeds_P Parameter: Organism Value: Zea mays
  misc_feature: MA Experiment 108530 PARAMETER Experiment Name: Zm_Imbibed_Seeds_P Parameter: Plant Line Value: 35A19
  misc_feature: MA Experiment 108530 PARAMETER Experiment Name: Zm_Imbibed_Seeds_P Parameter: Tissue Value: Aerial vs. Embryo
  misc_feature: MA Experiment ID: 108535 Result: Down-regulated in Transcription
  misc_feature: MA Experiment 108535 PARAMETER Experiment Name: Zm_Meristem_P Parameter: Age (day) Value: 8
  misc_feature: MA Experiment 108535 PARAMETER Experiment Name: Zm_Meristem_P Parameter: Organism Value: Zea mays
  misc_feature: MA Experiment 108535 PARAMETER Experiment Name: Zm_Meristem_P Parameter: Plant Line Value: 35A19
  misc_feature: MA Experiment 108535 PARAMETER Experiment Name: Zm_Meristem_P Parameter: Tissue Value: Root Meristem vs. Above Root Meristem
  misc_feature: MA Experiment ID: 108545 Result: Up-regulated in Transcription
  misc_feature: MA Experiment 108545 PARAMETER Experiment Name: Zm_Imbibed_Seeds_P Parameter: Age (day) Value: 3 vs. 2
  misc_feature: MA Experiment 108545 PARAMETER Experiment Name: Zm_Imbibed_Seeds_P Parameter: Organism Value: Zea mays
  misc_feature: MA Experiment 108545 PARAMETER Experiment Name: Zm_Imbibed_Seeds_P Parameter: Plant Line Value: 35A19
  misc_feature: MA Experiment 108545 PARAMETER Experiment Name: Zm_Imbibed_Seeds_P Parameter: Tissue Value: Aerial vs. Embryo
  misc_feature: MA Experiment ID: 108547 Result: Up-regulated in Transcription
  misc_feature: MA Experiment 108547 PARAMETER Experiment Name: Zm_Imbibed_Seeds_P Parameter: Age (day) Value: 4 vs. 2
  misc_feature: MA Experiment 108547 PARAMETER Experiment Name: Zm_Imbibed_Seeds_P Parameter: Organism Value: Zea mays
  misc_feature: MA Experiment 108547 PARAMETER Experiment Name: Zm_Imbibed_Seeds_P Parameter: Plant Line Value: 35A19
  misc_feature: MA Experiment 108547 PARAMETER Experiment Name: Zm_Imbibed_Seeds_P Parameter: Tissue Value: Aerial vs. Embryo
  misc_feature: MA Experiment ID: 108687 Result: Down-regulated in Transcription
  misc_feature: MA Experiment 108687 PARAMETER Experiment Name: Zm_Embryos-Flowers__P Parameter: Tissue Value: Embryo vs. Aerial+
  misc_feature: MA Experiment ID: 20000534 Result: Down-regulated in Transcription
  misc_feature: MA Experiment 20000534 PARAMETER Experiment Name: Zm_Hybrid_Pollen_P Parameter: Age (day) Value: 8
  misc_feature: MA Experiment 20000534 PARAMETER Experiment Name: Zm_Hybrid_Pollen_P Parameter: Organism Value: Zea mays
  misc_feature: MA Experiment 20000534 PARAMETER Experiment Name: Zm_Hybrid_Pollen_P Parameter: Plant Line Value: 35A19
  misc_feature: MA Experiment 20000534 PARAMETER Experiment Name: Zm_Hybrid_Pollen_P Parameter: Tissue Value: Pollen vs. Aerial
gcacgagaccattacctagaacatcctaatcgaaaaaggtacaccaatcgcttcgtccccgcgtctcgccgcgtagcggcgtaggcgccacagaaactcgcacgccgctccccgccgtccggcccgagtcgccgtcgctgccgaatccaatccatggctccgcccgccgcacccaccgcgctgcaccaccgcacgcccctcctcctcccccgccgcaccgtcgccttgggtgccaccgccaccgcgcgcgccgccagggccgcttctctcgccgtcagggcccagccggacaccaccgccgcagccgtctccacctccgcgcctgagccggcgcccgagttcaagcctccgccggggttcaaggcgcccgagcccaagaggtacgaggtcaagtccggccaggtgggcagcgtcctcggcgcctcgctcgccatcccccttcgcctcggcaccggcgtcttcgtcctcgggtactcgccatctcttgtttctccatcagagataccatcagaccagtatgcactggaatttggagcttggaaggtgaaagaggaatcaaaaataggacagtgcaaacgaccagaaaagcctatcgagatatatgaatttgaaggttgtccattttgtcggaaggtcagagagatggtaacagtcttggacctagatgtattattttacccctgtcctcaaaaaggcccaacattccgacctaaagtcctcgaaatgggtggaaagaaacaattcccttacatggtagatccaaacacaggggtcgccatgtatgaatccgatgacatcataaaatatctagctgatacatatggcgatggaactgttccaattatgctatcacttggtctgttgacagcaattacagcagggcttgctactcttggtcgtattggaaagggaaattcctacattgcttcaaaagtcccaccgcagcccatagagatatgggcatgtgagggatctcccttctgtaaattagtacgagagacacttgtcgagttggaattgccacatctgctacacagctgcgcacgaggcagccccaaacgacaagaatttttcaagaaaaaggggcttttccaggcgccgtacatcgaagatcctaacacgggagtccagatgtttgaaagcgctgaaatcatagactacctgaaggcaacatatgccctgtacccaagctcgtagtgatgtatcagaaatggtcattgtaatgttgcgtgtagattcagttcttcccggt

SEQ ID NO: 16991 - protein, 347 aa, Zea mays subsp. mays
  peptide (1)..(347): Ceres Seq. ID no. 12360777
  misc_feature (143)..(342): Homolog of NCBI NO: 18413285 NR Description: putative protein
  misc_feature (17)..(342): Homolog of NCBI NO: 11282317 NR Description: hypothetical protein F8F6.90 - Arabidopsis
  misc_feature (21)..(342): Homolog of NCBI NO: 21593275 NR Description: unknown [Arabidopsis thaliana]
  misc_feature (21)..(342): Homolog of NCBI NO: 18414386 NR Description: auxin-regulated protein
  misc_feature (233)..(341): Homolog of NCBI NO: 21593568 NR Description: unknown [Arabidopsis thaliana]
  misc_feature (233)..(341): Homolog of NCBI NO: 18413285 NR Description: putative protein
  misc_feature (143)..(342): Homolog of NCBI NO: 7487730 NR Description: hypothetical protein T5L19.130 - Arabidopsis
  misc_feature (143)..(342): Homolog of NCBI NO: 21593568 NR Description: unknown [Arabidopsis thaliana]
MAPPAAPTALHHRTPLLLPRRTVALGATATARAARAASLAVRAQPDTTAAAVSTSAPEPAPEFKPPPGFKAPEPKRYEVKSGQVGSVLGASLAIPLRLGTGVFVLGYSPSLVSPSEIPSDQYALEFGAWKVKEESKIGQCKRPEKPIEIYEFEGCPFCRKVREMVTVLDLDVLFYPCPQKGPTFRPKVLEMGGKKQFPYMVDPNTGVAMYESDDIIKYLADTYGDGTVPIMLSLGLLTAITAGLATLGRIGKGNSYIASKVPPQPIEIWACEGSPFCKLVRETLVELELPHLLHSCARGSPKRQEFFKKKGLFQAPYIEDPNTGVQMFESAEIIDYLKATYALYPSS

SEQ ID NO: 16992 - protein, 184 aa, Zea mays subsp. mays
  peptide (1)..(184): Ceres Seq. ID no. 12360778
  misc_feature (70)..(178): Homolog of NCBI NO: 21593568 NR Description: unknown [Arabidopsis thaliana]
  misc_feature (70)..(178): Homolog of NCBI NO: 18413285 NR Description: putative protein
  misc_feature (1)..(179): Homolog of NCBI NO: 7487730 NR Description: hypothetical protein T5L19.130 - Arabidopsis
  misc_feature (1)..(179): Homolog of NCBI NO: 21593568 NR Description: unknown [Arabidopsis thaliana]
  misc_feature (1)..(179): Homolog of NCBI NO: 18413285 NR Description: putative protein
  misc_feature (1)..(179): Homolog of NCBI NO: 11282317 NR Description: hypothetical protein F8F6.90 - Arabidopsis
  misc_feature (1)..(179): Homolog of NCBI NO: 21593275 NR Description: unknown [Arabidopsis thaliana]
  misc_feature (1)..(179): Homolog of NCBI NO: 18414386 NR Description: auxin-regulated protein
MVTVLDLDVLFYPCPQKGPTFRPKVLEMGGKKQFPYMVDPNTGVAMYESDDIIKYLADTYGDGTVPIMLSLGLLTAITAGLATLGRIGKGNSYIASKVPPQPIEIWACEGSPFCKLVRETLVELELPHLLHSCARGSPKRQEFFKKKGLFQAPYIEDPNTGVQMFESAEIIDYLKATYALYPSS

SEQ ID NO: 16993 - DNA, 1856 bp, Zea mays subsp. mays
  misc_feature (1)..(1856): Ceres Seq. ID no. 12415997
  misc_feature: MA Experiment ID: 108530 Result: Down-regulated in Transcription
  misc_feature: MA Experiment 108530 PARAMETER Experiment Name: Zm_Imbibed_Seeds_P Parameter: Age (day) Value: 6 vs. 2
  misc_feature: MA Experiment 108530 PARAMETER Experiment Name: Zm_Imbibed_Seeds_P Parameter: Organism Value: Zea mays
  misc_feature: MA Experiment 108530 PARAMETER Experiment Name: Zm_Imbibed_Seeds_P Parameter: Plant Line Value: 35A19
  misc_feature: MA Experiment 108530 PARAMETER Experiment Name: Zm_Imbibed_Seeds_P Parameter: Tissue Value: Aerial vs. Embryo
  misc_feature: MA Experiment ID: 108546 Result: Down-regulated in Transcription
  misc_feature: MA Experiment 108546 PARAMETER Experiment Name: Zm_Imbibed_Seeds_P Parameter: Age (day) Value: 3 vs. 2
  misc_feature: MA Experiment 108546 PARAMETER Experiment Name: Zm_Imbibed_Seeds_P Parameter: Organism Value: Zea mays
  misc_feature: MA Experiment 108546 PARAMETER Experiment Name: Zm_Imbibed_Seeds_P Parameter: Plant Line Value: 35A19
  misc_feature: MA Experiment 108546 PARAMETER Experiment Name: Zm_Imbibed_Seeds_P Parameter: Tissue Value: Roots vs. Embryo
  misc_feature: MA Experiment ID: 108547 Result: Down-regulated in Transcription
  misc_feature: MA Experiment 108547 PARAMETER Experiment Name: Zm_Imbibed_Seeds_P Parameter: Age (day) Value: 4 vs. 2
  misc_feature: MA Experiment 108547 PARAMETER Experiment Name: Zm_Imbibed_Seeds_P Parameter: Organism Value: Zea mays
  misc_feature: MA Experiment 108547 PARAMETER Experiment Name: Zm_Imbibed_Seeds_P Parameter: Plant Line Value: 35A19
  misc_feature: MA Experiment 108547 PARAMETER Experiment Name: Zm_Imbibed_Seeds_P Parameter: Tissue Value: Aerial vs. Embryo
  misc_feature: MA Experiment ID: 108687 Result: Down-regulated in Transcription
  misc_feature: MA Experiment 108687 PARAMETER Experiment Name: Zm_Embryos-Flowers__P Parameter: Tissue Value: Embryo vs. Aerial+
gcacgagaccattacctagaacatcctaatcgaaaaacaccagctccactgcatcaaaacccctcatcaccctgcagcctgcactcatcagacatggtgctcaccatggccagcgcccaagaggactcgctcctcctgctcctcctcccgaccacctccccactgccgcccctcgtggccgtgttcatcctagccgccgtcctcctgtggctctcccccggcggtcctgcgtgggcgctctcccgctgccgccgcccgccgcccgggccaacgggcgtggtcaccgcgctctccagccccgtggcgcaccgcaccctggcggcgctgtcccacgccgtagacggcggcaaggcactgatggccttctcggtcgggctgacccgcctcgtcgtgtcgagccagcccgatacggcgcgcgagatcctcgccagccccggcgttcggcgaccgccccgtcaaggacgcggcgcgccacctgctcttccaccgcgccatgggcttcgcgccctcgggagacgcgcactggcgcgggctcccgccgcctcgccgccaaccacctgttcggcccgcgccgccgtggcgggtgccgcgcaccaccgcgcctccatcggcgaggccatggtcgccgacgtcgccgctgccatggcgcgccacggcgaggtccctctcaagcgcgtgctgcatgtcgcgtctctcaaccacatcatggccaccgtgtttggcaagcgctacgacatgggcagccgagagggcgcccttctggacgagatggtggccgagggctacgacctcctgggcacgttcaactgggctgaccacctgccattgctcaagcatctcgacccccagggcgtgcgccgccggtgcaacaggctggtccaaaaggtcgaatcgttcgttggtaagatcatcatggagcacaggacgaggcgcgcaaatggaggattcgtgagcgatgagtgcattggtgacttcgtcgacgtccttcttggcctcgagggtgaggagaagctgtcagatgcggacatgatcgctgttctttgggagatgatcttcagaggcgccgacaccgtggcgatcttgatggagtgggtcatggcgaggatggcgctgcacccggacatccaggcgaaggcccaggcggagctggacggcgtcgtgggcatcgggcgcggcgtggcggacgccgacgtcgccagcctaccctacatccagtgcatcgtgaaggagacgctgcgcatgcacccgccaggcccgctcctgtcgtgggcgcgcctcgccgtccacgacgcgcacgtcggcggccacctggtccccgccggcaccacagccatggtgaacatgtggtccatcgcgcacgaccccgccatctgggccgagccggagaagttccgccccggagcggttccaggaggaggacgtgagcgtcctcgggagcgacctccgcctggcccccttcggcgccgggcgccgcgcctgccccggcaagatactggccctcgccaccacccacctctgtgtcgcccagcttctgcacaagttcgagtgggccgccggcgggggcgtcgacctgtcggagcgcctgagcatgtcgctggagatggccacgccgctggtgtgcaaggccgtacccagggttcagggccaagcggcctcctagcctagcctccatgcatgcctgatgcctggatgccgtagcgagagtgggagactgatgagtgtatgccgttatgtttgtgtgtccatgcatgcatgcatgcctcggctactgtagcttcctggcttgcttgttgtgcatgtcctgcgtcgagaccttgcgtagtatgatgcagtataattttaataataatattatt

SEQ ID NO: 16994 - protein, 554 aa, Zea mays subsp. mays
  peptide (1)..(554): Ceres Seq. ID no. 12415998
  misc_feature (63)..(466): Homolog of NCBI NO: 1352187 NR Description: Cytochrome P450 78A1 (CYPLXXVIII)
  misc_feature (36)..(466): Homolog of NCBI NO: 15226422 NR Description: putative cytochrome P450; protein id: At2g46660.1
  misc_feature (58)..(473): Homolog of NCBI NO: 30962524 NR Description: cytochrome P450 78A11 [Oryza sativa (japonica
  misc_feature (58)..(473): Homolog of NCBI NO: 37534160 NR Description: putative cytochrome 450 [Oryza sativa (japonica
  misc_feature (56)..(475): Homolog of NCBI NO: 5921925 NR Description: Cytochrome P450 78A4
  misc_feature (88)..(491): Homolog of NCBI NO: 15221132 NR Description: cytochrome p450 family; protein id: At1g74110.1
  misc_feature (63)..(466): Homolog of NCBI NO: 15222937 NR Description: cytochrome p450 family; protein id: At1g13710.1
  misc_feature (120)..(466): Homolog of NCBI NO: 1173624 NR Description: cytochrome P-450
  misc_feature (37)..(466): Homolog of NCBI NO: 31126705 NR Description: putative cytochrome P-450 [Oryza sativa (japonica
  misc_feature (35)..(466): Homolog of NCBI NO: 34394563 NR Description: putative cytochrome P-450
ARDHYLEHPNRKTPAPLHQNPSSPCSLHSSDMVLTMASAQEDSLLLLLLPTTSPLPPLVAVFILAAVLLWLSPGGPAWALSRCRRPPPGPTGVVTALSSPVAHRTLAALSHAVDGGKALMAFSVGLTRLVVSSQPDTAREILASPGVRRPPRQGRGAPPALPPRHGLRALGRRALARAPAASPPTTCSARAAVAGAAHHRASIGEAMVADVAAAMARHGEVPLKRVLHVASLNHIMATVFGKRYDMGSREGALLDEMVAEGYDLLGTFNWADHLPLLKHLDPQGVRRRCNRLVQKVESFVGKIIMEHRTRRANGGFVSDECIGDFVDVLLGLEGEEKLSDADMIAVLWEMIFRGADTVAILMEWVMARMALHPDIQAKAQAELDGVVGIGRGVADADVASLPYIQCIVKETLRMHPPGPLLSWARLAVHDAHVGGHLVPAGTTAMVNMWSIAHDPAIWAEPEKFRPGAVPGGGRERPRERPPPGPLRRRAPRLPRQDTGPRHHPPLCRPASAQVRVGRRRGRRPVGAPEHVAGDGHAAGVQGRTQGSGPSGLLA

SEQ ID NO: 16995 - protein, 523 aa, Zea mays subsp. mays
  peptide (1)..(523): Ceres Seq. ID no. 12415999
  misc_feature (32)..(435): Homolog of NCBI NO: 1352187 NR Description: Cytochrome P450 78A1 (CYPLXXVIII)
  misc_feature (5)..(435): Homolog of NCBI NO: 15226422 NR Description: putative cytochrome P450; protein id: At2g46660.1
  misc_feature (27)..(442): Homolog of NCBI NO: 30962524 NR Description: cytochrome P450 78A11 [Oryza sativa (japonica
  misc_feature (27)..(442): Homolog of NCBI NO: 37534160 NR Description: putative cytochrome 450 [Oryza sativa (japonica
  misc_feature (25)..(444): Homolog of NCBI NO: 5921925 NR Description: Cytochrome P450 78A4
  misc_feature (57)..(460): Homolog of NCBI NO: 15221132 NR Description: cytochrome p450 family; protein id: At1g74110.1
  misc_feature (32)..(435): Homolog of NCBI NO: 15222937 NR Description: cytochrome p450 family; protein id: At1g13710.1
  misc_feature (89)..(435): Homolog of NCBI NO: 1173624 NR Description: cytochrome P-450
  misc_feature (6)..(435): Homolog of NCBI NO: 31126705 NR Description: putative cytochrome P-450 [Oryza sativa (japonica
  misc_feature (4)..(435): Homolog of NCBI NO: 34394563 NR Description: putative cytochrome P-450
MVLTMASAQEDSLLLLLLPTTSPLPPLVAVFILAAVLLWLSPGGPAWALSRCRRPPPGPTGVVTALSSPVAHRTLAALSHAVDGGKALMAFSVGLTRLVVSSQPDTAREILASPGVRRPPRQGRGAPPALPPRHGLRALGRRALARAPAASPPTTCSARAAVAGAAHHRASIGEAMVADVAAAMARHGEVPLKRVLHVASLNHIMATVFGKRYDMGSREGALLDEMVAEGYDLLGTFNWADHLPLLKHLDPQGVRRRCNRLVQKVESFVGKIIMEHRTRRANGGFVSDECIGDFVDVLLGLEGEEKLSDADMIAVLWEMIFRGADTVAILMEWVMARMALHPDIQAKAQAELDGVVGIGRGVADADVASLPYIQCIVKETLRMHPPGPLLSWARLAVHDAHVGGHLVPAGTTAMVNMWSIAHDPAIWAEPEKFRPGAVPGGGRERPRERPPPGPLRRRAPRLPRQDTGPRHHPPLCRPASAQVRVGRRRGRRPVGAPEHVAGDGHAAGVQGRTQGSGPSGLLA

SEQ ID NO: 16996 - protein, 519 aa, Zea mays subsp. mays
  peptide (1)..(519): Ceres Seq. ID no. 12416000
  misc_feature (28)..(431): Homolog of NCBI NO: 1352187 NR Description: Cytochrome P450 78A1 (CYPLXXVIII)
  misc_feature (1)..(431): Homolog of NCBI NO: 15226422 NR Description: putative cytochrome P450; protein id: At2g46660.1
  misc_feature (23)..(438): Homolog of NCBI NO: 30962524 NR Description: cytochrome P450 78A11 [Oryza sativa (japonica
  misc_feature (23)..(438): Homolog of NCBI NO: 37534160 NR Description: putative cytochrome 450 [Oryza sativa (japonica
  misc_feature (21)..(440): Homolog of NCBI NO: 5921925 NR Description: Cytochrome P450 78A4
  misc_feature (53)..(456): Homolog of NCBI NO: 15221132 NR Description: cytochrome p450 family; protein id: At1g74110.1
  misc_feature (28)..(431): Homolog of NCBI NO: 15222937 NR Description: cytochrome p450 family; protein id: At1g13710.1
  misc_feature (85)..(431): Homolog of NCBI NO: 1173624 NR Description: cytochrome P-450
  misc_feature (2)..(431): Homolog of NCBI NO: 31126705 NR Description: putative cytochrome P-450 [Oryza sativa (japonica
  misc_feature (1)..(431): Homolog of NCBI NO: 34394563 NR Description: putative cytochrome P-450
MASAQEDSLLLLLLPTTSPLPPLVAVFILAAVLLWLSPGGPAWALSRCRRPPPGPTGVVTALSSPVAHRTLAALSHAVDGGKALMAFSVGLTRLVVSSQPDTAREILASPGVRRPPRQGRGAPPALPPRHGLRALGRRALARAPAASPPTTCSARAAVAGAAHHRASIGEAMVADVAAAMARHGEVPLKRVLHVASLNHIMATVFGKRYDMGSREGALLDEMVAEGYDLLGTFNWADHLPLLKHLDPQGVRRRCNRLVQKVESFVGKIIMEHRTRRANGGFVSDECIGDFVDVLLGLEGEEKLSDADMIAVLWEMIFRGADTVAILMEWVMARMALHPDIQAKAQAELDGVVGIGRGVADADVASLPYIQCIVKETLRMHPPGPLLSWARLAVHDAHVGGHLVPAGTTAMVNMWSIAHDPAIWAEPEKFRPGAVPGGGRERPRERPPPGPLRRRAPRLPRQDTGPRHHPPLCRPASAQVRVGRRRGRRPVGAPEHVAGDGHAAGVQGRTQGSGPSGLLA

SEQ ID NO: 16997 - DNA, 1721 bp, Zea mays subsp. mays
  misc_feature (1)..(1721): Ceres Seq. ID no. 12383403
  misc_feature: MA Experiment ID: 108543 Result: Down-regulated in Transcription
  misc_feature: MA Experiment ID: 108689 Result: Up-regulated in Transcription
  misc_feature: MA Experiment 108689 PARAMETER Experiment Name: Zm_Drought_Roots_P Parameter: Age (day) Value: 9
  misc_feature: MA Experiment 108689 PARAMETER Experiment Name: Zm_Drought_Roots_P Parameter: Organism Value: Zea mays
  misc_feature: MA Experiment 108689 PARAMETER Experiment Name: Zm_Drought_Roots_P Parameter: Plant Line Value: 35A19
  misc_feature: MA Experiment 108689 PARAMETER Experiment Name: Zm_Drought_Roots_P Parameter: Timepoint (hr) Value: 24
  misc_feature: MA Experiment 108689 PARAMETER Experiment Name: Zm_Drought_Roots_P Parameter: Tissue Value: Roots
  misc_feature: MA Experiment 108689 PARAMETER Experiment Name: Zm_Drought_Roots_P Parameter: Treatment Value: Drought vs. No Drought
  misc_feature: MA Experiment ID: 20000492 Result: Down-regulated in Transcription
  misc_feature: MA Experiment 20000492 PARAMETER Experiment Name: Zm_Hybrid_Seed_Dev_P Parameter: DAP Value: 12
  misc_feature: MA Experiment 20000492 PARAMETER Experiment Name: Zm_Hybrid_Seed_Dev_P Parameter: Organism Value: Zea mays
  misc_feature: MA Experiment 20000492 PARAMETER Experiment Name: Zm_Hybrid_Seed_Dev_P Parameter: Plant Line Value: 35A19
  misc_feature: MA Experiment 20000492 PARAMETER Experiment Name: Zm_Hybrid_Seed_Dev_P Parameter: Tissue Value: Fert Kernel vs. Unfert Floret
  misc_feature: MA Experiment ID: 20000535 Result: Down-regulated in Transcription
  misc_feature: MA Experiment 20000535 PARAMETER Experiment Name: Zm_Hybrid_Seed_Dev_P Parameter: DAP Value: 30 vs. 12
  misc_feature: MA Experiment 20000535 PARAMETER Experiment Name: Zm_Hybrid_Seed_Dev_P Parameter: Organism Value: Zea mays
  misc_feature: MA Experiment 20000535 PARAMETER Experiment Name: Zm_Hybrid_Seed_Dev_P Parameter: Plant Line Value: 35A19
  misc_feature: MA Experiment 20000535 PARAMETER Experiment Name: Zm_Hybrid_Seed_Dev_P Parameter: Tissue Value: Embryo vs. Unfert Floret
cgccaagcccgcaattaaccctcactaaagggaacaaaagctggagctccaccgcggtggcggccgctctagaactagtggatcccccgggctgcaggaattcgcacgagaccattacctagaacatcctaatcgaaaaattattaccatgggagaagagaagcaacgtcgggatggccatggcggaaagaacaagtacgccgtggcgtgctccattattggctccatcatctccattctcatgggctatgacacgggcgtcatgaccggcgcgatgctgttcatcaaggaggacctcaagaccaacgacacgcaggtccaggtcctcgccggcatcctcaacgtctgcgcccttgtcggctccctcacggccggccgcgtctccgactgggtcggcccccgccgcaccatctccctcgcggcctgcatcttcctcgcggggtcagtcctcatgggcctctcgcccaacttcggtacgctcctggcaggacgctgcgtggccggcgtcggcgtcggatacgcgctcatgatcgcgcccgtctacgcggccgagatttcgtccgcccacatccgcggctccgtcacctcgctgcccgagatctgcatcagcttcggcatcctgattgggtacgtggccaactacctgctagctaagctcccgctggtctacggctggcgcgccatgctggggctcggcgcgctgccgagcgccgtgctcgcagtcgccgtgctcgcgatgccggagtcgccccggtggctcgtcatgcagggccgcgtcgagcaggcccacgccgtgctcaggcgcgtgtccgacactgcaggcgaggccgatgtgcgcctcgcggaaatcaagaccgcggcggggctggcagacgacgatgacggctcaccgagaggtgtcggcaagggcgtgtggaaggagatgttcctgcacccgacgccccccgtccggcgtatcctcgtcgctgccttcggagtccacttcttccagcatctcacgggaatcgaagccgtggtcctctacagcccacgcatctttaaggcagccggcatcgccacccgcagcgagatccttgcagcgaccatcggcgtgggcgtcaccaagacggtgttcatcatgacagccatcctgctggtggaccgcatcggccggaggccgctctacctctcgagcctggcgggcatcatcgcctcgcttgcctgcctcggtcttggcctcaccgtcgtggagcgctcggtgccgcgccactcgccgacgtgggctatggcattgtccatcgcaacggtcttcaccttcatagcgtccttctccatcggtgtggggcccatcacgtgggcgtacagcaccgaggtgtacccgctccggctgcgcgcgcagggcgccagcgtcggcgtggccatcaaccgtgtcatgaacgccggggtctctatgacgttcgtgtcgctgtacaatgcggtgaccatcggcggtgcctttttcctgttcgcagggctggccgtgttggcggccatgttcttctacttcctctgcccggagacgcaaggacggccactggaggagatcgaagaggtgttcggccgtgggtggcgcgcgcgcctcctgtcatgggacgaagctgttgtggagcttccaatgtccaacaccaccgacggcaacaccaaggcgcgcccgtgatgcaaatgcgattgcaaaaattatggatagacattcatatatggtc

SEQ ID NO: 16998 - protein, 508 aa, Zea mays subsp. mays
  peptide (1)..(508): Ceres Seq. ID no. 12383404
  misc_feature (21)..(476): Pfam Name: Sugar (and other) transporter Pfam Description: Sugar (and other) transporter
  misc_feature (35)..(479): Homolog of NCBI NO: 15225426 NR Description: putative sugar transporter; protein id:
  misc_feature (14)..(484): Homolog of NCBI NO: 12004316 NR Description: mannitol transporter [Apium graveolens var. dulce]
  misc_feature (12)..(477): Homolog of NCBI NO: 15226682 NR Description: putative sugar transporter; protein id:
  misc_feature (12)..(477): Homolog of NCBI NO: 15226696 NR Description: putative sugar transporter; protein id:
  misc_feature (13)..(477): Homolog of NCBI NO: 16118827 NR Description: putative sugar transporter [Oryza sativa]
  misc_feature (14)..(481): Homolog of NCBI NO: 15230212 NR Description: sugar transport, putative; protein id:
  misc_feature (14)..(483): Homolog of NCBI NO: 28316433 NR Description: sorbitol transporter [Prunus cerasus]
  misc_feature (15)..(479): Homolog of NCBI NO: 15224183 NR Description: putative sugar transporter; protein id:
  misc_feature (13)..(478): Homolog of NCBI NO: 15234491 NR Description: sugar transporter like protein; protein id:
  misc_feature (1)..(502): Homolog of NCBI NO: 13129489 NR Description: Putative sugar transporter [Oryza sativa]
MGEEKQRRDGHGGKNKYAVACSIIGSIISILMGYDTGVMTGAMLFIKEDLKTNDTQVQVLAGILNVCALVGSLTAGRVSDWVGPRRTISLAACIFLAGSVLMGLSPNFGTLLAGRCVAGVGVGYALMIAPVYAAEISSAHIRGSVTSLPEICISFGILIGYVANYLLAKLPLVYGWRAMLGLGALPSAVLAVAVLAMPESPRWLVMQGRVEQAHAVLRRVSDTAGEADVRLAEIKTAAGLADDDDGSPRGVGKGVWKEMFLHPTPPVRRILVAAFGVHFFQHLTGIEAVVLYSPRIFKAAGIATRSEILAATIGVGVTKTVFIMTAILLVDRIGRRPLYLSSLAGIIASLACLGLGLTVVERSVPRHSPTWAMALSIATVFTFIASFSIGVGPITWAYSTEVYPLRLRAQGASVGVAINRVMNAGVSMTFVSLYNAVTIGGAFFLFAGLAVLAAMFFYFLCPETQGRPLEEIEEVFGRGWRARLLSWDEAVVELPMSNTTDGNTKARP

SEQ ID NO: 16999 - protein, 477 aa, Zea mays subsp. mays
  peptide (1)..(477): Ceres Seq. ID no. 12383405
  misc_feature (1)..(445): Pfam Name: Sugar (and other) transporter Pfam Description: Sugar (and other) transporter
  misc_feature (4)..(448): Homolog of NCBI NO: 15225426 NR Description: putative sugar transporter; protein id:
  misc_feature (1)..(453): Homolog of NCBI NO: 12004316 NR Description: mannitol transporter [Apium graveolens var. dulce]
  misc_feature (1)..(446): Homolog of NCBI NO: 15226682 NR Description: putative sugar transporter; protein id:
  misc_feature (1)..(446): Homolog of NCBI NO: 15226696 NR Description: putative sugar transporter; protein id:
  misc_feature (1)..(446): Homolog of NCBI NO: 16118827 NR Description: putative sugar transporter [Oryza sativa]
  misc_feature (1)..(450): Homolog of NCBI NO: 15230212 NR Description: sugar transport, putative; protein id:
  misc_feature (1)..(452): Homolog of NCBI NO: 28316433 NR Description: sorbitol transporter [Prunus cerasus]
  misc_feature (1)..(448): Homolog of NCBI NO: 15224183 NR Description: putative sugar transporter; protein id:
  misc_feature (1)..(447): Homolog of NCBI NO: 15234491 NR Description: sugar transporter like protein; protein id:
  misc_feature (1)..(471): Homolog of NCBI NO: 13129489 NR Description: Putative sugar transporter [Oryza sativa]
MGYDTGVMTGAMLFIKEDLKTNDTQVQVLAGILNVCALVGSLTAGRVSDWVGPRRTISLAACIFLAGSVLMGLSPNFGTLLAGRCVAGVGVGYALMIAPVYAAEISSAHIRGSVTSLPEICISFGILIGYVANYLLAKLPLVYGWRAMLGLGALPSAVLAVAVLAMPESPRWLVMQGRVEQAHAVLRRVSDTAGEADVRLAEIKTAAGLADDDDGSPRGVGKGVWKEMFLHPTPPVRRILVAAFGVHFFQHLTGIEAVVLYSPRIFKAAGIATRSEILAATIGVGVTKTVFIMTAILLVDRIGRRPLYLSSLAGIIASLACLGLGLTVVERSVPRHSPTWAMALSIATVFTFIASFSIGVGPITWAYSTEVYPLRLRAQGASVGVAINRVMNAGVSMTFVSLYNAVTIGGAFFLFAGLAVLAAMFFYFLCPETQGRPLEEIEEVFGRGWRARLLSWDEAVVELPMSNTTDGNTKARP

SEQ ID NO: 17000 - protein, 470 aa, Zea mays subsp. mays
  peptide (1)..(470): Ceres Seq. ID no. 12383406
  misc_feature (1)..(438): Pfam Name: Sugar (and other) transporter Pfam Description: Sugar (and other) transporter
  misc_feature (1)..(441): Homolog of NCBI NO: 15225426 NR Description: putative sugar transporter; protein id:
  misc_feature (1)..(446): Homolog of NCBI NO: 12004316 NR Description: mannitol transporter [Apium graveolens var. dulce]
  misc_feature (1)..(439): Homolog of NCBI NO: 15226682 NR Description: putative sugar transporter; protein id:
  misc_feature (1)..(439): Homolog of NCBI NO: 15226696 NR Description: putative sugar transporter; protein id:
  misc_feature (1)..(439): Homolog of NCBI NO: 16118827 NR Description: putative sugar transporter [Oryza sativa]
  misc_feature (1)..(443): Homolog of NCBI NO: 15230212 NR Description: sugar transport, putative; protein id:
  misc_feature (1)..(445): Homolog of NCBI NO: 28316433 NR Description: sorbitol transporter [Prunus cerasus]
  misc_feature (1)..(441): Homolog of NCBI NO: 15224183 NR Description: putative sugar transporter; protein id:
  misc_feature (1)..(440): Homolog of NCBI NO: 15234491 NR Description: sugar transporter like protein; protein id:
  misc_feature (1)..(464): Homolog of NCBI NO: 13129489 NR Description: Putative sugar transporter [Oryza sativa]
MTGAMLFIKEDLKTNDTQVQVLAGILNVCALVGSLTAGRVSDWVGPRRTISLAACIFLAGSVLMGLSPNFGTLLAGRCVAGVGVGYALMIAPVYAAEISSAHIRGSVTSLPEICISFGILIGYVANYLLAKLPLVYGWRAMLGLGALPSAVLAVAVLAMPESPRWLVMQGRVEQAHAVLRRVSDTAGEADVRLAEIKTAAGLADDDDGSPRGVGKGVWKEMFLHPTPPVRRILVAAFGVHFFQHLTGIEAVVLYSPRIFKAAGIATRSEILAATIGVGVTKTVFIMTAILLVDRIGRRPLYLSSLAGIIASLACLGLGLTVVERSVPRHSPTWAMALSIATVFTFIASFSIGVGPITWAYSTEVYPLRLRAQGASVGVAINRVMNAGVSMTFVSLYNAVTIGGAFFLFAGLAVLAAMFFYFLCPETQGRPLEEIEEVFGRGWRARLLSWDEAVVELPMSNTTDGNTKARP

SEQ ID NO: 17001 - DNA, 1264 bp, Zea mays subsp. mays
  misc_feature (1)..(1264): Ceres Seq. ID no. 12358919
  misc_feature: MA Experiment ID: 108504 Result: Down-regulated in Transcription
  misc_feature: MA Experiment 108504 PARAMETER Experiment Name: Zm_Drought_P Parameter: Age (day) Value: 8
  misc_feature: MA Experiment 108504 PARAMETER Experiment Name: Zm_Drought_P Parameter: Organism Value: Zea mays
  misc_feature: MA Experiment 108504 PARAMETER Experiment Name: Zm_Drought_P Parameter: Plant Line Value: 35A19
  misc_feature: MA Experiment 108504 PARAMETER Experiment Name: Zm_Drought_P Parameter: Timepoint (hr) Value: 12
  misc_feature: MA Experiment 108504 PARAMETER Experiment Name: Zm_Drought_P Parameter: Tissue Value: Aerial
  misc_feature: MA Experiment 108504 PARAMETER Experiment Name: Zm_Drought_P Parameter: Treatment Value: Drought vs. No Drought
  misc_feature: MA Experiment ID: 108515 Result: Down-regulated in Transcription
  misc_feature: MA Experiment 108515 PARAMETER Experiment Name: Zm_2mM_SA_P Parameter: Age (day) Value: 8
  misc_feature: MA Experiment 108515 PARAMETER Experiment Name: Zm_2mM_SA_P Parameter: Organism Value: Zea mays
  misc_feature: MA Experiment 108515 PARAMETER Experiment Name: Zm_2mM_SA_P Parameter: Plant Line Value: 35A19
  misc_feature: MA Experiment 108515 PARAMETER Experiment Name: Zm_2mM_SA_P Parameter: Timepoint (hr) Value: 12
  misc_feature: MA Experiment 108515 PARAMETER Experiment Name: Zm_2mM_SA_P Parameter: Tissue Value: Aerial
  misc_feature: MA Experiment 108515 PARAMETER Experiment Name: Zm_2mM_SA_P Parameter: Treatment Value: 2mM SA vs. No Treatment
  misc_feature: MA Experiment ID: 108529 Result: Down-regulated in Transcription
  misc_feature: MA Experiment 108529 PARAMETER Experiment Name: Zm_Imbibed_Seeds_P Parameter: Age (day) Value: 5 vs. 2
  misc_feature: MA Experiment 108529 PARAMETER Experiment Name: Zm_Imbibed_Seeds_P Parameter: Organism Value: Zea mays
  misc_feature: MA Experiment 108529 PARAMETER Experiment Name: Zm_Imbibed_Seeds_P Parameter: Plant Line Value: 35A19
  misc_feature: MA Experiment 108529 PARAMETER Experiment Name: Zm_Imbibed_Seeds_P Parameter: Tissue Value: Roots vs. Embryo
  misc_feature: MA Experiment ID: 108530 Result: Up-regulated in Transcription
  misc_feature: MA Experiment 108530 PARAMETER Experiment Name: Zm_Imbibed_Seeds_P Parameter: Age (day) Value: 6 vs. 2
  misc_feature: MA Experiment 108530 PARAMETER Experiment Name: Zm_Imbibed_Seeds_P Parameter: Organism Value: Zea mays
  misc_feature: MA Experiment 108530 PARAMETER Experiment Name: Zm_Imbibed_Seeds_P Parameter: Plant Line Value: 35A19
  misc_feature: MA Experiment 108530 PARAMETER Experiment Name: Zm_Imbibed_Seeds_P Parameter: Tissue Value: Aerial vs. Embryo
  misc_feature: MA Experiment ID: 108542 Result: Down-regulated in Transcription
  misc_feature: MA Experiment 108542 PARAMETER Experiment Name: Zm_150mM_NaCl_P Parameter: Age (day) Value: 8
  misc_feature: MA Experiment 108542 PARAMETER Experiment Name: Zm_150mM_NaCl_P Parameter: Organism Value: Zea mays
  misc_feature: MA Experiment 108542 PARAMETER Experiment Name: Zm_150mM_NaCl_P Parameter: Plant Line Value: 35A19
  misc_feature: MA Experiment 108542 PARAMETER Experiment Name: Zm_150mM_NaCl_P Parameter: Timepoint (hr) Value: 6
  misc_feature: MA Experiment 108542 PARAMETER Experiment Name: Zm_150mM_NaCl_P Parameter: Tissue Value: Aerial
  misc_feature: MA Experiment 108542 PARAMETER Experiment Name: Zm_150mM_NaCl_P Parameter: Treatment Value: 150mM NaCl vs. No Treatment
  misc_feature: MA Experiment ID: 108543 Result: Down-regulated in Transcription
  misc_feature: MA Experiment ID: 108544 Result: Down-regulated in Transcription
  misc_feature: MA Experiment ID: 108545 Result: Up-regulated in Transcription
  misc_feature: MA Experiment 108545 PARAMETER Experiment Name: Zm_Imbibed_Seeds_P Parameter: Age (day) Value: 3 vs. 2
  misc_feature: MA Experiment 108545 PARAMETER Experiment Name: Zm_Imbibed_Seeds_P Parameter: Organism Value: Zea mays
  misc_feature: MA Experiment 108545 PARAMETER Experiment Name: Zm_Imbibed_Seeds_P Parameter: Plant Line Value: 35A19
  misc_feature: MA Experiment 108545 PARAMETER Experiment Name: Zm_Imbibed_Seeds_P Parameter: Tissue Value: Aerial vs. Embryo
  misc_feature: MA Experiment ID: 108546 Result: Down-regulated in Transcription
  misc_feature: MA Experiment 108546 PARAMETER Experiment Name: Zm_Imbibed_Seeds_P Parameter: Age (day) Value: 3 vs. 2
  misc_feature: MA Experiment 108546 PARAMETER Experiment Name: Zm_Imbibed_Seeds_P Parameter: Organism Value: Zea mays
  misc_feature: MA Experiment 108546 PARAMETER Experiment Name: Zm_Imbibed_Seeds_P Parameter: Plant Line Value: 35A19
  misc_feature: MA Experiment 108546 PARAMETER Experiment Name: Zm_Imbibed_Seeds_P Parameter: Tissue Value: Roots vs. Embryo
  misc_feature: MA Experiment ID: 108556 Result: Down-regulated in Transcription
  misc_feature: MA Experiment 108556 PARAMETER Experiment Name: Zm_Drought_P Parameter: Age (day) Value: 9
  misc_feature: MA Experiment 108556 PARAMETER Experiment Name: Zm_Drought_P Parameter: Organism Value: Zea mays
  misc_feature: MA Experiment 108556 PARAMETER Experiment Name: Zm_Drought_P Parameter: Plant Line Value: 35A19
  misc_feature: MA Experiment 108556 PARAMETER Experiment Name: Zm_Drought_P Parameter: Timepoint (hr) Value: 24
  misc_feature: MA Experiment 108556 PARAMETER Experiment Name: Zm_Drought_P Parameter: Tissue Value: Aerial
  misc_feature: MA Experiment 108556 PARAMETER Experiment Name: Zm_Drought_P Parameter: Treatment Value: Drought vs. No Drought
  misc_feature: MA Experiment ID: 108559 Result: Down-regulated in Transcription
  misc_feature: MA Experiment 108559 PARAMETER Experiment Name: Zm_5mM_NO_P Parameter: Age (day) Value: 8
  misc_feature: MA Experiment 108559 PARAMETER Experiment Name: Zm_5mM_NO_P Parameter: Organism Value: Zea mays
  misc_feature: MA Experiment 108559 PARAMETER Experiment Name: Zm_5mM_NO_P Parameter: Plant Line Value: 35A19
  misc_feature: MA Experiment 108559 PARAMETER Experiment Name: Zm_5mM_NO_P Parameter: Timepoint (hr) Value: 12
  misc_feature: MA Experiment 108559 PARAMETER Experiment Name: Zm_5mM_NO_P Parameter: Tissue Value: Aerial
  misc_feature: MA Experiment 108559 PARAMETER Experiment Name: Zm_5mM_NO_P Parameter: Treatment Value: 5mM NO vs. No Treatment
  misc_feature: MA Experiment ID: 108597 Result: Down-regulated in Transcription
  misc_feature: MA Experiment 108597 PARAMETER Experiment Name: Zm_100uM_ABA_P Parameter: Age (day) Value: 9
  misc_feature: MA Experiment 108597 PARAMETER Experiment Name: Zm_100uM_ABA_P Parameter: Organism Value: Zea mays
  misc_feature: MA Experiment 108597 PARAMETER Experiment Name: Zm_100uM_ABA_P Parameter: Plant Line Value: 35A19
  misc_feature: MA Experiment 108597 PARAMETER Experiment Name: Zm_100uM_ABA_P Parameter: Timepoint (hr) Value: 24
  misc_feature: MA Experiment 108597 PARAMETER Experiment Name: Zm_100uM_ABA_P Parameter: Tissue Value: Aerial
  misc_feature: MA Experiment 108597 PARAMETER Experiment Name: Zm_100uM_ABA_P Parameter: Treatment Value: 100uM ABA vs. No Treatment
  misc_feature: MA Experiment ID: 20000478 Result: Down-regulated in Transcription
  misc_feature: MA Experiment 20000478 PARAMETER Experiment Name: Zm_5mM_SA_P Parameter: Age (day) Value: 11
  misc_feature: MA Experiment 20000478 PARAMETER Experiment Name: Zm_5mM_SA_P Parameter: Organism Value: Zea mays
  misc_feature: MA Experiment 20000478 PARAMETER Experiment Name: Zm_5mM_SA_P Parameter: Plant Line Value: 35A19
  misc_feature: MA Experiment 20000478 PARAMETER Experiment Name: Zm_5mM_SA_P Parameter: Timepoint (hr) Value: 72
  misc_feature: MA Experiment 20000478 PARAMETER Experiment Name: Zm_5mM_SA_P Parameter: Tissue Value: Aerial
  misc_feature: MA Experiment 20000478 PARAMETER Experiment Name: Zm_5mM_SA_P Parameter: Treatment Value: 5mM SA vs. No Treatment
  misc_feature: MA Experiment ID: 20000479 Result: Down-regulated in Transcription
  misc_feature: MA Experiment 20000479 PARAMETER Experiment Name: Zm_Drought_P Parameter: Age (day) Value: 10
  misc_feature: MA Experiment 20000479 PARAMETER Experiment Name: Zm_Drought_P Parameter: Organism Value: Zea mays
  misc_feature: MA Experiment 20000479 PARAMETER Experiment Name: Zm_Drought_P Parameter: Plant Line Value: 35A19
  misc_feature: MA Experiment 20000479 PARAMETER Experiment Name: Zm_Drought_P Parameter: Timepoint (hr) Value: 48
  misc_feature: MA Experiment 20000479 PARAMETER Experiment Name: Zm_Drought_P Parameter: Tissue Value: Aerial
  misc_feature: MA Experiment 20000479 PARAMETER Experiment Name: Zm_Drought_P Parameter: Treatment Value: Drought vs. No Drought
  misc_feature: MA Experiment ID: 20000480 Result: Down-regulated in Transcription
  misc_feature: MA Experiment 20000480 PARAMETER Experiment Name: Zm_Drought_P Parameter: Age (day) Value: 11
  misc_feature: MA Experiment 20000480 PARAMETER Experiment Name: Zm_Drought_P Parameter: Organism Value: Zea mays
  misc_feature: MA Experiment 20000480 PARAMETER Experiment Name: Zm_Drought_P Parameter: Plant Line Value: 35A19
  misc_feature: MA Experiment 20000480 PARAMETER Experiment Name: Zm_Drought_P Parameter: Timepoint (hr) Value: 72
  misc_feature: MA Experiment 20000480 PARAMETER Experiment Name: Zm_Drought_P Parameter: Tissue Value: Aerial
  misc_feature: MA Experiment 20000480 PARAMETER Experiment Name: Zm_Drought_P Parameter: Treatment Value: Drought vs. No Drought
  misc_feature: MA Experiment ID: 20000533 Result: Down-regulated in Transcription
  misc_feature: MA Experiment 20000533 PARAMETER Experiment Name: Zm_0.001percent_MeJA_P Parameter: Age (day) Value: 11
  misc_feature: MA Experiment 20000533 PARAMETER Experiment Name: Zm_0.001percent_MeJA_P Parameter: Organism Value: Zea mays
  misc_feature: MA Experiment 20000533 PARAMETER Experiment Name: Zm_0.001percent_MeJA_P Parameter: Plant Line Value: 35A19
  misc_feature: MA Experiment 20000533 PARAMETER Experiment Name: Zm_0.001percent_MeJA_P Parameter: Timepoint (hr) Value: 72
  misc_feature: MA Experiment 20000533 PARAMETER Experiment Name: Zm_0.001percent_MeJA_P Parameter: Tissue Value: Aerial
  misc_feature: MA Experiment 20000533 PARAMETER Experiment Name: Zm_0.001percent_MeJA_P Parameter: Treatment Value: 0.001percent MeJA vs. No Treatment
  misc_feature: MA Experiment ID: 20000626 Result: Down-regulated in Transcription
  misc_feature: MA Experiment 20000626 PARAMETER Experiment Name: Zm_Herbicide-Treatments_P Parameter: Timepoint (hr) Value: 12
  misc_feature: MA Experiment 20000626 PARAMETER Experiment Name: Zm_Herbicide-Treatments_P Parameter: Tissue Value: Aerial
  misc_feature: MA Experiment 20000626 PARAMETER Experiment Name: Zm_Herbicide-Treatments_P Parameter: Treatment Value: Roundup vs. No Treatment
acgtgcaagagacgagcgtagtaactgtgagcagctagcacatgcatggcgtcgtcgcagctggtcgtcgtgtgcctgtttgtagcgtcggcggtgactgtgacgatgaacggtggcgcgcaggcgcagccgattgtgccggcgatcatctcattcggcgactccaccgtcgacgtcggcaacaataactacctgccgggcgcggtgttcaaggccgactacgcgccgtacgggcagggcttcgcgcggcacaaggccaccggccgattctccgacggcaagatcgtcaccgacatcaccgccgaaacgctcggcttcgagagctacgcgccgccgtacctcagcccgcaggcgtcggggaagaacctgttcaccggcgccaacttcgcctccgcggcgtccagctactacgacgacacggcggccatgtatgacgcgatcacgctgacccagcagctcaagtactacaaggagtaccagtcgaagctggcggcggtggccgggcgcgctagggctcgcgccatccttggcgacgcgctctacgttgtcagcacgggcaccggcgacttcctccagaactactaccacaacgcctccctgtcccgccgctacgacgtcgaccagtacaccgacctcctcgtcggcatcttctccggcttcgccaacgagctgtacaggttgggggcgcggcggatcggcgtcacttccatgccgccgctgggctgcctgccggcgtccatcaggctgtacggcgacggcaagggagcgtgcgtgccgaggctcaaccgcgacgccgagaccttcaacgccaagctgaacccaccgtcagggcgctcaagcggcggcacgccgacctcaagctcgccatcctcgacatctacacgcccctccgcaaactcgcacaagaccccgcggcttacggcttcgccgacgctagagggacgtgctgccggacggggacggccaagacgagggtgtacctctgcaacccgacgacggccgggacgtgccggaacgccagcagctacgtgttcttcgacgccgtccacccgtctgaggctgccaacgtcttcatcgcggagtccacggtcgacgcgggcatcgagctggtcacctagctagtaggaataaaggagacgacacacatctgcagatctgctcacatgtttccggctccatcgaaacagaactacgtacagtgtctggaatattaatatatagccagtgaaattaaaaattgcaccgtcggccctgcccttttcgc

SEQ ID NO: 17002 - protein, 358 aa, Zea mays subsp. mays
  peptide (1)..(358): Ceres Seq. ID no. 12358920
  misc_feature (34)..(263): Pfam Name: GDSL-like Lipase/Acylhydrolase Pfam Description: GDSL-like Lipase/Acylhydrolase
  misc_feature (30)..(257): Homolog of NCBI NO: 30693763 NR Description: GDSL-motif lipase/hydrolase protein [Arabidopsis
  misc_feature (38)..(269): Homolog of NCBI NO: 15237528 NR Description: putative protein; protein id: At5g03810.1
  misc_feature (9)..(269): Homolog of NCBI NO: 9758010 NR Description: proline-rich protein APG-like [Arabidopsis
  misc_feature (1)..(261): Homolog of NCBI NO: 13174242 NR Description: putative proline-rich protein [Oryza sativa]
  misc_feature (1)..(257): Homolog of NCBI NO: 25336283 NR Description: hypothetical protein RXF26 [imported] -
  misc_feature (26)..(261): Homolog of NCBI NO: 15237137 NR Description: GDSL-motif lipase/hydrolase-like protein; protein
  misc_feature (9)..(258): Homolog of NCBI NO: 10638955 NR Description: putative proline-rich protein APG isolog [Cicer
  misc_feature (5)..(269): Homolog of NCBI NO: 15237531 NR Description: putative protein; protein id: At5g03820.1
  misc_feature (35)..(263): Homolog of NCBI NO: 2062167 NR Description: Proline-rich protein APG isolog [Arabidopsis
  misc_feature (11)..(263): Homolog of NCBI NO: 15228189 NR Description: putative APG protein
MASSQLVVVCLFVASAVTVTMNGGAQAQPIVPAIISFGDSTVDVGNNNYLPGAVFKADYAPYGQGFARHKATGRFSDGKIVTDITAETLGFESYAPPYLSPQASGKNLFTGANFASAASSYYDDTAAMYDAITLTQQLKYYKEYQSKLAAVAGRARARAILGDALYVVSTGTGDFLQNYYHNASLSRRYDVDQYTDLLVGIFSGFANELYRLGARRIGVTSMPPLGCLPASIRLYGDGKGACVPRLNRDAETFNAKLNPPSGRSSGGTPTSSSPSSTSTRPSANSHKTPRLTASPTLEGRAAGRGRPRRGCTSATRRRPGRAGTPAATCSSTPSTRLRLPTSSSRSPRSTRASSWSPS

SEQ ID NO: 17003 - protein, 338 aa, Zea mays subsp. mays
  peptide (1)..(338): Ceres Seq. ID no. 12358921
  misc_feature (14)..(243): Pfam Name: GDSL-like Lipase/Acylhydrolase Pfam Description: GDSL-like Lipase/Acylhydrolase
  misc_feature (1)..(237): Homolog of NCBI NO: 25336283 NR Description: hypothetical protein RXF26 [imported] -
  misc_feature (6)..(241): Homolog of NCBI NO: 15237137 NR Description: GDSL-motif lipase/hydrolase-like protein; protein
  misc_feature (10)..(237): Homolog of NCBI NO: 30693763 NR Description: GDSL-motif lipase/hydrolase protein [Arabidopsis
  misc_feature (18)..(249): Homolog of NCBI NO: 15237528 NR Description: putative protein; protein id: At5g03810.1
  misc_feature (1)..(249): Homolog of NCBI NO: 9758010 NR Description: proline-rich protein APG-like [Arabidopsis
  misc_feature (1)..(241): Homolog of NCBI NO: 13174242 NR Description: putative proline-rich protein [Oryza sativa]
  misc_feature (1)..(238): Homolog of NCBI NO: 10638955 NR Description: putative proline-rich protein APG isolog [Cicer
  misc_feature (1)..(249): Homolog of NCBI NO: 15237531 NR Description: putative protein; protein id: At5g03820.1
  misc_feature (15)..(243): Homolog of NCBI NO: 2062167 NR Description: Proline-rich protein APG isolog [Arabidopsis
  misc_feature (1)..(243): Homolog of NCBI NO: 15228189 NR Description: putative APG protein
MNGGAQAQPIVPAIISFGDSTVDVGNNNYLPGAVFKADYAPYGQGFARHKATGRFSDGKIVTDITAETLGFESYAPPYLSPQASGKNLFTGANFASAASSYYDDTAAMYDAITLTQQLKYYKEYQSKLAAVAGRARARAILGDALYVVSTGTGDFLQNYYHNASLSRRYDVDQYTDLLVGIFSGFANELYRLGARRIGVTSMPPLGCLPASIRLYGDGKGACVPRLNRDAETFNAKLNPPSGRSSGGTPTSSSPSSTSTRPSANSHKTPRLTASPTLEGRAAGRGRPRRGCTSATRRRPGRAGTPAATCSSTPSTRLRLPTSSSRSPRSTRASSWSPS

SEQ ID NO: 17004 - protein, 231 aa, Zea mays subsp. mays
  peptide (1)..(231): Ceres Seq. ID no. 12358922
  misc_feature (1)..(136): Pfam Name: GDSL-like Lipase/Acylhydrolase Pfam Description: GDSL-like Lipase/Acylhydrolase
  misc_feature (1)..(130): Homolog of NCBI NO: 25336283 NR Description: hypothetical protein RXF26 [imported] -
  misc_feature (1)..(134): Homolog of NCBI NO: 15237137 NR Description: GDSL-motif lipase/hydrolase-like protein; protein
  misc_feature (1)..(130): Homolog of NCBI NO: 30693763 NR Description: GDSL-motif lipase/hydrolase protein [Arabidopsis
  misc_feature (1)..(142): Homolog of NCBI NO: 15237528 NR Description: putative protein; protein id: At5g03810.1
  misc_feature (1)..(142): Homolog of NCBI NO: 9758010 NR Description: proline-rich protein APG-like [Arabidopsis
  misc_feature (1)..(134): Homolog of NCBI NO: 13174242 NR Description: putative proline-rich protein [Oryza sativa]
  misc_feature (1)..(131): Homolog of NCBI NO: 10638955 NR Description: putative proline-rich protein APG isolog [Cicer
  misc_feature (1)..(142): Homolog of NCBI NO: 15237531 NR Description: putative protein; protein id: At5g03820.1
  misc_feature (1)..(136): Homolog of NCBI NO: 2062167 NR Description: Proline-rich protein APG isolog [Arabidopsis
  misc_feature (1)..(136): Homolog of NCBI NO: 15228189 NR Description: putative APG protein
MYDAITLTQQLKYYKEYQSKLAAVAGRARARAILGDALYVVSTGTGDFLQNYYHNASLSRRYDVDQYTDLLVGIFSGFANELYRLGARRIGVTSMPPLGCLPASIRLYGDGKGACVPRLNRDAETFNAKLNPPSGRSSGGTPTSSSPSSTSTRPSANSHKTPRLTASPTLEGRAAGRGRPRRGCTSATRRRPGRAGTPAATCSSTPSTRLRLPTSSSRSPRSTRASSWSPS

SEQ ID NO: 17005 - DNA, 496 bp, Zea mays subsp. mays
  misc_feature (1)..(496): Ceres Seq. ID no. 1668035
  misc_feature: MA Experiment ID: 20000479 Result: Down-regulated in Transcription
  misc_feature: MA Experiment 20000479 PARAMETER Experiment Name: Zm_Drought_P Parameter: Age (day) Value: 10
  misc_feature: MA Experiment 20000479 PARAMETER Experiment Name: Zm_Drought_P Parameter: Organism Value: Zea mays
  misc_feature: MA Experiment 20000479 PARAMETER Experiment Name: Zm_Drought_P Parameter: Plant Line Value: 35A19
  misc_feature: MA Experiment 20000479 PARAMETER Experiment Name: Zm_Drought_P Parameter: Timepoint (hr) Value: 48
  misc_feature: MA Experiment 20000479 PARAMETER Experiment Name: Zm_Drought_P Parameter: Tissue Value: Aerial
  misc_feature: MA Experiment 20000479 PARAMETER Experiment Name: Zm_Drought_P Parameter: Treatment Value: Drought vs. No Drought
  misc_feature: Pfam Name: adh_short Pfam Description: short chain dehydrogenase
aagagaccggccggacgatggcagcagagcgcgaccgcgagcgatggatcctgcccgacgcgacggcgctggtcaccggcgggagcaaggggatcgggcacgcgatcgtggaggagctggcggcgctgggcgcgcgcgtgcacacgtgctcccgcaacgccgcggagctggaggagtgccgccggaggtgggcagagaagggcggcggccgcctgctgcagcaggtgaccgtctccgtctgcgacgtcgccgtgcgcgccgacagggaggcgctcatggccaccgtcagggacgtcttcggcgtcaagctggacatcctcgtgaataacgcggcgcaggtggtcttcaagccggcggtggagtgcaccggggaggagtacgcgcggatcatggcgaccaacctggagtcctgcttccacctcagccagctcgcgcacccgctgctccgcaacgcctccctcgccggcggcgggagcgttgtgcacatctcctccac

SEQ ID NO: 17006 - protein, 108 aa, Zea mays subsp. mays
  peptide (1)..(108): Ceres Seq. ID no. 1668036
  misc_feature: Pfam Name: adh_short Pfam Description: short chain dehydrogenase
RDRPDDGSRARPRAMDPARRDGAGHRREQGDRARDRGGAGGAGRARAHVLPQRRGAGGVPPEVGREGRRPPAAAGDRLRLRRRRARRQGGAHGHRQGRLRRQAGHPRE

SEQ ID NO: 17007 - protein, 164 aa, Zea mays subsp. mays
  peptide (1)..(164): Ceres Seq. ID no. 1668037
  misc_feature: Pfam Name: adh_short Pfam Description: short chain dehydrogenase
  misc_feature (11)..(163): Homolog of NCBI NO: 15227075 NR Description: putative tropinone reductase
  misc_feature (10)..(163): Homolog of NCBI NO: 25283134 NR Description: probable tropinone reductase [imported] -
  misc_feature (2)..(163): Homolog of NCBI NO: 25406975 NR Description: protein F22G5.20 [imported] - Arabidopsis
  misc_feature (7)..(163): Homolog of NCBI NO: 38344716 NR Description: OSJNBb0115I09.20 [Oryza sativa (japonica
  misc_feature (1)..(163): Homolog of NCBI NO: 21554716 NR Description: putative tropinone reductase [Arabidopsis
  misc_feature (1)..(163): Homolog of NCBI NO: 15227076 NR Description: putative tropinone reductase
  misc_feature (10)..(163): Homolog of NCBI NO: 15227043 NR Description: putative tropinone reductase; protein id:
  misc_feature (10)..(163): Homolog of NCBI NO: 15227040 NR Description: putative tropinone reductase; protein id:
  misc_feature (5)..(163): Homolog of NCBI NO: 34907122 NR Description: putative short chain alcohol dehydrogenase
  misc_feature (6)..(163): Homolog of NCBI NO: 34907124 NR Description: putative short chain alcohol dehydrogenase
ETGRTMAAERDRERWILPDATALVTGGSKGIGHAIVEELAALGARVHTCSRNAAELEECRRRWAEKGGGRLLQQVTVSVCDVAVRADREALMATVRDVFGVKLDILVNNAAQVVFKPAVECTGEEYARIMATNLESCFHLSQLAHPLLRNASLAGGGSVVHISS

SEQ ID NO: 17008 - protein, 159 aa, Zea mays subsp. mays
  peptide (1)..(159): Ceres Seq. ID no. 1668038
  misc_feature: Pfam Name: adh_short Pfam Description: short chain dehydrogenase
  misc_feature (6)..(158): Homolog of NCBI NO: 15227075 NR Description: putative tropinone reductase
  misc_feature (5)..(158): Homolog of NCBI NO: 25283134 NR Description: probable tropinone reductase [imported] -
  misc_feature (1)..(158): Homolog of NCBI NO: 25406975 NR Description: protein F22G5.20 [imported] - Arabidopsis
  misc_feature (2)..(158): Homolog of NCBI NO: 38344716 NR Description: OSJNBb0115I09.20 [Oryza sativa (japonica
  misc_feature (1)..(158): Homolog of NCBI NO: 21554716 NR Description: putative tropinone reductase [Arabidopsis
  misc_feature (1)..(158): Homolog of NCBI NO: 15227076 NR Description: putative tropinone reductase
  misc_feature (5)..(158): Homolog of NCBI NO: 15227043 NR Description: putative tropinone reductase; protein id:
  misc_feature (5)..(158): Homolog of NCBI NO: 15227040 NR Description: putative tropinone reductase; protein id:
  misc_feature (1)..(158): Homolog of NCBI NO: 34907122 NR Description: putative short chain alcohol dehydrogenase
  misc_feature (1)..(158): Homolog of NCBI NO: 34907124 NR Description: putative short chain alcohol dehydrogenase
MAAERDRERWILPDATALVTGGSKGIGHAIVEELAALGARVHTCSRNAAELEECRRRWAEKGGGRLLQQVTVSVCDVAVRADREALMATVRDVFGVKLDILVNNAAQVVFKPAVECTGEEYARIMATNLESCFHLSQLAHPLLRNASLAGGGSVVHISS

SEQ ID NO: 17009 - DNA, 501 bp, Zea mays subsp. mays
  misc_feature (1)..(501): Ceres Seq. ID no. 12637773
  misc_feature: MA Experiment ID: 108522 Result: Up-regulated in Transcription
  misc_feature: MA Experiment 108522 PARAMETER Experiment Name: Zm_42deg_Heat_P Parameter: Age (day) Value: 8
  misc_feature: MA Experiment 108522 PARAMETER Experiment Name: Zm_42deg_Heat_P Parameter: Organism Value: Zea mays
  misc_feature: MA Experiment 108522 PARAMETER Experiment Name: Zm_42deg_Heat_P Parameter: Plant Line Value: 35A19
  misc_feature: MA Experiment 108522 PARAMETER Experiment Name: Zm_42deg_Heat_P Parameter: Temperature (deg C) Value: 42 vs. 22
  misc_feature: MA Experiment 108522 PARAMETER Experiment Name: Zm_42deg_Heat_P Parameter: Timepoint (hr) Value: 1
  misc_feature: MA Experiment 108522 PARAMETER Experiment Name: Zm_42deg_Heat_P Parameter: Tissue Value: Aerial
  misc_feature: MA Experiment ID: 108523 Result: Up-regulated in Transcription
  misc_feature: MA Experiment 108523 PARAMETER Experiment Name: Zm_42deg_Heat_P Parameter: Age (day) Value: 8
  misc_feature: MA Experiment 108523 PARAMETER Experiment Name: Zm_42deg_Heat_P Parameter: Organism Value: Zea mays
  misc_feature: MA Experiment 108523 PARAMETER Experiment Name: Zm_42deg_Heat_P Parameter: Plant Line Value: 35A19
  misc_feature: MA Experiment 108523 PARAMETER Experiment Name: Zm_42deg_Heat_P Parameter: Temperature (deg C) Value: 42 vs. 22
  misc_feature: MA Experiment 108523 PARAMETER Experiment Name: Zm_42deg_Heat_P Parameter: Timepoint (hr) Value: 6
  misc_feature: MA Experiment 108523 PARAMETER Experiment Name: Zm_42deg_Heat_P Parameter: Tissue Value: Aerial
  misc_feature: MA Experiment ID: 108547 Result: Up-regulated in Transcription
  misc_feature: MA Experiment 108547 PARAMETER Experiment Name: Zm_Imbibed_Seeds_P Parameter: Age (day) Value: 4 vs. 2
  misc_feature: MA Experiment 108547 PARAMETER Experiment Name: Zm_Imbibed_Seeds_P Parameter: Organism Value: Zea mays
  misc_feature: MA Experiment 108547 PARAMETER Experiment Name: Zm_Imbibed_Seeds_P Parameter: Plant Line Value: 35A19
  misc_feature: MA Experiment 108547 PARAMETER Experiment Name: Zm_Imbibed_Seeds_P Parameter: Tissue Value: Aerial vs. Embryo
  misc_feature: MA Experiment ID: 108597 Result: Up-regulated in Transcription
  misc_feature: MA Experiment 108597 PARAMETER Experiment Name: Zm_100uM_ABA_P Parameter: Age (day) Value: 9
  misc_feature: MA Experiment 108597 PARAMETER Experiment Name: Zm_100uM_ABA_P Parameter: Organism Value: Zea mays
  misc_feature: MA Experiment 108597 PARAMETER Experiment Name: Zm_100uM_ABA_P Parameter: Plant Line Value: 35A19
  misc_feature: MA Experiment 108597 PARAMETER Experiment Name: Zm_100uM_ABA_P Parameter: Timepoint (hr) Value: 24
  misc_feature: MA Experiment 108597 PARAMETER Experiment Name: Zm_100uM_ABA_P Parameter: Tissue Value: Aerial
  misc_feature: MA Experiment 108597 PARAMETER Experiment Name: Zm_100uM_ABA_P Parameter: Treatment Value: 100uM ABA vs. No Treatment
  misc_feature: MA Experiment ID: 20000487 Result: Up-regulated in Transcription
  misc_feature: MA Experiment 20000487 PARAMETER Experiment Name: Zm_50mM_NH4NO3_L_to_H_P Parameter: Organism Value: Zea mays
  misc_feature: MA Experiment 20000487 PARAMETER Experiment Name: Zm_50mM_NH4NO3_L_to_H_P Parameter: Timepoint (hr) Value: 4
  misc_feature: MA Experiment 20000487 PARAMETER Experiment Name: Zm_50mM_NH4NO3_L_to_H_P Parameter: Tissue Value: Leaves
  misc_feature: MA Experiment 20000487 PARAMETER Experiment Name: Zm_50mM_NH4NO3_L_to_H_P Parameter: Treatment Value: 50mM NH4NO3 vs. 100mM Mannitol
accctctagaagcctccgggtcgctcggtgtgggttgctaactactcgcagcagccagaggccagatccagccgccaaccccccaaacaaaaccctaggccaccattctgaccaccaggcacaagcagagcagaagcagacatggccaccattccgaccaccgattctggcctcgtcctcagttcctccgctctcctccggaggactaggagggccgcctcatccgtcaccgccaggctgccagccgtcgcccgccgtcgcccgcagctcctcgtgcgtgcctccgccaaggagatcgcctttgaccagggctccagagccgcccttcaggccggcgtcgagaagctcgccgccgcggtcggcgtcaccctcggacccagaggaaggaatgttgtcttggatgagtttggaacccccaaagtggtcaatgatggagttaccattgcccgcgctattgagcttgctgatcccatggagaatgctggtgcttcttgattcgtg

SEQ ID NO: 17010 - protein, 166 aa, Zea mays subsp. mays
  peptide (1)..(166): Ceres Seq. ID no. 13624342
  misc_feature (49)..(126): Pfam Name: Extensin-like region Pfam Description: Extensin-like region
PSRSLRVARCGLLTTRSSQRPDPAANPPNKTLGHHSDHQAQAEQKQTWPPFRPPILASSSVPPLSSGGLGGPPHPSPPGCQPSPAVARSSSCVPPPRRSPLTRAPEPPFRPASRSSPPRSASPSDPEEGMLSWMSLEPPKWSMMELPLPALLSLLIPWRMLVLLDS

SEQ ID NO: 17011 - protein, 117 aa, Zea mays subsp. mays
  peptide (1)..(117): Ceres Seq. ID no. 13624343
  misc_feature (45)..(117): Homolog of NCBI NO: 21554572 NR Description: putative rubisco subunit binding-protein alpha
  misc_feature (45)..(117): Homolog of NCBI NO: 15226314 NR Description: putative rubisco subunit binding-protein alpha
  misc_feature (40)..(117): Homolog of NCBI NO: 10697184 NR Description: chaperonin-60 alpha subunit [Avicennia marina]
  misc_feature (45)..(117): Homolog of NCBI NO: 1351030 NR Description: RuBisCO subunit binding-protein alpha subunit,
  misc_feature (45)..(117): Homolog of NCBI NO: 99801 NR Description: chaperonine 60K alpha chain - rape (fragment)
  misc_feature (1)..(117): Homolog of NCBI NO: 464727 NR Description: RuBisCO subunit binding-protein alpha subunit,
  misc_feature (47)..(117): Homolog of NCBI NO: 134102 NR Description: RuBisCO subunit binding-protein alpha subunit,
  misc_feature (13)..(117): Homolog of NCBI NO: 3790441 NR Description: chaperonin 60 alpha subunit [Canavalia lineata]
  misc_feature (13)..(117): Homolog of NCBI NO: 1710807 NR Description: RuBisCO subunit binding-protein alpha subunit,
  misc_feature (1)..(117): Homolog of NCBI NO: 29367489 NR Description: putative chaperonin 60 alpha subunit
MATIPTTDSGLVLSSSALLRRTRRAASSVTARLPAVARRRPQLLVRASAKEIAFDQGSRAALQAGVEKLAAAVGVTLGPRGRNVVLDEFGTPKVVNDGVTIARAIELADPMENAGAS

SEQ ID NO: 17012 - DNA, 1467 bp, Zea mays subsp. mays
  misc_feature (1)..(1467): Ceres Seq. ID no. 12383439
  misc_feature: MA Experiment ID: 108528 Result: Down-regulated in Transcription
  misc_feature: MA Experiment 108528 PARAMETER Experiment Name: Zm_Imbibed_Seeds_P Parameter: Age (day) Value: 5 vs. 2
  misc_feature: MA Experiment 108528 PARAMETER Experiment Name: Zm_Imbibed_Seeds_P Parameter: Organism Value: Zea mays
  misc_feature: MA Experiment 108528 PARAMETER Experiment Name: Zm_Imbibed_Seeds_P Parameter: Plant Line Value: 35A19
  misc_feature: MA Experiment 108528 PARAMETER Experiment Name: Zm_Imbibed_Seeds_P Parameter: Tissue Value: Aerial vs. Embryo
  misc_feature: MA Experiment ID: 108529 Result: Up-regulated in Transcription
  misc_feature: MA Experiment 108529 PARAMETER Experiment Name: Zm_Imbibed_Seeds_P Parameter: Age (day) Value: 5 vs. 2
  misc_feature: MA Experiment 108529 PARAMETER Experiment Name: Zm_Imbibed_Seeds_P Parameter: Organism Value: Zea mays
  misc_feature: MA Experiment 108529 PARAMETER Experiment Name: Zm_Imbibed_Seeds_P Parameter: Plant Line Value: 35A19
  misc_feature: MA Experiment 108529 PARAMETER Experiment Name: Zm_Imbibed_Seeds_P Parameter: Tissue Value: Roots vs. Embryo
  misc_feature: MA Experiment ID: 108535 Result: Down-regulated in Transcription
  misc_feature: MA Experiment 108535 PARAMETER Experiment Name: Zm_Meristem_P Parameter: Age (day) Value: 8
  misc_feature: MA Experiment 108535 PARAMETER Experiment Name: Zm_Meristem_P Parameter: Organism Value: Zea mays
  misc_feature: MA Experiment 108535 PARAMETER Experiment Name: Zm_Meristem_P Parameter: Plant Line Value: 35A19
  misc_feature: MA Experiment 108535 PARAMETER Experiment Name: Zm_Meristem_P Parameter: Tissue Value: Root Meristem vs. Above Root Meristem
  misc_feature: MA Experiment ID: 108543 Result: Down-regulated in Transcription
  misc_feature: MA Experiment ID: 20000535 Result: Down-regulated in Transcription
  misc_feature: MA Experiment 20000535 PARAMETER Experiment Name: Zm_Hybrid_Seed_Dev_P Parameter: DAP Value: 30 vs. 12
  misc_feature: MA Experiment 20000535 PARAMETER Experiment Name: Zm_Hybrid_Seed_Dev_P Parameter: Organism Value: Zea mays
  misc_feature: MA Experiment 20000535 PARAMETER Experiment Name: Zm_Hybrid_Seed_Dev_P Parameter: Plant Line Value: 35A19
  misc_feature: MA Experiment 20000535 PARAMETER Experiment Name: Zm_Hybrid_Seed_Dev_P Parameter: Tissue Value: Embryo vs. Unfert Floret
  misc_feature: MA Experiment ID: 20000626 Result: Up-regulated in Transcription
  misc_feature: MA Experiment 20000626 PARAMETER Experiment Name: Zm_Herbicide-Treatments_P Parameter: Timepoint (hr) Value: 12
  misc_feature: MA Experiment 20000626 PARAMETER Experiment Name: Zm_Herbicide-Treatments_P Parameter: Tissue Value: Aerial
  misc_feature: MA Experiment 20000626 PARAMETER Experiment Name: Zm_Herbicide-Treatments_P Parameter: Treatment Value: Roundup vs. No Treatment
  misc_feature: MA Experiment ID: 20001613 Result: Down-regulated in Transcription
  misc_feature: MA Experiment 20001613 PARAMETER Experiment Name: Zm_50ppm_KNO3_L-to-H_P Parameter: Age (day) Value: 20
  misc_feature: MA Experiment 20001613 PARAMETER Experiment Name: Zm_50ppm_KNO3_L-to-H_P Parameter: Organism Value: Zea mays
  misc_feature: MA Experiment 20001613 PARAMETER Experiment Name: Zm_50ppm_KNO3_L-to-H_P Parameter: Plant Line Value: 35A19
  misc_feature: MA Experiment 20001613 PARAMETER Experiment Name: Zm_50ppm_KNO3_L-to-H_P Parameter: Timepoint (hr) Value: 24
  misc_feature: MA Experiment 20001613 PARAMETER Experiment Name: Zm_50ppm_KNO3_L-to-H_P Parameter: Tissue Value: Roots
  misc_feature: MA Experiment 20001613 PARAMETER Experiment Name: Zm_50ppm_KNO3_L-to-H_P Parameter: Treatment Value: 50ppm KNO3 vs. 50ppm KCl
gcagctccgcacaggtccctggcacagggcgaggcactgtcacgcacggaatcgagcaatcgatcacacagagacacaggtcaggagcaggagctcgaggtgtcgccgcgcggcagcagcttgggactcgggacagccatggggaagggccgggcaccgtgctgcgccaaggtggggctcaacaagggctcctggacgccggaggaggacatgcgcctcgtcgcctacattcagaagtacggccacgccaactggcgcgccctgcccaagcaagcaggtttgctgcggtgcgggaagagctgccgtctgcggtggatcaactacctgcgcccggacctcaagcgcggcaacttcaccgccgaggaggaggaggccatcatcaagctccacggcttgctcgggaacaagtggtccaagatcgcgtcgtgcctgccgggccggacggacaacgagatcaagaacgtctggaacacgcacctgaagaagcgggtatcgccgtccggcggggaggaggagcacggcgccgccgggtccaacaagaacaagaagaagaagaagaaagccgctggcggcgccgaggagccgctcccgtcaccgactccgtctccgtcgccgtcctcgtccaccaccacgacggccaactgctccagcggcgactccggcgagcagcagagcaacaccagcaaggaggcggacgacgagcagctggacctggagaacctcgagatgatgcccatgctggacgacgacccaataaccttcggcttcgacatgctggtggaccccgtgccagcgccgtacggcccggccgtgtccgcgtccgcgtccagacccacgtcgccctgcgcctcgtccacgtccccacctccgcccgcgggctgcggcccgctcggcgtggacgacctgctggtgctgccagagatcgacatcgaccaggagctgtggagcatcatcgacggcgacggcggcggcgacggaggaggctccgcttgcgccgtgtctgccgagacatcggcgccgtgctgccagagcaatgcgccggagccgacgacgaacggcgcctgcgcgaccagccaccacggagcggcggaggaggagggaaaggagtggtggttggaggacctggagagggagttgggcctgtggggccccgtggacgtggaggactaccagtaccagtacccaacgggcccacatggtctggtggctgaccacacggacccgcttcctgccatggtggacgacccggtgtcctgctacttccaagcgggccccgcctccgcagtgctccaggaacccgggtactcggtgactagtggtagcaacctgatggggttgtgagatttatcgtcgtcgtcgtcgtcgtttttttttgtgatttttttttagatagcagaacagaaatcctgaacaaacggatcgtactatgcctggcaaaccatcggcgccagcatactacttgcttgc

SEQ ID NO: 17013 - protein, 446 aa, Zea mays subsp. mays
  peptide (1)..(446): Ceres Seq. ID no. 12383440
  misc_feature (62)..(109): Pfam Name: Myb-like DNA-binding domain Pfam Description: Myb-like DNA-binding domain
  misc_feature (47)..(237): Homolog of NCBI NO: 15219313 NR Description: myb family transcription factor; protein id:
  misc_feature (50)..(235): Homolog of NCBI NO: 37535390 NR Description: putative myb factor [Oryza sativa (japonica
  misc_feature (180)..(439): Homolog of NCBI NO: 38347068 NR Description: OSJNBa0006A01.9 [Oryza sativa (japonica
  misc_feature (50)..(234): Homolog of NCBI NO: 33087073 NR Description: myb-related protein [Oryza sativa (japonica
  misc_feature (50)..(234): Homolog of NCBI NO: 7438336 NR Description: myb protein homolog - rice
  misc_feature (47)..(171): Homolog of NCBI NO: 19548405 NR Description: P-type R2R3 Myb protein [Sorghum bicolor]
  misc_feature (47)..(308): Homolog of NCBI NO: 38347068 NR Description: OSJNBa0006A01.9 [Oryza sativa (japonica
  misc_feature (280)..(428): Homolog of NCBI NO: 127580 NR Description: Myb-related protein Zm1
  misc_feature (47)..(249): Homolog of NCBI NO: 127580 NR Description: Myb-related protein Zm1
AAPHRSLAQGEALSRTESSNRSHRDTGQEQELEVSPRGSSLGLGTAMGKGRAPCCAKVGLNKGSWTPEEDMRLVAYIQKYGHANWRALPKQAGLLRCGKSCRLRWINYLRPDLKRGNFTAEEEEAIIKLHGLLGNKWSKIASCLPGRTDNEIKNVWNTHLKKRVSPSGGEEEHGAAGSNKNKKKKKKAAGGAEEPLPSPTPSPSPSSSTTTTANCSSGDSGEQQSNTSKEADDEQLDLENLEMMPMLDDDPITFGFDMLVDPVPAPYGPAVSASASRPTSPCASSTSPPPPAGCGPLGVDDLLVLPEIDIDQELWSIIDGDGGGDGGGSACAVSAETSAPCCQSNAPEPTTNGACATSHHGAAEEEGKEWWLEDLERELGLWGPVDVEDYQYQYPTGPHGLVADHTDPLPAMVDDPVSCYFQAGPASAVLQEPGYSVTSGSNLMGL

SEQ ID NO: 17014 - protein, 402 aa, Zea mays subsp. mays
  peptide (1)..(402): Ceres Seq. ID no. 12383441
SSAQVPGTGRGTVTHGIEQSITQRHRSGAGARGVAARQQLGTRDSHGEGPGTVLRQGGAQQGLLDAGGGHAPRRLHSEVRPRQLARPAQASRFAAVREELPSAVDQLPAPGPQARQLHRRGGGGHHQAPRLAREQVVQDRVVPAGPDGQRDQERLEHAPEEAGIAVRRGGGARRRRVQQEQEEEEESRWRRRGAAPVTDSVSVAVLVHHHDGQLLQRRLRRAAEQHQQGGGRRAAGPGEPRDDAHAGRRPNNLRLRHAGGPRASAVRPGRVRVRVQTHVALRLVHVPTSARGLRPARRGRPAGAARDRHRPGAVEHHRRRRRRRRRRLRLRRVCRDIGAVLPEQCAGADDERRLRDQPPRSGGGGGKGVVVGGPGEGVGPVGPRGRGGLPVPVPNGPTWSGG

SEQ ID NO: 17015 - protein, 400 aa, Zea mays subsp. mays
  peptide (1)..(400): Ceres Seq. ID no. 12383442
  misc_feature (16)..(63): Pfam Name: Myb-like DNA-binding domain Pfam Description: Myb-like DNA-binding domain
  misc_feature (1)..(191): Homolog of NCBI NO: 15219313 NR Description: myb family transcription factor; protein id:
  misc_feature (4)..(189): Homolog of NCBI NO: 37535390 NR Description: putative myb factor [Oryza sativa (japonica
  misc_feature (134)..(393): Homolog of NCBI NO: 38347068 NR Description: OSJNBa0006A01.9 [Oryza sativa (japonica
  misc_feature (4)..(188): Homolog of NCBI NO: 33087073 NR Description: myb-related protein [Oryza sativa (japonica
  misc_feature (4)..(188): Homolog of NCBI NO: 7438336 NR Description: myb protein homolog - rice
  misc_feature (1)..(125): Homolog of NCBI NO: 19548405 NR Description: P-type R2R3 Myb protein [Sorghum bicolor]
  misc_feature (1)..(262): Homolog of NCBI NO: 38347068 NR Description: OSJNBa0006A01.9 [Oryza sativa (japonica
  misc_feature (234)..(382): Homolog of NCBI NO: 127580 NR Description: Myb-related protein Zm1
  misc_feature (1)..(203): Homolog of NCBI NO: 127580 NR Description: Myb-related protein Zm1
MGKGRAPCCAKVGLNKGSWTPEEDMRLVAYIQKYGHANWRALPKQAGLLRCGKSCRLRWINYLRPDLKRGNFTAEEEEAIIKLHGLLGNKWSKIASCLPGRTDNEIKNVWNTHLKKRVSPSGGEEEHGAAGSNKNKKKKKKAAGGAEEPLPSPTPSPSPSSSTTTTANCSSGDSGEQQSNTSKEADDEQLDLENLEMMPMLDDDPITFGFDMLVDPVPAPYGPAVSASASRPTSPCASSTSPPPPAGCGPLGVDDLLVLPEIDIDQELWSIIDGDGGGDGGGSACAVSAETSAPCCQSNAPEPTTNGACATSHHGAAEEEGKEWWLEDLERELGLWGPVDVEDYQYQYPTGPHGLVADHTDPLPAMVDDPVSCYFQAGPASAVLQEPGYSVTSGSNLMGL

SEQ ID NO: 17016 - DNA, 1213 bp, Zea mays subsp. mays
  misc_feature (1)..(1213): Ceres Seq. ID no. 12435169
  misc_feature: MA Experiment ID: 20000535 Result: Up-regulated in Transcription
  misc_feature: MA Experiment 20000535 PARAMETER Experiment Name: Zm_Hybrid_Seed_Dev_P Parameter: DAP Value: 30 vs. 12
  misc_feature: MA Experiment 20000535 PARAMETER Experiment Name: Zm_Hybrid_Seed_Dev_P Parameter: Organism Value: Zea mays
  misc_feature: MA Experiment 20000535 PARAMETER Experiment Name: Zm_Hybrid_Seed_Dev_P Parameter: Plant Line Value: 35A19
  misc_feature: MA Experiment 20000535 PARAMETER Experiment Name: Zm_Hybrid_Seed_Dev_P Parameter: Tissue Value: Embryo vs. Unfert Floret
atcgagaagccaggaccaggacgacgatggcccggccgcgcctcctcctcaccttcctgctcgccgcggcggccgtgctgaccacggtgcccggcgtcgcgctcgccaagtcgaagctcgccaagaagagcgacgacgtcgtgaacgggcccctcctgaccgagtagatccaggcgaagaagacgctgatcgtggggccggacgaggagttcaagaccgtgcagtccgccatcgacgcggtgcccgccggcaacgccgagtgggtcatcgtccacctccgctctggcctgcacaggggcaaagttgtgataccggagaacaagcccttcatcttcgtgaggggcaacggcaaaggccggacctccatctcccacgagtccgcctcttccgacaacgccgagtccgccgcgttcaccgtgaactcggacaacgtcatcgtcttcggcgtcagcttcaggaacagcgcccgcgtcggcctggtgaacgacccggagatccgttccgtggcggcgatggtggccggcgacaaggtggccttctaccactgcgcgttctacagcccccaccacaccctgttcgacagcgccggccgccactactacgagagctgctacatccagggcaacatcgacttcatcttcggcagcggccagtccatcttccagtgccccgagatcttcgtgaggcctgaccggcggacggagatccgcggctccatcaccgcgcaggtgcggcaggaggaggacagcagcggcttcgtcttcctcaagggcaaggtgtacggcgtcggggaggtgtacctgggccgcgtcaccgcgccggactcgcgcgtcatcttcgccgacacctacctctccaagaccatccacccggccggctggacaaccataggctacagcggcagcaccgacaaggtgacgctcgccgagttcaactgcactgggccgggcgctgacgtgacgaaccgcgtgccatggtcgcggaggttctctcccgacgacgcggccaagtacctcaccatcgacttcatcaacggcaaggactggctgccggcgtactactactgatccgacgatcgactgctggatcgatcaagcatgcatgcatgtatacacatcttgtaacgctgaattttgattcatggcacactgtactggacgaggatcattttttcttgcctaagtactgacacgcgtttccattgttgatcccg

SEQ ID NO: 17017 - protein, 229 aa, Zea mays subsp. mays
  peptide (1)..(229): Ceres Seq. ID no. 12435170
SRSQDQDDDGPAAPPPHLPARRGGRADHGARRRARQVEARQEERRRRERAPPDRVDPGEEDADRGAGRGVQDRAVRHRRGARRQRRVGHRPPPLWPAQGQSCDTGEQALHLREGQRQRPDLHLPRVRLFRQRRVRRVHRELGQRHRLRRQLQEQRPRRPGERPGDPFRGGDGGRRQGGLLPLRVLQPPPHPVRQRRPPLLRELLHPGQHRLHLRQRPVHLPVPRDLREA

SEQ ID NO: 17018 - protein, 184 aa, Zea mays subsp. mays
  peptide (1)..(184): Ceres Seq. ID no. 12435171
  misc_feature (1)..(175): Pfam Name: Pectinesterase Pfam Description: Pectinesterase
  misc_feature (1)..(182): Homolog of NCBI NO: 30690639 NR Description: pectinesterase family [Arabidopsis thaliana]
  misc_feature (1)..(181): Homolog of NCBI NO: 34905460 NR Description: putative pectin methylesterase
  misc_feature (1)..(179): Homolog of NCBI NO: 11994232 NR Description: pectin methylesterase-like protein [Arabidopsis
  misc_feature (1)..(179): Homolog of NCBI NO: 15229583 NR Description: pectinesterase family; protein id: At3g24130.1
  misc_feature (1)..(179): Homolog of NCBI NO: 15239623 NR Description: pectinesterase family; protein id: At5g18990.1
  misc_feature (1)..(179): Homolog of NCBI NO: 27754550 NR Description: putative pectinesterase family protein
  misc_feature (1)..(179): Homolog of NCBI NO: 15228023 NR Description: pectinesterase family; protein id: At2g36710.1
  misc_feature (1)..(179): Homolog of NCBI NO: 15224725 NR Description: pectinesterase family; protein id: At2g19150.1
  misc_feature (1)..(182): Homolog of NCBI NO: 15228955 NR Description: pectinesterase family
  misc_feature (1)..(184): Homolog of NCBI NO: 39653369 NR Description: putative pectinesterase [Oryza sativa (indica
MVAGDKVAFYHCAFYSPHHTLFDSAGRHYYESCYIQGNIDFIFGSGQSIFQCPEIFVRPDRRTEIRGSITAQVRQEEDSSGFVFLKGKVYGVGEVYLGRVTAPDSRVIFADTYLSKTIHPAGWTTIGYSGSTDKVTLAEFNCTGPGADVTNRVPWSRRFSPDDAAKYLTIDFINGKDWLPAYYY

SEQ ID NO: 17019 - DNA, 1400 bp, Zea mays subsp. mays
  misc_feature (1)..(1400): Ceres Seq. ID no. 12383804
  misc_feature: MA Experiment ID: 108528 Result: Down-regulated in Transcription
  misc_feature: MA Experiment 108528 PARAMETER Experiment Name: Zm_Imbibed_Seeds_P Parameter: Age (day) Value: 5 vs. 2
  misc_feature: MA Experiment 108528 PARAMETER Experiment Name: Zm_Imbibed_Seeds_P Parameter: Organism Value: Zea mays
  misc_feature: MA Experiment 108528 PARAMETER Experiment Name: Zm_Imbibed_Seeds_P Parameter: Plant Line Value: 35A19
  misc_feature: MA Experiment 108528 PARAMETER Experiment Name: Zm_Imbibed_Seeds_P Parameter: Tissue Value: Aerial vs. Embryo
  misc_feature: MA Experiment ID: 108535 Result: Up-regulated in Transcription
  misc_feature: MA Experiment 108535 PARAMETER Experiment Name: Zm_Meristem_P Parameter: Age (day) Value: 8
  misc_feature: MA Experiment 108535 PARAMETER Experiment Name: Zm_Meristem_P Parameter: Organism Value: Zea mays
  misc_feature: MA Experiment 108535 PARAMETER Experiment Name: Zm_Meristem_P Parameter: Plant Line Value: 35A19
  misc_feature: MA Experiment 108535 PARAMETER Experiment Name: Zm_Meristem_P Parameter: Tissue Value: Root Meristem vs. Above Root Meristem
  misc_feature: MA Experiment ID: 108543 Result: Down-regulated in Transcription
  misc_feature: MA Experiment ID: 108545 Result: Down-regulated in Transcription
  misc_feature: MA Experiment 108545 PARAMETER Experiment Name: Zm_Imbibed_Seeds_P Parameter: Age (day) Value: 3 vs. 2
  misc_feature: MA Experiment 108545 PARAMETER Experiment Name: Zm_Imbibed_Seeds_P Parameter: Organism Value: Zea mays
  misc_feature: MA Experiment 108545 PARAMETER Experiment Name: Zm_Imbibed_Seeds_P Parameter: Plant Line Value: 35A19
  misc_feature: MA Experiment 108545 PARAMETER Experiment Name: Zm_Imbibed_Seeds_P Parameter: Tissue Value: Aerial vs. Embryo
  misc_feature: MA Experiment ID: 108547 Result: Down-regulated in Transcription
  misc_feature: MA Experiment 108547 PARAMETER Experiment Name: Zm_Imbibed_Seeds_P Parameter: Age (day) Value: 4 vs. 2
  misc_feature: MA Experiment 108547 PARAMETER Experiment Name: Zm_Imbibed_Seeds_P Parameter: Organism Value: Zea mays
  misc_feature: MA Experiment 108547 PARAMETER Experiment Name: Zm_Imbibed_Seeds_P Parameter: Plant Line Value: 35A19
  misc_feature: MA Experiment 108547 PARAMETER Experiment Name: Zm_Imbibed_Seeds_P Parameter: Tissue Value: Aerial vs. Embryo
  misc_feature: MA Experiment ID: 108687 Result: Up-regulated in Transcription
  misc_feature: MA Experiment 108687 PARAMETER Experiment Name: Zm_Embryos-Flowers__P Parameter: Tissue Value: Embryo vs. Aerial+
  misc_feature: MA Experiment ID: 20000535 Result: Up-regulated in Transcription
  misc_feature: MA Experiment 20000535 PARAMETER Experiment Name: Zm_Hybrid_Seed_Dev_P Parameter: DAP Value: 30 vs. 12
  misc_feature: MA Experiment 20000535 PARAMETER Experiment Name: Zm_Hybrid_Seed_Dev_P Parameter: Organism Value: Zea mays
  misc_feature: MA Experiment 20000535 PARAMETER Experiment Name: Zm_Hybrid_Seed_Dev_P Parameter: Plant Line Value: 35A19
  misc_feature: MA Experiment 20000535 PARAMETER Experiment Name: Zm_Hybrid_Seed_Dev_P Parameter: Tissue Value: Embryo vs. Unfert Floret
gcacgagaccattacctagaacatcctaatcaaaagcggatgcgctcgggcgacgctcctctctctctttctctttctctcgctacatattcttcctctctctatctttgttctcctccgcccagctttcggacgcgacactcatcgcacattcccgtcaggccggtatccgcctcgggcttcgccgaaatcctacgctacctctctgatctctctccccccggccccgagcgcaccagattcacaccgcgcccgcataggtgcgtgtgcctgcggaagctggttgctgctcgcgctactagctgtttcgcgcggtgatcaacaatccggccgcgggagcggagctaggaggccgagagacacaatgaacatgttcgatgggatggagagtgctgggtacggcggcggcgctgggccgatgggcggggtggtgctgtcgcgggaccccaagccgcggctgcggtggacgcccgacctgcacgagcgcttcgtcgaggccgtcaccaagctcggcggggccgacaaggcgacgcccaagtcagtgctgcggctgatgggaatgaaagggctcaccttgtaccacttgaagagtcacctccagaaatacaggcttggaaagcagaccaagaaagacacgggtttggacgccggcagaggggcattcgcggcgcagggcatcaatttctccacaccagtacctcctcctagcattccatctacggccagtgataatacgggagaaacgccacttgcagatgcgctgaagtaccagattgaagtccaaaggaaactgcacgaacagctcgaggttcagaagaagctgcagatgcggatcgaggcgcaaggcaaatacttacagacgatactcgagaaggcccagagcaacctctcgtaccacgcgactggagccgcaaacctagaagcaaccaggtcgcagctgacggacttcaacctcgcgctctcaggcttcatggacaacgtgacccaggcgtgcgagcagaacaacggcgagctggtgaaagccatgtccgaggacggtctcagagcgaacaatctagactttcagccgtaccatggagttcatgacggggacgacgtcaagtgcgctacggacgaagggttgctacttctggacctaaacatcagaggcgggtacggtcatcggatttcgacagatctgaagatgaatcaacacatgcggtgaaaagttcagtagaaagaaaggcgaggacagtagtttaatcttgggtaacccatcaatctaagagaagaggtgcccttgtgtttgtgagaaattctttcggccatcttgattcctaacgatgcttctttacggtgatggtcagcgtattgcttatgtaaaatttggtgagaggctccgaataagggtaactaatctt

SEQ ID NO: 17020 - protein, 279 aa, Zea mays subsp. mays
  peptide (1)..(279): Ceres Seq. ID no. 12383805
  misc_feature (31)..(82): Pfam Name: Myb-like DNA-binding domain Pfam Description: Myb-like DNA-binding domain
  misc_feature (11)..(200): Homolog of NCBI NO: 18404044 NR Description: transfactor, putative
  misc_feature (131)..(279): Homolog of NCBI NO: 38345771 NR Description: OSJNBa0083N12.9 [Oryza sativa (japonica
  misc_feature (13)..(194): Homolog of NCBI NO: 6223653 NR Description: transfactor-like [Arabidopsis thaliana]
  misc_feature (5)..(211): Homolog of NCBI NO: 18414049 NR Description: putative protein
  misc_feature (13)..(194): Homolog of NCBI NO: 15238770 NR Description: transfactor-like protein
  misc_feature (13)..(194): Homolog of NCBI NO: 28059694 NR Description: transfactor-like protein [Arabidopsis thaliana]
  misc_feature (13)..(194): Homolog of NCBI NO: 14596181 NR Description: transfactor-like protein [Arabidopsis thaliana]
  misc_feature (7)..(89): Homolog of NCBI NO: 15242435 NR Description: putative protein; protein id: At5g45580.1
  misc_feature (124)..(264): Homolog of NCBI NO: 15242435 NR Description: putative protein; protein id: At5g45580.1
  misc_feature (5)..(264): Homolog of NCBI NO: 32470629 NR Description: putative phosphate starvation response regulator
MNMFDGMESAGYGGGAGPMGGVVLSRDPKPRLRWTPDLHERFVEAVTKLGGADKATPKSVLRLMGMKGLTLYHLKSHLQKYRLGKQTKKDTGLDAGRGAFAAQGINFSTPVPPPSIPSTASDNTGETPLADALKYQIEVQRKLHEQLEVQKKLQMRIEAQGKYLQTILEKAQSNLSYHATGAANLEATRSQLTDFNLALSGFMDNVTQACEQNNGELVKAMSEDGLRANNLDFQPYHGVHDGDDVKCATDEGLLLLDLNIRGGYGHRISTDLKMNQHMR

SEQ ID NO: 17021 - protein, 277 aa, Zea mays subsp. mays
  peptide (1)..(277): Ceres Seq. ID no. 12383806
  misc_feature (29)..(80): Pfam Name: Myb-like DNA-binding domain Pfam Description: Myb-like DNA-binding domain
  misc_feature (9)..(198): Homolog of NCBI NO: 18404044 NR Description: transfactor, putative
  misc_feature (129)..(277): Homolog of NCBI NO: 38345771 NR Description: OSJNBa0083N12.9 [Oryza sativa (japonica
  misc_feature (11)..(192): Homolog of NCBI NO: 6223653 NR Description: transfactor-like [Arabidopsis thaliana]
  misc_feature (3)..(209): Homolog of NCBI NO: 18414049 NR Description: putative protein
  misc_feature (11)..(192): Homolog of NCBI NO: 15238770 NR Description: transfactor-like protein
  misc_feature (11)..(192): Homolog of NCBI NO: 28059694 NR Description: transfactor-like protein [Arabidopsis thaliana]
  misc_feature (11)..(192): Homolog of NCBI NO: 14596181 NR Description: transfactor-like protein [Arabidopsis thaliana]
  misc_feature (5)..(87): Homolog of NCBI NO: 15242435 NR Description: putative protein; protein id: At5g45580.1
  misc_feature (122)..(262): Homolog of NCBI NO: 15242435 NR Description: putative protein; protein id: At5g45580.1
  misc_feature (3)..(262): Homolog of NCBI NO: 32470629 NR Description: putative phosphate starvation response regulator
MFDGMESAGYGGGAGPMGGVVLSRDPKPRLRWTPDLHERFVEAVTKLGGADKATPKSVLRLMGMKGLTLYHLKSHLQKYRLGKQTKKDTGLDAGRGAFAAQGINFSTPVPPPSIPSTASDNTGETPLADALKYQIEVQRKLHEQLEVQKKLQMRIEAQGKYLQTILEKAQSNLSYHATGAANLEATRSQLTDFNLALSGFMDNVTQACEQNNGELVKAMSEDGLRANNLDFQPYHGVHDGDDVKCATDEGLLLLDLNIRGGYGHRISTDLKMNQHMR

SEQ ID NO: 17022 - protein, 273 aa, Zea mays subsp. mays
  peptide (1)..(273): Ceres Seq. ID no. 12383807
  misc_feature (25)..(76): Pfam Name: Myb-like DNA-binding domain Pfam Description: Myb-like DNA-binding domain
  misc_feature (5)..(194): Homolog of NCBI NO: 18404044 NR Description: transfactor, putative
  misc_feature (125)..(273): Homolog of NCBI NO: 38345771 NR Description: OSJNBa0083N12.9 [Oryza sativa (japonica
  misc_feature (7)..(188): Homolog of NCBI NO: 6223653 NR Description: transfactor-like [Arabidopsis thaliana]
  misc_feature (1)..(205): Homolog of NCBI NO: 18414049 NR Description: putative protein
  misc_feature (7)..(188): Homolog of NCBI NO: 28059694 NR Description: transfactor-like protein [Arabidopsis thaliana]
  misc_feature (7)..(188): Homolog of NCBI NO: 15238770 NR Description: transfactor-like protein
  misc_feature (7)..(188): Homolog of NCBI NO: 14596181 NR Description: transfactor-like protein [Arabidopsis thaliana]
  misc_feature (1)..(83): Homolog of NCBI NO: 15242435 NR Description: putative protein; protein id: At5g45580.1
  misc_feature (118)..(258): Homolog of NCBI NO: 15242435 NR Description: putative protein; protein id: At5g45580.1
  misc_feature (1)..(258): Homolog of NCBI NO: 32470629 NR Description: putative phosphate starvation response regulator
MESAGYGGGAGPMGGVVLSRDPKPRLRWTPDLHERFVEAVTKLGGADKATPKSVLRLMGMKGLTLYHLKSHLQKYRLGKQTKKDTGLDAGRGAFAAQGINFSTPVPPPSIPSTASDNTGETPLADALKYQIEVQRKLHEQLEVQKKLQMRIEAQGKYLQTILEKAQSNLSYHATGAANLEATRSQLTDFNLALSGFMDNVTQACEQNNGELVKAMSEDGLRANNLDFQPYHGVHDGDDVKCATDEGLLLLDLNIRGGYGHRISTDLKMNQHMR

SEQ ID NO: 17023 - DNA, 1651 bp, Zea mays subsp. mays
  misc_feature (1)..(1651): Ceres Seq. ID no. 12424033
  misc_feature: MA Experiment ID: 108536 Result: Down-regulated in Transcription
  misc_feature: MA Experiment 108536 PARAMETER Experiment Name: Zm_Meristem_P Parameter: Age (day) Value: 8
  misc_feature: MA Experiment 108536 PARAMETER Experiment Name: Zm_Meristem_P Parameter: Organism Value: Zea mays
  misc_feature: MA Experiment 108536 PARAMETER Experiment Name: Zm_Meristem_P Parameter: Plant Line Value: 35A19
  misc_feature: MA Experiment 108536 PARAMETER Experiment Name: Zm_Meristem_P Parameter: Tissue Value: Shoot Meristem vs. Above Shoot Meristem
  misc_feature: MA Experiment ID: 108556 Result: Down-regulated in Transcription
  misc_feature: MA Experiment 108556 PARAMETER Experiment Name: Zm_Drought_P Parameter: Age (day) Value: 9
  misc_feature: MA Experiment 108556 PARAMETER Experiment Name: Zm_Drought_P Parameter: Organism Value: Zea mays
  misc_feature: MA Experiment 108556 PARAMETER Experiment Name: Zm_Drought_P Parameter: Plant Line Value: 35A19
  misc_feature: MA Experiment 108556 PARAMETER Experiment Name: Zm_Drought_P Parameter: Timepoint (hr) Value: 24
  misc_feature: MA Experiment 108556 PARAMETER Experiment Name: Zm_Drought_P Parameter: Tissue Value: Aerial
  misc_feature: MA Experiment 108556 PARAMETER Experiment Name: Zm_Drought_P Parameter: Treatment Value: Drought vs. No Drought
  misc_feature: MA Experiment ID: 20000478 Result: Down-regulated in Transcription
  misc_feature: MA Experiment 20000478 PARAMETER Experiment Name: Zm_5mM_SA_P Parameter: Age (day) Value: 11
  misc_feature: MA Experiment 20000478 PARAMETER Experiment Name: Zm_5mM_SA_P Parameter: Organism Value: Zea mays
  misc_feature: MA Experiment 20000478 PARAMETER Experiment Name: Zm_5mM_SA_P Parameter: Plant Line Value: 35A19
  misc_feature: MA Experiment 20000478 PARAMETER Experiment Name: Zm_5mM_SA_P Parameter: Timepoint (hr) Value: 72
  misc_feature: MA Experiment 20000478 PARAMETER Experiment Name: Zm_5mM_SA_P Parameter: Tissue Value: Aerial
  misc_feature: MA Experiment 20000478 PARAMETER Experiment Name: Zm_5mM_SA_P Parameter: Treatment Value: 5mM SA vs. No Treatment
  misc_feature: MA Experiment ID: 20000480 Result: Down-regulated in Transcription
  misc_feature: MA Experiment 20000480 PARAMETER Experiment Name: Zm_Drought_P Parameter: Age (day) Value: 11
  misc_feature: MA Experiment 20000480 PARAMETER Experiment Name: Zm_Drought_P Parameter: Organism Value: Zea mays
  misc_feature: MA Experiment 20000480 PARAMETER Experiment Name: Zm_Drought_P Parameter: Plant Line Value: 35A19
  misc_feature: MA Experiment 20000480 PARAMETER Experiment Name: Zm_Drought_P Parameter: Timepoint (hr) Value: 72
  misc_feature: MA Experiment 20000480 PARAMETER Experiment Name: Zm_Drought_P Parameter: Tissue Value: Aerial
  misc_feature: MA Experiment 20000480 PARAMETER Experiment Name: Zm_Drought_P Parameter: Treatment Value: Drought vs. No Drought
  misc_feature: MA Experiment ID: 20000488 Result: Down-regulated in Transcription
  misc_feature: MA Experiment 20000488 PARAMETER Experiment Name: Zm_50mM_NH4NO3_L_to_H_P Parameter: Organism Value: Zea mays
  misc_feature: MA Experiment 20000488 PARAMETER Experiment Name: Zm_50mM_NH4NO3_L_to_H_P Parameter: Timepoint (hr) Value: 8
  misc_feature: MA Experiment 20000488 PARAMETER Experiment Name: Zm_50mM_NH4NO3_L_to_H_P Parameter: Tissue Value: Leaves
  misc_feature: MA Experiment 20000488 PARAMETER Experiment Name: Zm_50mM_NH4NO3_L_to_H_P Parameter: Treatment Value: 50mM NH4NO3 vs. 100mM Mannitol
gcacgagaccattacctagaacatcctaatcgaaaaacagttattacacacagacagcagtccactcgcgattactactgtaatccccaccacaccacctcccgtcgagtggagtgcttcttggcgacctttctttgcatgtcaacgcagacaaaaagaacagcgccgccgcctccacgaccacgccggtcgccgagcctccgtctcctcccgagagatctcgcagccagccagccagttagccgccgtacgtggccacatggaggcgccgcgggcaaacaacggcaggaagcgcaagcccacgcctcccgccggcctgggggccctccacgacgacttgctcgagcgggtcctcgcgcgcctcccgccggccacctacttccgcctgcgcgccgtctgcagccgctggcgcgccgccgcggcgtccccgaccttcctccacgcctgcgcccgcgtcccctcccgggacccgtggttcctcatgctctccgactccgactccgggccccgcccgcccgtcgccttcgacgccgccggccgcagctggaaccgctgccacgccgcgccgggggccgccgtgcccgtggccgcgtcggccggcctcgtcctctaccgcgcgccggccacgggcgcgctcaccgtcgccaacccgctcacgggcgcgtcccgcgcgctcccctcgccgccgcaggccgcgcgccagctgcaggccatcgccatgtacggcgccggcggtccctaccgcgtggccctcttcgcgggcgacctccccgacgacctctccatggcggtctacgactcctccagcgactcgtgggaggggcccctgccgctcgcccgcaagcccggggacgactcctgccccgacgcgccggcgcccgacgacacggtctacttcctcagcaagtccggggacgtcgtggccaccaacatgcagcgcagcgcgtctaagcagtactcctcctcagtggtcgtgcgccgcgacggcgacggcgacgccgcctttgcctacttcctcagctactcgggcacagtcgtcgcctgcgacacggcgcgccgcaccttcgcggagctgccccgcatcctccccgtctacttcgagtactccatcgacgtcgtcgcgtgcggcgcagcggcctacgccgtcgtgctttcggaatacctcggcacggccagcctgcgcgtctgggagttcgccgggggcgcgtggcggcaggtggccgccatnccgcccgccatgtcgcacggattccacggcacgcggcccgatatcaactgcgtcggccacggcgaccgcctcatggtttgcgtcacctccgccgaggccaacgcctgcttcatgtgcgacgtggccagcaaccagtgggaggagctgcccaagtacgtcaatgccgacggcgaggccagcgagttcctggccgccttctccttcgagcccagagtggaggtcaccgtataagcgcttatggttatagtgttactacgattaattgctttcttcattaaggcgccttagttttggttcggctcctactccgtgtgattgatttcttcgtgtttgtgtgtgtgcatgtacttaacttacggtaccgaattgtaatgtcatttttcattgacattatttgtcttcaataaaattgcagattcgtgt

SEQ ID NO: 17024 - protein, 399 aa, Zea mays subsp. mays
  peptide (1)..(399): Ceres Seq. ID no. 12424034
  misc_feature (20)..(65): Pfam Name: F-box domain Pfam Description: F-box domain
  misc_feature (23)..(399): Homolog of NCBI NO: 18418160 NR Description: F-box protein family, AtFBX13; protein id:
  misc_feature (23)..(399): Homolog of NCBI NO: 7486453 NR Description: hypothetical protein F4I10.90 - Arabidopsis
  misc_feature (5)..(399): Homolog of NCBI NO: 34906730 NR Description: contains EST AU091365(E30777)~similar to F-box
  misc_feature (1)..(399): Homolog of NCBI NO: 34896284 NR Description: unknown protein [Oryza sativa]
  misc_feature (323)..(323): Xaa is any aa, unknown or other
MEAPRANNGRKRKPTPPAGLGALHDDLLERVLARLPPATYFRLRAVCSRWRAAAASPTFLHACARVPSRDPWFLMLSDSDSGPRPPVAFDAAGRSWNRCHAAPGAAVPVAASAGLVLYRAPATGALTVANPLTGASRALPSPPQAARQLQAIAMYGAGGPYRVALFAGDLPDDLSMAVYDSSSDSWEGPLPLARKPGDDSCPDAPAPDDTVYFLSKSGDVVATNMQRSASKQYSSSVVVRRDGDGDAAFAYFLSYSGTVVACDTARRTFAELPRILPVYFEYSIDVVACGAAAYAVVLSEYLGTASLRVWEFAGGAWRQVAAXPPAMSHGFHGTRPDINCVGHGDRLMVCVTSAEANACFMCDVASNQWEELPKYVNADGEASEFLAAFSFEPRVEVTV

SEQ ID NO: 17025 - protein, 325 aa, Zea mays subsp. mays
  peptide (1)..(325): Ceres Seq. ID no. 12424035
  misc_feature (1)..(325): Homolog of NCBI NO: 18418160 NR Description: F-box protein family, AtFBX13; protein id:
  misc_feature (1)..(325): Homolog of NCBI NO: 7486453 NR Description: hypothetical protein F4I10.90 - Arabidopsis
  misc_feature (1)..(325): Homolog of NCBI NO: 34906730 NR Description: contains EST AU091365(E30777)~similar to F-box
  misc_feature (1)..(325): Homolog of NCBI NO: 34896284 NR Description: unknown protein [Oryza sativa]
  misc_feature (249)..(249): Xaa is any aa, unknown or other
MLSDSDSGPRPPVAFDAAGRSWNRCHAAPGAAVPVAASAGLVLYRAPATGALTVANPLTGASRALPSPPQAARQLQAIAMYGAGGPYRVALFAGDLPDDLSMAVYDSSSDSWEGPLPLARKPGDDSCPDAPAPDDTVYFLSKSGDVVATNMQRSASKQYSSSVVVRRDGDGDAAFAYFLSYSGTVVACDTARRTFAELPRILPVYFEYSIDVVACGAAAYAVVLSEYLGTASLRVWEFAGGAWRQVAAXPPAMSHGFHGTRPDINCVGHGDRLMVCVTSAEANACFMCDVASNQWEELPKYVNADGEASEFLAAFSFEPRVEVTV

SEQ ID NO: 17026 - protein, 316 aa, Zea mays subsp. mays
  peptide (1)..(316): Ceres Seq. ID no. 12424036
ARDHYLEHPNRKTVITHRQQSTRDYYCNPHHTTSRRVECFLATFLCMSTQTKRTAPPPPRPRRSPSLRLLPRDLAASQPVSRRTWPHGGAAGKQRQEAQAHASRRPGGPPRRLARAGPRAPPAGHLLPPARRLQPLARRRGVPDLPPRLRPRPLPGPVVPHALRLRLRAPPARRLRRRRPQLEPLPRRAGGRRARGRVGRPRPLPRAGHGRAHRRQPAHGRVPRAPLAAAGRAPAAGHRHVRRRRSLPRGPLRGRPPRRPLHGGLRLLQRLVGGAPAARPQARGRLLPRRAGARRHGLLPQQVRGRRGHQHAAQRV

SEQ ID NO: 17027 - DNA, 1762 bp, Zea mays subsp. mays
  misc_feature (1)..(1762): Ceres Seq. ID no. 13493688
  misc_feature: MA Experiment ID: 108535 Result: Down-regulated in Transcription
  misc_feature: MA Experiment 108535 PARAMETER Experiment Name: Zm_Meristem_P Parameter: Age (day) Value: 8
  misc_feature: MA Experiment 108535 PARAMETER Experiment Name: Zm_Meristem_P Parameter: Organism Value: Zea mays
  misc_feature: MA Experiment 108535 PARAMETER Experiment Name: Zm_Meristem_P Parameter: Plant Line Value: 35A19
  misc_feature: MA Experiment 108535 PARAMETER Experiment Name: Zm_Meristem_P Parameter: Tissue Value: Root Meristem vs. Above Root Meristem
tagaacatcctaatcgaaaaaagcccaagaccaagtgaaacatcaacacttccacgttccacccatggctaattctcatcaccggtgcaccagcgtcgcctccgagctggaaggcacgctgctcatctccggcagcctcttcccatacttcttcctcgtcgccctcgaggccggcggccctctcagggccctgctcttgctcgccgtgtaccctcttcgcgctgctcggcgccgccttctcgtgggacgacctacccctgctcgccatgaccttcctgtccaccgccggcctcgacgtcggcgacgtgaccgcggcggcgcgggccacgctgcccaggttcttcctggccgacctgcggggcagcgcgttccgggccttgtcgcgccacgccggcggcggcgagaggtacgtcgtcacgcacctgcccaggctcgtcgcggagccgttcgtgagggagtacctcggcgccgacgtccgcgtcgtcggcacggagctgcgggtggtcgcgggtaagaggttctcaggcacggtggtggtggcctctcccggcgtcgcggcggcagcggctggcgccgaccgcagcctgggtgctctggtggccgtccttgggagcgaccgggtcgtcggcgtggggctctactgccccggcgccggcggggaccagcagccggcgtttctgcaggcttgccaggagcgccgcatggtgtccgcgccggagaaggcggcggcggtgcccctgccgaggagcgagtacccgcggccgctggtgttccacgacggccgcctcgtgcgccggcccgacccgcttgtgtgcctggccatcttgctgtggctcccgctcggcgtgctcctgtccgtgacgcgcctcctcttcggcttcctcccgcacggcgccgggctcctgctgtccgcggccacgggcttccggatgcgcggcagcctcgggggagcggcggcggcgggcccgcggcgaggcacattgttcgcgtgcaaccaccagacgctgatggacccggtgatcctcgcgacggtgctgcgccggaaggtgaccgccgtgacgtacagcctgtccagcttctcggagctgatcgcgccgatcccgaccgtccggctgacgcgcgaccgcggcagggacagccggatcatgcagcgcgagctcgcgcgcggcgacctggtggtctgcccggagggcaccacctgccgcgagccctacctgctgcgcttcagcccgctgttcgcggagatcgccgacgaggtcacgccgacggccgtgcgggccggcggcgccatgttccacggctccaccgtgcggggccacaagtggctcgactccgtcttcttcctcatgaacccggcgccgtggtacgagatccggatcctggccacctgcagtggcagtggcggcgcgtccagcctcgacgtggcgaacggcgtccagcgcatgatcggcgatgagcttgggttcgagtgcaccggggctcacgcgcagggacaagtaccggatgatcgccggccacgacggcgtcgacgcgaggtcgtcgccgtcgtcatagctgaagagcaaatgtgccagcgtacgcttgtggggactcatgcacagaaatgcaaaacgttcaactggttctccttctccatcaccgccctgctcttaaacacagacattcagtgttgcagcgactaggctccattcttcaggaaatgaccggtttagacggttttggaacaagcccaaccaaattttagtgattttttatgttcctt

SEQ ID NO: 17028 - protein, 471 aa, Zea mays subsp. mays
  peptide (1)..(471): Ceres Seq. ID no. 13493689
  misc_feature (219)..(337): Pfam Name: Acyltransferase Pfam Description: Acyltransferase
  misc_feature (1)..(403): Homolog of NCBI NO: 29788867 NR Description: hypothetical protein [Oryza sativa (japonica
  misc_feature (1)..(403): Homolog of NCBI NO: 18378959 NR Description: phospholipid/glycerol acyltransferase family
  misc_feature (1)..(403): Homolog of NCBI NO: 15229747 NR Description: expressed protein [Arabidopsis thaliana]
  misc_feature (1)..(403): Homolog of NCBI NO: 17064780 NR Description: Unknown protein [Arabidopsis thaliana]
  misc_feature (1)..(403): Homolog of NCBI NO: 15239924 NR Description: phospholipid/glycerol acyltransferase family
  misc_feature (1)..(403): Homolog of NCBI NO: 15223437 NR Description: expressed protein [Arabidopsis thaliana]
  misc_feature (1)..(404): Homolog of NCBI NO: 34902820 NR Description: unnamed protein product [Oryza sativa (japonica
  misc_feature (1)..(403): Homolog of NCBI NO: 38000002 NR Description: unknown protein [Oryza sativa (japonica
  misc_feature (1)..(403): Homolog of NCBI NO: 15224445 NR Description: phospholipid/glycerol acyltransferase family
  misc_feature (1)..(404): Homolog of NCBI NO: 18481713 NR Description: hypothetical protein [Sorghum bicolor]
MTFLSTAGLDVGDVTAAARATLPRFFLADLRGSAFRALSRHAGGGERYVVTHLPRLVAEPFVREYLGADVRVVGTELRVVAGKRFSGTVVVASPGVAAAAAGADRSLGALVAVLGSDRVVGVGLYCPGAGGDQQPAFLQACQERRMVSAPEKAAAVPLPRSEYPRPLVFHDGRLVRRPDPLVCLAILLWLPLGVLLSVTRLLFGFLPHGAGLLLSAATGFRMRGSLGGAAAAGPRRGTLFACNHQTLMDPVILATVLRRKVTAVTYSLSSFSELIAPIPTVRLTRDRGRDSRIMQRELARGDLVVCPEGTTCREPYLLRFSPLFAEIADEVTPTAVRAGGAMFHGSTVRGHKWLDSVFFLMNPAPWYEIRILATCSGSGGASSLDVANGVQRMIGDELGFECTGAHAQGQVPDDRRPRRRRREVVAVVIAEEQMCQRTLVGTHAQKCKTFNWFSFSITALLLNTDIQCCSD

SEQ ID NO: 17029 - protein, 326 aa, Zea mays subsp. mays
  peptide (1)..(326): Ceres Seq. ID no. 13493690
  misc_feature (74)..(192): Pfam Name: Acyltransferase Pfam Description: Acyltransferase
  misc_feature (1)..(258): Homolog of NCBI NO: 29788867 NR Description: hypothetical protein [Oryza sativa (japonica
  misc_feature (1)..(258): Homolog of NCBI NO: 18378959 NR Description: phospholipid/glycerol acyltransferase family
  misc_feature (1)..(258): Homolog of NCBI NO: 15229747 NR Description: expressed protein [Arabidopsis thaliana]
  misc_feature (1)..(258): Homolog of NCBI NO: 17064780 NR Description: Unknown protein [Arabidopsis thaliana]
  misc_feature (1)..(258): Homolog of NCBI NO: 15239924 NR Description: phospholipid/glycerol acyltransferase family
  misc_feature (1)..(258): Homolog of NCBI NO: 15223437 NR Description: expressed protein [Arabidopsis thaliana]
  misc_feature (1)..(259): Homolog of NCBI NO: 34902820 NR Description: unnamed protein product [Oryza sativa (japonica
  misc_feature (1)..(258): Homolog of NCBI NO: 38000002 NR Description: unknown protein [Oryza sativa (japonica
  misc_feature (1)..(258): Homolog of NCBI NO: 15224445 NR Description: phospholipid/glycerol acyltransferase family
  misc_feature (1)..(259): Homolog of NCBI NO: 18481713 NR Description: hypothetical protein [Sorghum bicolor]
MVSAPEKAAAVPLPRSEYPRPLVFHDGRLVRRPDPLVCLAILLWLPLGVLLSVTRLLFGFLPHGAGLLLSAATGFRMRGSLGGAAAAGPRRGTLFACNHQTLMDPVILATVLRRKVTAVTYSLSSFSELIAPIPTVRLTRDRGRDSRIMQRELARGDLVVCPEGTTCREPYLLRFSPLFAEIADEVTPTAVRAGGAMFHGSTVRGHKWLDSVFFLMNPAPWYEIRILATCSGSGGASSLDVANGVQRMIGDELGFECTGAHAQGQVPDDRRPRRRRREVVAVVIAEEQMCQRTLVGTHAQKCKTFNWFSFSITALLLNTDIQCCSD

SEQ ID NO: 17030 - protein, 250 aa, Zea mays subsp. mays
  peptide (1)..(250): Ceres Seq. ID no. 13493691
  misc_feature (1)..(116): Pfam Name: Acyltransferase Pfam Description: Acyltransferase
  misc_feature (1)..(182): Homolog of NCBI NO: 29788867 NR Description: hypothetical protein [Oryza sativa (japonica
  misc_feature (1)..(182): Homolog of NCBI NO: 18378959 NR Description: phospholipid/glycerol acyltransferase family
  misc_feature (1)..(182): Homolog of NCBI NO: 15229747 NR Description: expressed protein [Arabidopsis thaliana]
  misc_feature (1)..(182): Homolog of NCBI NO: 17064780 NR Description: Unknown protein [Arabidopsis thaliana]
  misc_feature (1)..(182): Homolog of NCBI NO: 15239924 NR Description: phospholipid/glycerol acyltransferase family
  misc_feature (1)..(182): Homolog of NCBI NO: 15223437 NR Description: expressed protein [Arabidopsis thaliana]
  misc_feature (1)..(183): Homolog of NCBI NO: 34902820 NR Description: unnamed protein product [Oryza sativa (japonica
  misc_feature (1)..(182): Homolog of NCBI NO: 38000002 NR Description: unknown protein [Oryza sativa (japonica
  misc_feature (1)..(182): Homolog of NCBI NO: 15224445 NR Description: phospholipid/glycerol acyltransferase family
  misc_feature (1)..(183): Homolog of NCBI NO: 18481713 NR Description: hypothetical protein [Sorghum bicolor]
MRGSLGGAAAAGPRRGTLFACNHQTLMDPVILATVLRRKVTAVTYSLSSFSELIAPIPTVRLTRDRGRDSRIMQRELARGDLVVCPEGTTCREPYLLRFSPLFAEIADEVTPTAVRAGGAMFHGSTVRGHKWLDSVFFLMNPAPWYEIRILATCSGSGGASSLDVANGVQRMIGDELGFECTGAHAQGQVPDDRRPRRRRREVVAVVIAEEQMCQRTLVGTHAQKCKTFNWFSFSITALLLNTDIQCCSD

SEQ ID NO: 17031 - DNA, 1529 bp, Zea mays subsp. mays
  misc_feature (1)..(1529): Ceres Seq. ID no. 12362523
  misc_feature: MA Experiment ID: 108504 Result: Down-regulated in Transcription
  misc_feature: MA Experiment 108504 PARAMETER Experiment Name: Zm_Drought_P Parameter: Age (day) Value: 8
  misc_feature: MA Experiment 108504 PARAMETER Experiment Name: Zm_Drought_P Parameter: Organism Value: Zea mays
  misc_feature: MA Experiment 108504 PARAMETER Experiment Name: Zm_Drought_P Parameter: Plant Line Value: 35A19
  misc_feature: MA Experiment 108504 PARAMETER Experiment Name: Zm_Drought_P Parameter: Timepoint (hr) Value: 12
  misc_feature: MA Experiment 108504 PARAMETER Experiment Name: Zm_Drought_P Parameter: Tissue Value: Aerial
  misc_feature: MA Experiment 108504 PARAMETER Experiment Name: Zm_Drought_P Parameter: Treatment Value: Drought vs. No Drought
  misc_feature: MA Experiment ID: 108522 Result: Down-regulated in Transcription
  misc_feature: MA Experiment 108522 PARAMETER Experiment Name: Zm_42deg_Heat_P Parameter: Age (day) Value: 8
  misc_feature: MA Experiment 108522 PARAMETER Experiment Name: Zm_42deg_Heat_P Parameter: Organism Value: Zea mays
  misc_feature: MA Experiment 108522 PARAMETER Experiment Name: Zm_42deg_Heat_P Parameter: Plant Line Value: 35A19
  misc_feature: MA Experiment 108522 PARAMETER Experiment Name: Zm_42deg_Heat_P Parameter: Temperature (deg C) Value: 42 vs. 22
  misc_feature: MA Experiment 108522 PARAMETER Experiment Name: Zm_42deg_Heat_P Parameter: Timepoint (hr) Value: 1
  misc_feature: MA Experiment 108522 PARAMETER Experiment Name: Zm_42deg_Heat_P Parameter: Tissue Value: Aerial
  misc_feature: MA Experiment ID: 108523 Result: Down-regulated in Transcription
  misc_feature: MA Experiment 108523 PARAMETER Experiment Name: Zm_42deg_Heat_P Parameter: Age (day) Value: 8
  misc_feature: MA Experiment 108523 PARAMETER Experiment Name: Zm_42deg_Heat_P Parameter: Organism Value: Zea mays
  misc_feature: MA Experiment 108523 PARAMETER Experiment Name: Zm_42deg_Heat_P Parameter: Plant Line Value: 35A19
  misc_feature: MA Experiment 108523 PARAMETER Experiment Name: Zm_42deg_Heat_P Parameter: Temperature (deg C) Value: 42 vs. 22
  misc_feature: MA Experiment 108523 PARAMETER Experiment Name: Zm_42deg_Heat_P Parameter: Timepoint (hr) Value: 6
  misc_feature: MA Experiment 108523 PARAMETER Experiment Name: Zm_42deg_Heat_P Parameter: Tissue Value: Aerial
  misc_feature: MA Experiment ID: 108527 Result: Down-regulated in Transcription
  misc_feature: MA Experiment 108527 PARAMETER Experiment Name: Zm_5mM_NO_P Parameter: Age (day) Value: 8
  misc_feature: MA Experiment 108527 PARAMETER Experiment Name: Zm_5mM_NO_P Parameter: Organism Value: Zea mays
  misc_feature: MA Experiment 108527 PARAMETER Experiment Name: Zm_5mM_NO_P Parameter: Plant Line Value: 35A19
  misc_feature: MA Experiment 108527 PARAMETER Experiment Name: Zm_5mM_NO_P Parameter: Timepoint (hr) Value: 6
  misc_feature: MA Experiment 108527 PARAMETER Experiment Name: Zm_5mM_NO_P Parameter: Tissue Value: Aerial
  misc_feature: MA Experiment 108527 PARAMETER Experiment Name: Zm_5mM_NO_P Parameter: Treatment Value: 5mM NO vs. No Treatment
  misc_feature: MA Experiment ID: 108528 Result: Up-regulated in Transcription
  misc_feature: MA Experiment 108528 PARAMETER Experiment Name: Zm_Imbibed_Seeds_P Parameter: Age (day) Value: 5 vs. 2
  misc_feature: MA Experiment 108528 PARAMETER Experiment Name: Zm_Imbibed_Seeds_P Parameter: Organism Value: Zea mays
  misc_feature: MA Experiment 108528 PARAMETER Experiment Name: Zm_Imbibed_Seeds_P Parameter: Plant Line Value: 35A19
  misc_feature: MA Experiment 108528 PARAMETER Experiment Name: Zm_Imbibed_Seeds_P Parameter: Tissue Value: Aerial vs. Embryo
  misc_feature: MA Experiment ID: 108529 Result: Up-regulated in Transcription
  misc_feature: MA Experiment 108529 PARAMETER Experiment Name: Zm_Imbibed_Seeds_P Parameter: Age (day) Value: 5 vs. 2
  misc_feature: MA Experiment 108529 PARAMETER Experiment Name: Zm_Imbibed_Seeds_P Parameter: Organism Value: Zea mays
  misc_feature: MA Experiment 108529 PARAMETER Experiment Name: Zm_Imbibed_Seeds_P Parameter: Plant Line Value: 35A19
  misc_feature: MA Experiment 108529 PARAMETER Experiment Name: Zm_Imbibed_Seeds_P Parameter: Tissue Value: Roots vs. Embryo
  misc_feature: MA Experiment ID: 108530 Result: Up-regulated in Transcription
  misc_feature: MA Experiment 108530 PARAMETER Experiment Name: Zm_Imbibed_Seeds_P Parameter: Age (day) Value: 6 vs. 2
  misc_feature: MA Experiment 108530 PARAMETER Experiment Name: Zm_Imbibed_Seeds_P Parameter: Organism Value: Zea mays
  misc_feature: MA Experiment 108530 PARAMETER Experiment Name: Zm_Imbibed_Seeds_P Parameter: Plant Line Value: 35A19
  misc_feature: MA Experiment 108530 PARAMETER Experiment Name: Zm_Imbibed_Seeds_P Parameter: Tissue Value: Aerial vs. Embryo
  misc_feature: MA Experiment ID: 108546 Result: Up-regulated in Transcription
  misc_feature: MA Experiment 108546 PARAMETER Experiment Name: Zm_Imbibed_Seeds_P Parameter: Age (day) Value: 3 vs. 2
  misc_feature: MA Experiment 108546 PARAMETER Experiment Name: Zm_Imbibed_Seeds_P Parameter: Organism Value: Zea mays
  misc_feature: MA Experiment 108546 PARAMETER Experiment Name: Zm_Imbibed_Seeds_P Parameter: Plant Line Value: 35A19
  misc_feature: MA Experiment 108546 PARAMETER Experiment Name: Zm_Imbibed_Seeds_P Parameter: Tissue Value: Roots vs. Embryo
  misc_feature: MA Experiment ID: 108547 Result: Up-regulated in Transcription
  misc_feature: MA Experiment 108547 PARAMETER Experiment Name: Zm_Imbibed_Seeds_P Parameter: Age (day) Value: 4 vs. 2
  misc_feature: MA Experiment 108547 PARAMETER Experiment Name: Zm_Imbibed_Seeds_P Parameter: Organism Value: Zea mays
  misc_feature: MA Experiment 108547 PARAMETER Experiment Name: Zm_Imbibed_Seeds_P Parameter: Plant Line Value: 35A19
  misc_feature: MA Experiment 108547 PARAMETER Experiment Name: Zm_Imbibed_Seeds_P Parameter: Tissue Value: Aerial vs. Embryo
  misc_feature: MA Experiment ID: 108556 Result: Down-regulated in Transcription
  misc_feature: MA Experiment 108556 PARAMETER Experiment Name: Zm_Drought_P Parameter: Age (day) Value: 9
  misc_feature: MA Experiment 108556 PARAMETER Experiment Name: Zm_Drought_P Parameter: Organism Value: Zea mays
  misc_feature: MA Experiment 108556 PARAMETER Experiment Name: Zm_Drought_P Parameter: Plant Line Value: 35A19
  misc_feature: MA Experiment 108556 PARAMETER Experiment Name: Zm_Drought_P Parameter: Timepoint (hr) Value: 24
  misc_feature: MA Experiment 108556 PARAMETER Experiment Name: Zm_Drought_P Parameter: Tissue Value: Aerial
  misc_feature: MA Experiment 108556 PARAMETER Experiment Name: Zm_Drought_P Parameter: Treatment Value: Drought vs. No Drought
  misc_feature: MA Experiment ID: 108559 Result: Down-regulated in Transcription
  misc_feature: MA Experiment 108559 PARAMETER Experiment Name: Zm_5mM_NO_P Parameter: Age (day) Value: 8
  misc_feature: MA Experiment 108559 PARAMETER Experiment Name: Zm_5mM_NO_P Parameter: Organism Value: Zea mays
  misc_feature: MA Experiment 108559 PARAMETER Experiment Name: Zm_5mM_NO_P Parameter: Plant Line Value: 35A19
  misc_feature: MA Experiment 108559 PARAMETER Experiment Name: Zm_5mM_NO_P Parameter: Timepoint (hr) Value: 12
  misc_feature: MA Experiment 108559 PARAMETER Experiment Name: Zm_5mM_NO_P Parameter: Tissue Value: Aerial
  misc_feature: MA Experiment 108559 PARAMETER Experiment Name: Zm_5mM_NO_P Parameter: Treatment Value: 5mM NO vs. No Treatment
  misc_feature: MA Experiment ID: 108597 Result: Down-regulated in Transcription
  misc_feature: MA Experiment 108597 PARAMETER Experiment Name: Zm_100uM_ABA_P Parameter: Age (day) Value: 9
  misc_feature: MA Experiment 108597 PARAMETER Experiment Name: Zm_100uM_ABA_P Parameter: Organism Value: Zea mays
  misc_feature: MA Experiment 108597 PARAMETER Experiment Name: Zm_100uM_ABA_P Parameter: Plant Line Value: 35A19
  misc_feature: MA Experiment 108597 PARAMETER Experiment Name: Zm_100uM_ABA_P Parameter: Timepoint (hr) Value: 24
  misc_feature: MA Experiment 108597 PARAMETER Experiment Name: Zm_100uM_ABA_P Parameter: Tissue Value: Aerial
  misc_feature: MA Experiment 108597 PARAMETER Experiment Name: Zm_100uM_ABA_P Parameter: Treatment Value: 100uM ABA vs. No Treatment
  misc_feature: MA Experiment ID: 108689 Result: Down-regulated in Transcription
  misc_feature: MA Experiment 108689 PARAMETER Experiment Name: Zm_Drought_Roots_P Parameter: Age (day) Value: 9
  misc_feature: MA Experiment 108689 PARAMETER Experiment Name: Zm_Drought_Roots_P Parameter: Organism Value: Zea mays
  misc_feature: MA Experiment 108689 PARAMETER Experiment Name: Zm_Drought_Roots_P Parameter: Plant Line Value: 35A19
  misc_feature: MA Experiment 108689 PARAMETER Experiment Name: Zm_Drought_Roots_P Parameter: Timepoint (hr) Value: 24
  misc_feature: MA Experiment 108689 PARAMETER Experiment Name: Zm_Drought_Roots_P Parameter: Tissue Value: Roots
  misc_feature: MA Experiment 108689 PARAMETER Experiment Name: Zm_Drought_Roots_P Parameter: Treatment Value: Drought vs. No Drought
  misc_feature: MA Experiment ID: 20000488 Result: Down-regulated in Transcription
  misc_feature: MA Experiment 20000488 PARAMETER Experiment Name: Zm_50mM_NH4NO3_L_to_H_P Parameter: Organism Value: Zea mays
  misc_feature: MA Experiment 20000488 PARAMETER Experiment Name: Zm_50mM_NH4NO3_L_to_H_P Parameter: Timepoint (hr) Value: 8
  misc_feature: MA Experiment 20000488 PARAMETER Experiment Name: Zm_50mM_NH4NO3_L_to_H_P Parameter: Tissue Value: Leaves
  misc_feature: MA Experiment 20000488 PARAMETER Experiment Name: Zm_50mM_NH4NO3_L_to_H_P Parameter: Treatment Value: 50mM NH4NO3 vs. 100mM Mannitol
  misc_feature: MA Experiment ID: 20000626 Result: Down-regulated in Transcription
  misc_feature: MA Experiment 20000626 PARAMETER Experiment Name: Zm_Herbicide-Treatments_P Parameter: Timepoint (hr) Value: 12
  misc_feature: MA Experiment 20000626 PARAMETER Experiment Name: Zm_Herbicide-Treatments_P Parameter: Tissue Value: Aerial
  misc_feature: MA Experiment 20000626 PARAMETER Experiment Name: Zm_Herbicide-Treatments_P Parameter: Treatment Value: Roundup vs. No Treatment
  misc_feature: MA Experiment ID: 20000630 Result: Down-regulated in Transcription
  misc_feature: MA Experiment 20000630 PARAMETER Experiment Name: Zm_Herbicide-Treatments_P Parameter: Timepoint (hr) Value: 4
  misc_feature: MA Experiment 20000630 PARAMETER Experiment Name: Zm_Herbicide-Treatments_P Parameter: Tissue Value: Aerial
  misc_feature: MA Experiment 20000630 PARAMETER Experiment Name: Zm_Herbicide-Treatments_P Parameter: Treatment Value: Roundup vs. No Treatment
gcacgagaccattacctagaacatcctaatcgaaaaaggagcagtgagaactgcatgcaagaggcacaaagcagcagctagcagttcattcaggttagtcatcagaggtgacatcgctctggaactggaagacaagcagcaggaagacagagagatcaatggcagcgcaaggtgctggagcatcagcttctcccctgtccggcttccacgtggcgctgctcctcctcctcactatcttggcttccatccttgcaagggcggcgtcggtgggcgtgtgctacggcacgagcggcgacaacctgccgccggcgagcgcggtggtgggcatgctgcgcgacaacggcttcacggtggtgcggctctactggcccgacggcgacgcgctggcggcgctgggcgggagcgggatccgggtggtggtgggcgcgcccaacgaggccctgccggcgctggcgtccggcgcggccgcggccgcggcgtgggtccgcgacaacgtgcaggcgcacccggcggtggcgttccgctacgtggtggtgggcaacgaggtccccctggagcaggcgccgctgctcgtgccggccatggagaacgtgcacgcggcgctggcggccgccgggctgggccacgtgaaggtcaccacggccgtctcgcagggcgccatcgccgtgcacctgcctccgtcggtgggcgagttcacggaggaggcccgctcgttcatgggctacgtggtgacgttcctggcgcggacccgcgcgccgctgctcgccaacctgtacccctacttcgtctacacgctggggctgggccacctgggcatggacttcgcgctgttcacggcgcccgggacggtggtgcaggacggggagtacgggtaccagaacctgttcgacgccacggtggacgcgctgtacgcggcggtggggaggctcggcgtcgccggcggggacggcgtcagggtggtggtgtcggagaccgggtggccgacggcgggcggcgccgcagcgtcgctggagaacgccaggacgtacaaccagaacctggtgaggcacgtgtggaagggcacgccgcggaggcccaggagggtggaggcatacgtgttcgccatgttcaacgaggacaagaaggacgccggagtggagcagaactggggcctcttctacccgaacatggagagggtttaccccatcacctttggagccggacggcgacactgacgacattatagaaggagcttggtggacgacgaccggtgcattgcatgcaatgatcgaatttgcactcgaccgatccaagaaatgaatacgtactggggtcatggtgtgtgtgttttatttgcgtgtacacagcattcaatgtacaatatatagaggaattgttgcgaccgctgagcgtttgtttgctcanacgtgtacgcggagaggggtcgatgcgtagctgggtctgggtgtacgtaaacgtcatgcgtagcagtatgcacaagcgtatgtacattccgtgactcttgtgagctatatacttgtgaatttgtg

SEQ ID NO: 17032 - protein, 351 aa, Zea mays subsp. mays
  peptide (1)..(351): Ceres Seq. ID no. 12362524
  misc_feature (37)..(345): Pfam Name: Glycosyl hydrolases family 17 Pfam Description: Glycosyl hydrolases family 17
  misc_feature (36)..(345): Homolog of NCBI NO: 840908 NR Description: beta glucanase [Triticum aestivum]
  misc_feature (28)..(345): Homolog of NCBI NO: 100592 NR Description: licheninase (EC 3.2.1.73) isoenzyme EIb precursor
  misc_feature (20)..(345): Homolog of NCBI NO: 228411 NR Description: beta glucanase:ISOTYPE=II
  misc_feature (19)..(345): Homolog of NCBI NO: 486849 NR Description: licheninase (EC 3.2.1.73) precursor - wheat
  misc_feature (18)..(345): Homolog of NCBI NO: 100591 NR Description: licheninase (EC 3.2.1.73) I precursor, splice
  misc_feature (19)..(345): Homolog of NCBI NO: 288654 NR Description: (1-3, 1-4)-beta-glucanase [Avena sativa]
  misc_feature (19)..(345): Homolog of NCBI NO: 854361 NR Description: beta-glucanase [Oryza sativa (japonica
  misc_feature (19)..(345): Homolog of NCBI NO: 100664 NR Description: beta-glucanase - rice
  misc_feature (19)..(345): Homolog of NCBI NO: 13249140 NR Description: glucanase [Oryza sativa]
  misc_feature (35)..(347): Homolog of NCBI NO: 34906536 NR Description: similar to glucanase [Oryza sativa (japonica
MAAQGAGASASPLSGFHVALLLLLTILASILARAASVGVCYGTSGDNLPPASAVVGMLRDNGFTVVRLYWPDGDALAALGGSGIRVVVGAPNEALPALASGAAAAAAWVRDNVQAHPAVAFRYVVVGNEVPLEQAPLLVPAMENVHAALAAAGLGHVKVTTAVSQGAIAVHLPPSVGEFTEEARSFMGYVVTFLARTRAPLLANLYPYFVYTLGLGHLGMDFALFTAPGTVVQDGEYGYQNLFDATVDALYAAVGRLGVAGGDGVRVVVSETGWPTAGGAAASLENARTYNQNLVRHVWKGTPRRPRRVEAYVFAMFNEDKKDAGVEQNWGLFYPNMERVYPITFGAGRRH

SEQ ID NO: 17033 - protein, 295 aa, Zea mays subsp. mays
  peptide (1)..(295): Ceres Seq. ID no. 12362525
  misc_feature (1)..(289): Pfam Name: Glycosyl hydrolases family 17 Pfam Description: Glycosyl hydrolases family 17
  misc_feature (1)..(289): Homolog of NCBI NO: 100664 NR Description: beta-glucanase - rice
  misc_feature (1)..(289): Homolog of NCBI NO: 13249140 NR Description: glucanase [Oryza sativa]
  misc_feature (1)..(289): Homolog of NCBI NO: 100592 NR Description: licheninase (EC 3.2.1.73) isoenzyme EIb precursor
  misc_feature (1)..(289): Homolog of NCBI NO: 486849 NR Description: licheninase (EC 3.2.1.73) precursor - wheat
  misc_feature (1)..(289): Homolog of NCBI NO: 288654 NR Description: (1-3, 1-4)-beta-glucanase [Avena sativa]
  misc_feature (1)..(289): Homolog of NCBI NO: 854361 NR Description: beta-glucanase [Oryza sativa (japonica
  misc_feature (1)..(289): Homolog of NCBI NO: 100591 NR Description: licheninase (EC 3.2.1.73) I precursor, splice
  misc_feature (1)..(289): Homolog of NCBI NO: 228411 NR Description: beta glucanase:ISOTYPE=II
  misc_feature (1)..(289): Homolog of NCBI NO: 840908 NR Description: beta glucanase [Triticum aestivum]
  misc_feature (1)..(291): Homolog of NCBI NO: 34906536 NR Description: similar to glucanase [Oryza sativa (japonica
MLRDNGFTVVRLYWPDGDALAALGGSGIRVVVGAPNEALPALASGAAAAAAWVRDNVQAHPAVAFRYVVVGNEVPLEQAPLLVPAMENVHAALAAAGLGHVKVTTAVSQGAIAVHLPPSVGEFTEEARSFMGYVVTFLARTRAPLLANLYPYFVYTLGLGHLGMDFALFTAPGTVVQDGEYGYQNLFDATVDALYAAVGRLGVAGGDGVRVVVSETGWPTAGGAAASLENARTYNQNLVRHVWKGTPRRPRRVEAYVFAMFNEDKKDAGVEQNWGLFYPNMERVYPITFGAGRRH

SEQ ID NO: 17034 - protein, 210 aa, Zea mays subsp. mays
  peptide (1)..(210): Ceres Seq. ID no. 12362526
  misc_feature (1)..(204): Pfam Name: Glycosyl hydrolases family 17 Pfam Description: Glycosyl hydrolases family 17
  misc_feature (1)..(204): Homolog of NCBI NO: 840908 NR Description: beta glucanase [Triticum aestivum]
  misc_feature (1)..(204): Homolog of NCBI NO: 100592 NR Description: licheninase (EC 3.2.1.73) isoenzyme EIb precursor
  misc_feature (1)..(204): Homolog of NCBI NO: 228411 NR Description: beta glucanase:ISOTYPE=II
  misc_feature (1)..(204): Homolog of NCBI NO: 486849 NR Description: licheninase (EC 3.2.1.73) precursor - wheat
  misc_feature (1)..(204): Homolog of NCBI NO: 100591 NR Description: licheninase (EC 3.2.1.73) I precursor, splice
  misc_feature (1)..(204): Homolog of NCBI NO: 288654 NR Description: (1-3, 1-4)-beta-glucanase [Avena sativa]
  misc_feature (1)..(204): Homolog of NCBI NO: 854361 NR Description: beta-glucanase [Oryza sativa (japonica
  misc_feature (1)..(204): Homolog of NCBI NO: 100664 NR Description: beta-glucanase - rice
  misc_feature (1)..(204): Homolog of NCBI NO: 13249140 NR Description: glucanase [Oryza sativa]
  misc_feature (1)..(206): Homolog of NCBI NO: 34906536 NR Description: similar to glucanase [Oryza sativa (japonica
MENVHAALAAAGLGHVKVTTAVSQGAIAVHLPPSVGEFTEEARSFMGYVVTFLARTRAPLLANLYPYFVYTLGLGHLGMDFALFTAPGTVVQDGEYGYQNLFDATVDALYAAVGRLGVAGGDGVRVVVSETGWPTAGGAAASLENARTYNQNLVRHVWKGTPRRPRRVEAYVFAMFNEDKKDAGVEQNWGLFYPNMERVYPITFGAGRRH

SEQ ID NO: 17035 - DNA, 832 bp, Zea mays subsp. mays
  misc_feature (1)..(832): Ceres Seq. ID no. 12355032
  misc_feature: MA Experiment ID: 108523 Result: Down-regulated in Transcription
  misc_feature: MA Experiment 108523 PARAMETER Experiment Name: Zm_42deg_Heat_P Parameter: Age (day) Value: 8
  misc_feature: MA Experiment 108523 PARAMETER Experiment Name: Zm_42deg_Heat_P Parameter: Organism Value: Zea mays
  misc_feature: MA Experiment 108523 PARAMETER Experiment Name: Zm_42deg_Heat_P Parameter: Plant Line Value: 35A19
  misc_feature: MA Experiment 108523 PARAMETER Experiment Name: Zm_42deg_Heat_P Parameter: Temperature (deg C) Value: 42 vs. 22
  misc_feature: MA Experiment 108523 PARAMETER Experiment Name: Zm_42deg_Heat_P Parameter: Timepoint (hr) Value: 6
  misc_feature: MA Experiment 108523 PARAMETER Experiment Name: Zm_42deg_Heat_P Parameter: Tissue Value: Aerial
  misc_feature: MA Experiment ID: 108527 Result: Down-regulated in Transcription
  misc_feature: MA Experiment 108527 PARAMETER Experiment Name: Zm_5mM_NO_P Parameter: Age (day) Value: 8
  misc_feature: MA Experiment 108527 PARAMETER Experiment Name: Zm_5mM_NO_P Parameter: Organism Value: Zea mays
  misc_feature: MA Experiment 108527 PARAMETER Experiment Name: Zm_5mM_NO_P Parameter: Plant Line Value: 35A19
  misc_feature: MA Experiment 108527 PARAMETER Experiment Name: Zm_5mM_NO_P Parameter: Timepoint (hr) Value: 6
  misc_feature: MA Experiment 108527 PARAMETER Experiment Name: Zm_5mM_NO_P Parameter: Tissue Value: Aerial
  misc_feature: MA Experiment 108527 PARAMETER Experiment Name: Zm_5mM_NO_P Parameter: Treatment Value: 5mM NO vs. No Treatment
  misc_feature: MA Experiment ID: 108528 Result: Up-regulated in Transcription
  misc_feature: MA Experiment 108528 PARAMETER Experiment Name: Zm_Imbibed_Seeds_P Parameter: Age (day) Value: 5 vs. 2
  misc_feature: MA Experiment 108528 PARAMETER Experiment Name: Zm_Imbibed_Seeds_P Parameter: Organism Value: Zea mays
  misc_feature: MA Experiment 108528 PARAMETER Experiment Name: Zm_Imbibed_Seeds_P Parameter: Plant Line Value: 35A19
  misc_feature: MA Experiment 108528 PARAMETER Experiment Name: Zm_Imbibed_Seeds_P Parameter: Tissue Value: Aerial vs. Embryo
  misc_feature: MA Experiment ID: 108530 Result: Up-regulated in Transcription
  misc_feature: MA Experiment 108530 PARAMETER Experiment Name: Zm_Imbibed_Seeds_P Parameter: Age (day) Value: 6 vs. 2
  misc_feature: MA Experiment 108530 PARAMETER Experiment Name: Zm_Imbibed_Seeds_P Parameter: Organism Value: Zea mays
  misc_feature: MA Experiment 108530 PARAMETER Experiment Name: Zm_Imbibed_Seeds_P Parameter: Plant Line Value: 35A19
  misc_feature: MA Experiment 108530 PARAMETER Experiment Name: Zm_Imbibed_Seeds_P Parameter: Tissue Value: Aerial vs. Embryo
  misc_feature: MA Experiment ID: 108536 Result: Down-regulated in Transcription
  misc_feature: MA Experiment 108536 PARAMETER Experiment Name: Zm_Meristem_P Parameter: Age (day) Value: 8
  misc_feature: MA Experiment 108536 PARAMETER Experiment Name: Zm_Meristem_P Parameter: Organism Value: Zea mays
  misc_feature: MA Experiment 108536 PARAMETER Experiment Name: Zm_Meristem_P Parameter: Plant Line Value: 35A19
  misc_feature: MA Experiment 108536 PARAMETER Experiment Name: Zm_Meristem_P Parameter: Tissue Value: Shoot Meristem vs. Above Shoot Meristem
  misc_feature: MA Experiment ID: 108545 Result: Up-regulated in Transcription
  misc_feature: MA Experiment 108545 PARAMETER Experiment Name: Zm_Imbibed_Seeds_P Parameter: Age (day) Value: 3 vs. 2
  misc_feature: MA Experiment 108545 PARAMETER Experiment Name: Zm_Imbibed_Seeds_P Parameter: Organism Value: Zea mays
  misc_feature: MA Experiment 108545 PARAMETER Experiment Name: Zm_Imbibed_Seeds_P Parameter: Plant Line Value: 35A19
  misc_feature: MA Experiment 108545 PARAMETER Experiment Name: Zm_Imbibed_Seeds_P Parameter: Tissue Value: Aerial vs. Embryo
  misc_feature: MA Experiment ID: 108547 Result: Up-regulated in Transcription
  misc_feature: MA Experiment 108547 PARAMETER Experiment Name: Zm_Imbibed_Seeds_P Parameter: Age (day) Value: 4 vs. 2
  misc_feature: MA Experiment 108547 PARAMETER Experiment Name: Zm_Imbibed_Seeds_P Parameter: Organism Value: Zea mays
  misc_feature: MA Experiment 108547 PARAMETER Experiment Name: Zm_Imbibed_Seeds_P Parameter: Plant Line Value: 35A19
  misc_feature: MA Experiment 108547 PARAMETER Experiment Name: Zm_Imbibed_Seeds_P Parameter: Tissue Value: Aerial vs. Embryo
  misc_feature: MA Experiment ID: 108687 Result: Down-regulated in Transcription
  misc_feature: MA Experiment 108687 PARAMETER Experiment Name: Zm_Embryos-Flowers__P Parameter: Tissue Value: Embryo vs. Aerial+
  misc_feature: MA Experiment ID: 108688 Result: Down-regulated in Transcription
  misc_feature: MA Experiment 108688 PARAMETER Experiment Name: Zm_Embryos-Flowers__P Parameter: Tissue Value: Immature Flowers vs. Aerial+
  misc_feature: MA Experiment ID: 20000534 Result: Down-regulated in Transcription
  misc_feature: MA Experiment 20000534 PARAMETER Experiment Name: Zm_Hybrid_Pollen_P Parameter: Age (day) Value: 8
  misc_feature: MA Experiment 20000534 PARAMETER Experiment Name: Zm_Hybrid_Pollen_P Parameter: Organism Value: Zea mays
  misc_feature: MA Experiment 20000534 PARAMETER Experiment Name: Zm_Hybrid_Pollen_P Parameter: Plant Line Value: 35A19
  misc_feature: MA Experiment 20000534 PARAMETER Experiment Name: Zm_Hybrid_Pollen_P Parameter: Tissue Value: Pollen vs. Aerial
gtgattagcaagcacgggcacggtaaagcagagagcctcttgctgttagtgaactaaggcgacggagaccgcgagggcggcgaactaggctgggcagcgatgatggcgacctcggccagcggcgtctccctcctcctcctcctcgcccatccggcgccgccaccgcaccccgccaacggcgccagcagcctgtggcgcggcggtggcgccgcgctagctcctcatcctgctcgcttcgcggccaagaggaggacgctccggttggttaacgtcagcgtcagctgcagcgccgaggcgctgcgctccgacggcgctggcgcggagccggcggtgccgcggtctgtgccggtgcgcgtcgcctacgagctgcaacaggccggccaccgctacctcgacgtcagaacggagggcgagtttagcgccggccaccctgaaggagctgtgaacatcccatacatgaacaaaaccggctcaggaatgacgaaaaacgctcactttctcgagcaagtgtcgagggctttcgggaaggacgacgagatcatcgtgggctgccaaagcggcaagaggtctctcatggcggcgaccgagctctgctccgctggcttcaccgctgtcaccgacatcgccggcggattctcgacctggagggagaacgagctgcctaccgtccagtgacggtgatttcagcctgcctcgccggcgtcgtaagtgtggttggagcttgcccagcgttttctgtccaagcctgtacatatgtcttcctgccttctgctatagttctggaataaagagtgctggggaatggaatggagcatgttgtaaagtaaagctc

SEQ ID NO: 17036 - protein, 191 aa, Zea mays subsp. mays
  peptide (1)..(191): Ceres Seq. ID no. 12355033
  misc_feature (82)..(185): Pfam Name: Rhodanese-like domain Pfam Description: Rhodanese-like domain
  misc_feature (69)..(188): Homolog of NCBI NO: 18425042 NR Description: senescence-associated protein
  misc_feature (75)..(185): Homolog of NCBI NO: 2129628 NR Description: ketoconazole resistance protein - Arabidopsis
  misc_feature (75)..(189): Homolog of NCBI NO: 30698182 NR Description: senescence-associated protein [Arabidopsis
  misc_feature (77)..(188): Homolog of NCBI NO: 7340289 NR Description: OP1 [Cucumis sativus]
  misc_feature (68)..(188): Homolog of NCBI NO: 1046268 NR Description: senescence-associated protein [Arabidopsis
  misc_feature (68)..(188): Homolog of NCBI NO: 21537402 NR Description: senescence-associated protein sen1 [Arabidopsis
  misc_feature (68)..(188): Homolog of NCBI NO: 15233328 NR Description: senescence-associated protein sen1
  misc_feature (72)..(188): Homolog of NCBI NO: 118636 NR Description: Senescence-associated protein DIN1
  misc_feature (68)..(188): Homolog of NCBI NO: 7488606 NR Description: senescence-associated protein din1,
  misc_feature (49)..(189): Homolog of NCBI NO: 7594903 NR Description: Ntdin [Nicotiana tabacum]
MMATSASGVSLLLLLAHPAPPPHPANGASSLWRGGGAALAPHPARFAAKRRTLRLVNVSVSCSAEALRSDGAGAEPAVPRSVPVRVAYELQQAGHRYLDVRTEGEFSAGHPEGAVNIPYMNKTGSGMTKNAHFLEQVSRAFGKDDEIIVGCQSGKRSLMAATELCSAGFTAVTDIAGGFSTWRENELPTVQ

SEQ ID NO: 17037 - protein, 190 aa, Zea mays subsp. mays
  peptide (1)..(190): Ceres Seq. ID no. 12355034
  misc_feature (81)..(184): Pfam Name: Rhodanese-like domain Pfam Description: Rhodanese-like domain
  misc_feature (68)..(187): Homolog of NCBI NO: 18425042 NR Description: senescence-associated protein
  misc_feature (74)..(184): Homolog of NCBI NO: 2129628 NR Description: ketoconazole resistance protein - Arabidopsis
  misc_feature (74)..(188): Homolog of NCBI NO: 30698182 NR Description: senescence-associated protein [Arabidopsis
  misc_feature (76)..(187): Homolog of NCBI NO: 7340289 NR Description: OP1 [Cucumis sativus]
  misc_feature (67)..(187): Homolog of NCBI NO: 1046268 NR Description: senescence-associated protein [Arabidopsis
  misc_feature (67)..(187): Homolog of NCBI NO: 21537402 NR Description: senescence-associated protein sen1 [Arabidopsis
  misc_feature (67)..(187): Homolog of NCBI NO: 15233328 NR Description: senescence-associated protein sen1
  misc_feature (71)..(187): Homolog of NCBI NO: 118636 NR Description: Senescence-associated protein DIN1
  misc_feature (67)..(187): Homolog of NCBI NO: 7488606 NR Description: senescence-associated protein din1,
  misc_feature (48)..(188): Homolog of NCBI NO: 7594903 NR Description: Ntdin [Nicotiana tabacum]
MATSASGVSLLLLLAHPAPPPHPANGASSLWRGGGAALAPHPARFAAKRRTLRLVNVSVSCSAEALRSDGAGAEPAVPRSVPVRVAYELQQAGHRYLDVRTEGEFSAGHPEGAVNIPYMNKTGSGMTKNAHFLEQVSRAFGKDDEIIVGCQSGKRSLMAATELCSAGFTAVTDIAGGFSTWRENELPTVQ

SEQ ID NO: 17038 - DNA, 1781 bp, Zea mays subsp. mays
  misc_feature (1)..(1781): Ceres Seq. ID no. 15175813
  misc_feature: MA Experiment ID: 108522 Result: Up-regulated in Transcription
  misc_feature: MA Experiment 108522 PARAMETER Experiment Name: Zm_42deg_Heat_P Parameter: Age (day) Value: 8
  misc_feature: MA Experiment 108522 PARAMETER Experiment Name: Zm_42deg_Heat_P Parameter: Organism Value: Zea mays
  misc_feature: MA Experiment 108522 PARAMETER Experiment Name: Zm_42deg_Heat_P Parameter: Plant Line Value: 35A19
  misc_feature: MA Experiment 108522 PARAMETER Experiment Name: Zm_42deg_Heat_P Parameter: Temperature (deg C) Value: 42 vs. 22
  misc_feature: MA Experiment 108522 PARAMETER Experiment Name: Zm_42deg_Heat_P Parameter: Timepoint (hr) Value: 1
  misc_feature: MA Experiment 108522 PARAMETER Experiment Name: Zm_42deg_Heat_P Parameter: Tissue Value: Aerial
  misc_feature: MA Experiment ID: 108530 Result: Up-regulated in Transcription
  misc_feature: MA Experiment 108530 PARAMETER Experiment Name: Zm_Imbibed_Seeds_P Parameter: Age (day) Value: 6 vs. 2
  misc_feature: MA Experiment 108530 PARAMETER Experiment Name: Zm_Imbibed_Seeds_P Parameter: Organism Value: Zea mays
  misc_feature: MA Experiment 108530 PARAMETER Experiment Name: Zm_Imbibed_Seeds_P Parameter: Plant Line Value: 35A19
  misc_feature: MA Experiment 108530 PARAMETER Experiment Name: Zm_Imbibed_Seeds_P Parameter: Tissue Value: Aerial vs. Embryo
  misc_feature: MA Experiment ID: 108535 Result: Down-regulated in Transcription
  misc_feature: MA Experiment 108535 PARAMETER Experiment Name: Zm_Meristem_P Parameter: Age (day) Value: 8
  misc_feature: MA Experiment 108535 PARAMETER Experiment Name: Zm_Meristem_P Parameter: Organism Value: Zea mays
  misc_feature: MA Experiment 108535 PARAMETER Experiment Name: Zm_Meristem_P Parameter: Plant Line Value: 35A19
  misc_feature: MA Experiment 108535 PARAMETER Experiment Name: Zm_Meristem_P Parameter: Tissue Value: Root Meristem vs. Above Root Meristem
  misc_feature: MA Experiment ID: 108536 Result: Up-regulated in Transcription
  misc_feature: MA Experiment 108536 PARAMETER Experiment Name: Zm_Meristem_P Parameter: Age (day) Value: 8
  misc_feature: MA Experiment 108536 PARAMETER Experiment Name: Zm_Meristem_P Parameter: Organism Value: Zea mays
  misc_feature: MA Experiment 108536 PARAMETER Experiment Name: Zm_Meristem_P Parameter: Plant Line Value: 35A19
  misc_feature: MA Experiment 108536 PARAMETER Experiment Name: Zm_Meristem_P Parameter: Tissue Value: Shoot Meristem vs. Above Shoot Meristem
  misc_feature: MA Experiment ID: 108544 Result: Up-regulated in Transcription
  misc_feature: MA Experiment ID: 108687 Result: Down-regulated in Transcription
  misc_feature: MA Experiment 108687 PARAMETER Experiment Name: Zm_Embryos-Flowers__P Parameter: Tissue Value: Embryo vs. Aerial+
  misc_feature: MA Experiment ID: 20000535 Result: Down-regulated in Transcription
  misc_feature: MA Experiment 20000535 PARAMETER Experiment Name: Zm_Hybrid_Seed_Dev_P Parameter: DAP Value: 30 vs. 12
  misc_feature: MA Experiment 20000535 PARAMETER Experiment Name: Zm_Hybrid_Seed_Dev_P Parameter: Organism Value: Zea mays
  misc_feature: MA Experiment 20000535 PARAMETER Experiment Name: Zm_Hybrid_Seed_Dev_P Parameter: Plant Line Value: 35A19
  misc_feature: MA Experiment 20000535 PARAMETER Experiment Name: Zm_Hybrid_Seed_Dev_P Parameter: Tissue Value: Embryo vs. Unfert Floret
acaacactcgtttgcctctcatctcgcttcgcttccattccatcgcgccagtcgccagactcacctgggagagtggggggaaatatcaattagaaacaacgaggaattagcaaagaaagaagaataactcccataagaaaaatcgccaaatacgccattcatcttcttcgcccgggtttcagaacgtacggcagtttagccaggatggtggcgatcgagaaccagagccaggccgcggtggcggcggaggcggtggcggcgccggcgtcgcggatccccagggaggcgcggcgcctgctgcacgagctggcggcggcgtgggcggacgtggccgactgccgcgcgctggaggtcgtgccgctcaagggggccatgaccaacgaggtctaccaggcgcgctggctcactgcaggccctgccggccagaaggaggagcccagggcggagagggaggtgaggaaggtgctcgtgcggatttacggcgacggcgtcgacctcttcttcgaccgcgaggacgaggtgcgcaccttcgagtgcatgtcacgccatggccagggtccccgcctcctcggccgctttccgaacggccgcgtcgaggagttcatccacgcaaggacattgtcagctgccgaccttcgcgatcctgaaatttcagctctggtggcttccaagctgagggagttccacaaccttgacatgcctggtcccaaatctgtgctcatttgggacagacttaggaactggctcagaactgccaagagcttgtgtccacctgaagaagccaaggaatttcggttggacagtctggagaaccagattactgcattggagaacgagtgttcaggtgattaccagtggattggtttctgtcacaatgatcttcagtatggcaatatcatgattgatgaagagaccaacgtgctgaccatcattgattatgagtatgcaagcttcaacccagttgcatatgacattgctaaccatttctgtgagatggcagcagactatcattcatcaaagcctcatatactggactacagcagatatccagatgttgatgagcagaagcgttttgttaagacctacctgaacatttctggtgaggaacctgatgcggaagttgtggagaacctgctccaaagcattgagaagcacacgctcgccagccatctagtatggggcctctggggaataatttcggaccatgttaacgacattgacttcgactacaaggagtatgcgaggcagagattcgagcagtactggcacaagtctgcgatcttaacatcttgaacatgtgtataaacacccgtacgtggtctcaggaactccctgagggcctgtggctgcacacacgaaattgtgcagtgccactgacacatagataagctgtgaaagaagaaatactgacgacgacgacgaataatcccgttttgggctcgggaggttatttctccgcaactcgatgagcttcaggcttcagcttcaggaaggaaggaaggagctatggggatttggctgcccgcttatgctgtaccaatgcaattaaaagataaagatccggtccggtgttgcgtgtgctatgtttagttttggctagcaccgccgagagccgtggtcctgttgtggtgtttctagtttctgtatgcttgatgttgttagtgtgctggataatttggttttgtgcttggggagtccttagctttgggacaacgcatacattgtatactgggtagatgtataaacataaaacagctatgggaatttggttctctaccttg

SEQ ID NO: 17039 - protein, 362 aa, Zea mays subsp. mays
  peptide (1)..(362): Ceres Seq. ID no. 15175814
  misc_feature (83)..(344): Pfam Name: Choline/ethanolamine kinase Pfam Description: Choline/ethanolamine kinase
  misc_feature (97)..(354): Homolog of NCBI NO: 15218502 NR Description: choline kinase (GmCK2p) -related [Arabidopsis
  misc_feature (20)..(362): Homolog of NCBI NO: 15234032 NR Description: choline kinase GmCK2p -related protein
  misc_feature (27)..(360): Homolog of NCBI NO: 12311795 NR Description: choline kinase [Pisum sativum]
  misc_feature (11)..(360): Homolog of NCBI NO: 15217543 NR Description: choline kinase -related [Arabidopsis thaliana]
  misc_feature (27)..(362): Homolog of NCBI NO: 7488653 NR Description: choline kinase (EC 2.7.1.32) CK2 - soybean
  misc_feature (23)..(354): Homolog of NCBI NO: 25348157 NR Description: protein choline kinase F1O17.1 [imported] -
  misc_feature (23)..(354): Homolog of NCBI NO: 22330627 NR Description: choline kinase -related [Arabidopsis thaliana]
  misc_feature (1)..(360): Homolog of NCBI NO: 7488654 NR Description: choline kinase (EC 2.7.1.32) CK3 - soybean
  misc_feature (1)..(344): Homolog of NCBI NO: 34910612 NR Description: putative choline kinase [Oryza sativa (japonica
  misc_feature (1)..(362): Homolog of NCBI NO: 33149685 NR Description: choline kinase [Oryza sativa (indica
MVAIENQSQAAVAAEAVAAPASRIPREARRLLHELAAAWADVADCRALEVVPLKGAMTNEVYQARWLTAGPAGQKEEPRAEREVRKVLVRIYGDGVDLFFDREDEVRTFECMSRHGQGPRLLGRFPNGRVEEFIHARTLSAADLRDPEISALVASKLREFHNLDMPGPKSVLIWDRLRNWLRTAKSLCPPEEAKEFRLDSLENQITALENECSGDYQWIGFCHNDLQYGNIMIDEETNVLTIIDYEYASFNPVAYDIANHFCEMAADYHSSKPHILDYSRYPDVDEQKRFVKTYLNISGEEPDAEVVENLLQSIEKHTLASHLVWGLWGIISDHVNDIDFDYKEYARQRFEQYWHKSAILTS

SEQ ID NO: 17040 - protein, 306 aa, Zea mays subsp. mays; identical to SEQ ID NO: 9245
  peptide (1)..(306): Ceres Seq. ID no. 15175815
  misc_feature (27)..(288): Pfam Name: Choline/ethanolamine kinase Pfam Description: Choline/ethanolamine kinase
  misc_feature (41)..(298): Homolog of NCBI NO: 15218502 NR Description: choline kinase (GmCK2p) -related [Arabidopsis
  misc_feature (1)..(306): Homolog of NCBI NO: 15234032 NR Description: choline kinase GmCK2p -related protein
  misc_feature (1)..(304): Homolog of NCBI NO: 12311795 NR Description: choline kinase [Pisum sativum]
  misc_feature (1)..(304): Homolog of NCBI NO: 15217543 NR Description: choline kinase -related [Arabidopsis thaliana]
  misc_feature (1)..(306): Homolog of NCBI NO: 7488653 NR Description: choline kinase (EC 2.7.1.32) CK2 - soybean
  misc_feature (1)..(298): Homolog of NCBI NO: 25348157 NR Description: protein choline kinase F1O17.1 [imported] -
  misc_feature (1)..(298): Homolog of NCBI NO: 22330627 NR Description: choline kinase -related [Arabidopsis thaliana]
  misc_feature (1)..(304): Homolog of NCBI NO: 7488654 NR Description: choline kinase (EC 2.7.1.32) CK3 - soybean
  misc_feature (1)..(288): Homolog of NCBI NO: 34910612 NR Description: putative choline kinase [Oryza sativa (japonica
  misc_feature (1)..(306): Homolog of NCBI NO: 33149685 NR Description: choline kinase [Oryza sativa (indica

SEQ ID NO: 17041 - protein, 251 aa, Zea mays subsp. mays
  peptide (1)..(251): Ceres Seq. ID no. 15175816
  misc_feature (1)..(233): Pfam Name: Choline/ethanolamine kinase Pfam Description: Choline/ethanolamine kinase
  misc_feature (1)..(243): Homolog of NCBI NO: 15218502 NR Description: choline kinase (GmCK2p) -related [Arabidopsis
  misc_feature (1)..(251): Homolog of NCBI NO: 15234032 NR Description: choline kinase GmCK2p -related protein
  misc_feature (1)..(249): Homolog of NCBI NO: 12311795 NR Description: choline kinase [Pisum sativum]
  misc_feature (1)..(249): Homolog of NCBI NO: 15217543 NR Description: choline kinase -related [Arabidopsis thaliana]
  misc_feature (1)..(251): Homolog of NCBI NO: 7488653 NR Description: choline kinase (EC 2.7.1.32) CK2 - soybean
  misc_feature (1)..(243): Homolog of NCBI NO: 25348157 NR Description: protein choline kinase F1O17.1 [imported] -
  misc_feature (1)..(243): Homolog of NCBI NO: 22330627 NR Description: choline kinase -related [Arabidopsis thaliana]
  misc_feature (1)..(249): Homolog of NCBI NO: 7488654 NR Description: choline kinase (EC 2.7.1.32) CK3 - soybean
  misc_feature (1)..(233): Homolog of NCBI NO: 34910612 NR Description: putative choline kinase [Oryza sativa (japonica
  misc_feature (1)..(251): Homolog of NCBI NO: 33149685 NR Description: choline kinase [Oryza sativa (indica
MSRHGQGPRLLGRFPNGRVEEFIHARTLSAADLRDPEISALVASKLREFHNLDMPGPKSVLIWDRLRNWLRTAKSLCPPEEAKEFRLDSLENQITALENECSGDYQWIGFCHNDLQYGNIMIDEETNVLTIIDYEYASFNPVAYDIANHFCEMAADYHSSKPHILDYSRYPDVDEQKRFVKTYLNISGEEPDAEVVENLLQSIEKHTLASHLVWGLWGIISDHVNDIDFDYKEYARQRFEQYWHKSAILTS

SEQ ID NO: 17042 - DNA, 1649 bp, Zea mays subsp. mays
  misc_feature (1)..(1649): Ceres Seq. ID no. 15180302
  misc_feature: MA Experiment ID: 108504 Result: Down-regulated in Transcription
  misc_feature: MA Experiment 108504 PARAMETER Experiment Name: Zm_Drought_P Parameter: Age (day) Value: 8
  misc_feature: MA Experiment 108504 PARAMETER Experiment Name: Zm_Drought_P Parameter: Organism Value: Zea mays
  misc_feature: MA Experiment 108504 PARAMETER Experiment Name: Zm_Drought_P Parameter: Plant Line Value: 35A19
  misc_feature: MA Experiment 108504 PARAMETER Experiment Name: Zm_Drought_P Parameter: Timepoint (hr) Value: 12
  misc_feature: MA Experiment 108504 PARAMETER Experiment Name: Zm_Drought_P Parameter: Tissue Value: Aerial
  misc_feature: MA Experiment 108504 PARAMETER Experiment Name: Zm_Drought_P Parameter: Treatment Value: Drought vs. No Drought
  misc_feature: MA Experiment ID: 108527 Result: Up-regulated in Transcription
  misc_feature: MA Experiment 108527 PARAMETER Experiment Name: Zm_5mM_NO_P Parameter: Age (day) Value: 8
  misc_feature: MA Experiment 108527 PARAMETER Experiment Name: Zm_5mM_NO_P Parameter: Organism Value: Zea mays
  misc_feature: MA Experiment 108527 PARAMETER Experiment Name: Zm_5mM_NO_P Parameter: Plant Line Value: 35A19
  misc_feature: MA Experiment 108527 PARAMETER Experiment Name: Zm_5mM_NO_P Parameter: Timepoint (hr) Value: 6
  misc_feature: MA Experiment 108527 PARAMETER Experiment Name: Zm_5mM_NO_P Parameter: Tissue Value: Aerial
  misc_feature: MA Experiment 108527 PARAMETER Experiment Name: Zm_5mM_NO_P Parameter: Treatment Value: 5mM NO vs. No Treatment
  misc_feature: MA Experiment ID: 108539 Result: Up-regulated in Transcription
  misc_feature: MA Experiment 108539 PARAMETER Experiment Name: Zm_20percent_PEG_P Parameter: Age (day) Value: 8
  misc_feature: MA Experiment 108539 PARAMETER Experiment Name: Zm_20percent_PEG_P Parameter: Organism Value: Zea mays
  misc_feature: MA Experiment 108539 PARAMETER Experiment Name: Zm_20percent_PEG_P Parameter: Plant Line Value: 35A19
  misc_feature: MA Experiment 108539 PARAMETER Experiment Name: Zm_20percent_PEG_P Parameter: Timepoint (hr) Value: 1
  misc_feature: MA Experiment 108539 PARAMETER Experiment Name: Zm_20percent_PEG_P Parameter: Tissue Value: Aerial
  misc_feature: MA Experiment 108539 PARAMETER Experiment Name: Zm_20percent_PEG_P Parameter: Treatment Value: 20percent PEG vs. No Treatment
  misc_feature: MA Experiment ID: 108543 Result: Down-regulated in Transcription
  misc_feature: MA Experiment ID: 108544 Result: Down-regulated in Transcription
  misc_feature: MA Experiment ID: 108559 Result: Up-regulated in Transcription
  misc_feature: MA Experiment 108559 PARAMETER Experiment Name: Zm_5mM_NO_P Parameter: Age (day) Value: 8
  misc_feature: MA Experiment 108559 PARAMETER Experiment Name: Zm_5mM_NO_P Parameter: Organism Value: Zea mays
  misc_feature: MA Experiment 108559 PARAMETER Experiment Name: Zm_5mM_NO_P Parameter: Plant Line Value: 35A19
  misc_feature: MA Experiment 108559 PARAMETER Experiment Name: Zm_5mM_NO_P Parameter: Timepoint (hr) Value: 12
  misc_feature: MA Experiment 108559 PARAMETER Experiment Name: Zm_5mM_NO_P Parameter: Tissue Value: Aerial
  misc_feature: MA Experiment 108559 PARAMETER Experiment Name: Zm_5mM_NO_P Parameter: Treatment Value: 5mM NO vs. No Treatment
  misc_feature: MA Experiment ID: 20000478 Result: Up-regulated in Transcription
  misc_feature: MA Experiment 20000478 PARAMETER Experiment Name: Zm_5mM_SA_P Parameter: Age (day) Value: 11
  misc_feature: MA Experiment 20000478 PARAMETER Experiment Name: Zm_5mM_SA_P Parameter: Organism Value: Zea mays
  misc_feature: MA Experiment 20000478 PARAMETER Experiment Name: Zm_5mM_SA_P Parameter: Plant Line Value: 35A19
  misc_feature: MA Experiment 20000478 PARAMETER Experiment Name: Zm_5mM_SA_P Parameter: Timepoint (hr) Value: 72
  misc_feature: MA Experiment 20000478 PARAMETER Experiment Name: Zm_5mM_SA_P Parameter: Tissue Value: Aerial
  misc_feature: MA Experiment 20000478 PARAMETER Experiment Name: Zm_5mM_SA_P Parameter: Treatment Value: 5mM SA vs. No Treatment
  misc_feature: MA Experiment ID: 20000492 Result: Up-regulated in Transcription
  misc_feature: MA Experiment 20000492 PARAMETER Experiment Name: Zm_Hybrid_Seed_Dev_P Parameter: DAP Value: 12
  misc_feature: MA Experiment 20000492 PARAMETER Experiment Name: Zm_Hybrid_Seed_Dev_P Parameter: Organism Value: Zea mays
  misc_feature: MA Experiment 20000492 PARAMETER Experiment Name: Zm_Hybrid_Seed_Dev_P Parameter: Plant Line Value: 35A19
  misc_feature: MA Experiment 20000492 PARAMETER Experiment Name: Zm_Hybrid_Seed_Dev_P Parameter: Tissue Value: Fert Kernel vs. Unfert Floret
  misc_feature: MA Experiment ID: 20000533 Result: Up-regulated in Transcription
  misc_feature: MA Experiment 20000533 PARAMETER Experiment Name: Zm_0.001percent_MeJA_P Parameter: Age (day) Value: 11
  misc_feature: MA Experiment 20000533 PARAMETER Experiment Name: Zm_0.001percent_MeJA_P Parameter: Organism Value: Zea mays
  misc_feature: MA Experiment 20000533 PARAMETER Experiment Name: Zm_0.001percent_MeJA_P Parameter: Plant Line Value: 35A19
  misc_feature: MA Experiment 20000533 PARAMETER Experiment Name: Zm_0.001percent_MeJA_P Parameter: Timepoint (hr) Value: 72
  misc_feature: MA Experiment 20000533 PARAMETER Experiment Name: Zm_0.001percent_MeJA_P Parameter: Tissue Value: Aerial
  misc_feature: MA Experiment 20000533 PARAMETER Experiment Name: Zm_0.001percent_MeJA_P Parameter: Treatment Value: 0.001percent MeJA vs. No Treatment
  misc_feature: MA Experiment ID: 20000535 Result: Up-regulated in Transcription
  misc_feature: MA Experiment 20000535 PARAMETER Experiment Name: Zm_Hybrid_Seed_Dev_P Parameter: DAP Value: 30 vs. 12
  misc_feature: MA Experiment 20000535 PARAMETER Experiment Name: Zm_Hybrid_Seed_Dev_P Parameter: Organism Value: Zea mays
  misc_feature: MA Experiment 20000535 PARAMETER Experiment Name: Zm_Hybrid_Seed_Dev_P Parameter: Plant Line Value: 35A19
  misc_feature: MA Experiment 20000535 PARAMETER Experiment Name: Zm_Hybrid_Seed_Dev_P Parameter: Tissue Value: Embryo vs. Unfert Floret
  misc_feature: MA Experiment ID: 20000626 Result: Up-regulated in Transcription
  misc_feature: MA Experiment 20000626 PARAMETER Experiment Name: Zm_Herbicide-Treatments_P Parameter: Timepoint (hr) Value: 12
  misc_feature: MA Experiment 20000626 PARAMETER Experiment Name: Zm_Herbicide-Treatments_P Parameter: Tissue Value: Aerial
  misc_feature: MA Experiment 20000626 PARAMETER Experiment Name: Zm_Herbicide-Treatments_P Parameter: Treatment Value: Roundup vs. No Treatment
tagttcatttatgatttcctgcgagcacaaagctagcgaagataccaaacaatggggagcacgagcgccacaggcaccacgtcgtcttcctcatcggctgcccacgggggcggtgccgcacacgtactgctcctgccgtacccgggcgcgcagggccatacaaacccgctgctccagttcggccgctgcctcgcctaccacggcctccgccccacgctcgtcacctcgcggtacgtgctctccaccaccccgcctcccggggagcccttcagggtggccgccatttccgatggcttcgacgacggcggggcggccgcgtgccccgacctcgacgtgtactggcgccagctcgaggccgtcggctcggagacgctggcggagctgatccgctccgaggccgccgatgggcggcctgtgcgcgtgctggtttacgacccgcacctgccgtgggcgcgacgggtggcacaggcggccgggctggcggcagcggcgttcctatcgcagccatgcgccgtcgacgtcgtctacggggaggtgtgtgcaggacggctgccactgccggtggtggacgggatagagctgtttgcacgcgggctgctgggtgtcgagctcggtcccgacgacgttccgccgttcgcagcaaagccagactggtgccctgtgttccttcgggcatcattgcggcaatttgaggggctggaggacgccgacgacgtgctcgtcaactcattccacgagatcgaacccaaggaggcagattatatggccctaacatggcatgcaaagacaataggcccaactttgccatcattttatcttgatgatgaccgtttgcccttgaacaagacttacggtttcaacctcttcaacagcagcgagtcatgtctggcttggcttgacaaacagcttccgtgttctgttgttcttgtatcctatggtactgtctctgattatgatgaagcacagttagaggagcttggcaatggattgtacaattctggcaaaccattcatttgggttgtgaggtcaaacgaagaacacaagttgtccaatgaacttcgtgacaagtgcaaggaacgtggccttattgtttcttggtgcccccagctggaagttctagcacataaagctacaggttgtttcttcacacattgcggatggaactcgacattggaagcaattgttaatggtgtgccaatggtggcaataccacactgggcagaccagccgaccatatcaaaatatatggagagcatgttgggcttgggtgtccgagtgcgcaaggatgagaaaggcttggtaacgagggacgaggtggaaaggtgcatcaaggatgtcatggatggtgatagtaaggataagtataggaagagtgccactatgtggatgcaaaaggccaaggcagctatgcagaatggagggagctcggccaagaatattacagaattcgccgcgaagtattctttaagttaatttttcaaatatttcgtaaaaaaagttaattttcaaagatataatgatagtgttataattacttcctataccttcatggattgtatgccttcctgcatgttatatttttgtctcgggattgtgcgtattacgttttgacttgatgatgtacatgctacagcagcaacctccacgtc

SEQ ID NO: 17043 - protein, 473 aa, Zea mays subsp. mays
  peptide (1)..(473): Ceres Seq. ID no. 15180303
  misc_feature (23)..(469): Pfam Name: UDP-glucoronosyl and UDP-glucosyl transferase Pfam Description: UDP-glucoronosyl and UDP-glucosyl transferase
  misc_feature (106)..(469): Homolog of NCBI NO: 27530877 NR Description: anthocyanin 5-glucosyltransferase [Torenia
  misc_feature (74)..(469): Homolog of NCBI NO: 34906162 NR Description: putative anthocyanin 5-O-glucosyltransferase
  misc_feature (24)..(466): Homolog of NCBI NO: 28628183 NR Description: UDP-glucosyl transferase [Fragaria x ananassa]
  misc_feature (24)..(473): Homolog of NCBI NO: 14192682 NR Description: cold-induced glucosyl transferase [Solanum
  misc_feature (23)..(433): Homolog of NCBI NO: 15221232 NR Description: indole-3-acetate beta-glucosyltransferase
  misc_feature (24)..(472): Homolog of NCBI NO: 15224372 NR Description: glycosyltransferase family [Arabidopsis thaliana]
  misc_feature (1)..(369): Homolog of NCBI NO: 38345000 NR Description: OSJNBa0052O21.3 [Oryza sativa (japonica
  misc_feature (12)..(470): Homolog of NCBI NO: 38345011 NR Description: OSJNBa0052O21.14 [Oryza sativa (japonica
  misc_feature (5)..(471): Homolog of NCBI NO: 38345013 NR Description: OSJNBa0052O21.16 [Oryza sativa (japonica
  misc_feature (8)..(471): Homolog of NCBI NO: 38345012 NR Description: OSJNBa0052O21.15 [Oryza sativa (japonica
MGSTSATGTTSSSSSAAHGGGAAHVLLLPYPGAQGHTNPLLQFGRCLAYHGLRPTLVTSRYVLSTTPPPGEPFRVAAISDGFDDGGAAACPDLDVYWRQLEAVGSETLAELIRSEAADGRPVRVLVYDPHLPWARRVAQAAGLAAAAFLSQPCAVDVVYGEVCAGRLPLPVVDGIELFARGLLGVELGPDDVPPFAAKPDWCPVFLRASLRQFEGLEDADDVLVNSFHEIEPKEADYMALTWHAKTIGPTLPSFYLDDDRLPLNKTYGFNLFNSSESCLAWLDKQLPCSVVLVSYGTVSDYDEAQLEELGNGLYNSGKPFIWVVRSNEEHKLSNELRDKCKERGLIVSWCPQLEVLAHKATGCFFTHCGWNSTLEAIVNGVPMVAIPHWADQPTISKYMESMLGLGVRVRKDEKGLVTRDEVERCIKDVMDGDSKDKYRKSATMWMQKAKAAMQNGGSSAKNITEFAAKYSLS

SEQ ID NO: 17044 - protein, 236 aa, Zea mays subsp. mays
  peptide (1)..(236): Ceres Seq. ID no. 15180304
  misc_feature (1)..(232): Pfam Name: UDP-glucoronosyl and UDP-glucosyl transferase Pfam Description: UDP-glucoronosyl and UDP-glucosyl transferase
  misc_feature (1)..(232): Homolog of NCBI NO: 27530877 NR Description: anthocyanin 5-glucosyltransferase [Torenia
  misc_feature (1)..(232): Homolog of NCBI NO: 34906162 NR Description: putative anthocyanin 5-O-glucosyltransferase
  misc_feature (1)..(229): Homolog of NCBI NO: 28628183 NR Description: UDP-glucosyl transferase [Fragaria x ananassa]
  misc_feature (1)..(236): Homolog of NCBI NO: 14192682 NR Description: cold-induced glucosyl transferase [Solanum
  misc_feature (1)..(196): Homolog of NCBI NO: 15221232 NR Description: indole-3-acetate beta-glucosyltransferase
  misc_feature (1)..(235): Homolog of NCBI NO: 15224372 NR Description: glycosyltransferase family [Arabidopsis thaliana]
  misc_feature (1)..(132): Homolog of NCBI NO: 38345000 NR Description: OSJNBa0052O21.3 [Oryza sativa (japonica
  misc_feature (1)..(233): Homolog of NCBI NO: 38345011 NR Description: OSJNBa0052O21.14 [Oryza sativa (japonica
  misc_feature (1)..(234): Homolog of NCBI NO: 38345013 NR Description: OSJNBa0052O21.16 [Oryza sativa (japonica
  misc_feature (1)..(234): Homolog of NCBI NO: 38345012 NR Description: OSJNBa0052O21.15 [Oryza sativa (japonica
MALTWHAKTIGPTLPSFYLDDDRLPLNKTYGFNLFNSSESCLAWLDKQLPCSVVLVSYGTVSDYDEAQLEELGNGLYNSGKPFIWVVRSNEEHKLSNELRDKCKERGLIVSWCPQLEVLAHKATGCFFTHCGWNSTLEAIVNGVPMVAIPHWADQPTISKYMESMLGLGVRVRKDEKGLVTRDEVERCIKDVMDGDSKDKYRKSATMWMQKAKAAMQNGGSSAKNITEFAAKYSLS

SEQ ID NO: 17045 - DNA, 733 bp, Zea mays subsp. mays; identical to SEQ ID NO: 13847
  misc_feature (1)..(733): Ceres Seq. ID no. 12551453
  misc_feature: MA Experiment ID: 108535 Result: Up-regulated in Transcription
  misc_feature: MA Experiment 108535 PARAMETER Experiment Name: Zm_Meristem_P Parameter: Age (day) Value: 8
  misc_feature: MA Experiment 108535 PARAMETER Experiment Name: Zm_Meristem_P Parameter: Organism Value: Zea mays
  misc_feature: MA Experiment 108535 PARAMETER Experiment Name: Zm_Meristem_P Parameter: Plant Line Value: 35A19
  misc_feature: MA Experiment 108535 PARAMETER Experiment Name: Zm_Meristem_P Parameter: Tissue Value: Root Meristem vs. Above Root Meristem
  misc_feature: MA Experiment ID: 108543 Result: Up-regulated in Transcription
  misc_feature: MA Experiment ID: 108556 Result: Down-regulated in Transcription
  misc_feature: MA Experiment 108556 PARAMETER Experiment Name: Zm_Drought_P Parameter: Age (day) Value: 9
  misc_feature: MA Experiment 108556 PARAMETER Experiment Name: Zm_Drought_P Parameter: Organism Value: Zea mays
  misc_feature: MA Experiment 108556 PARAMETER Experiment Name: Zm_Drought_P Parameter: Plant Line Value: 35A19
  misc_feature: MA Experiment 108556 PARAMETER Experiment Name: Zm_Drought_P Parameter: Timepoint (hr) Value: 24
  misc_feature: MA Experiment 108556 PARAMETER Experiment Name: Zm_Drought_P Parameter: Tissue Value: Aerial
  misc_feature: MA Experiment 108556 PARAMETER Experiment Name: Zm_Drought_P Parameter: Treatment Value: Drought vs. No Drought
  misc_feature: MA Experiment ID: 108689 Result: Down-regulated in Transcription
  misc_feature: MA Experiment 108689 PARAMETER Experiment Name: Zm_Drought_Roots_P Parameter: Age (day) Value: 9
  misc_feature: MA Experiment 108689 PARAMETER Experiment Name: Zm_Drought_Roots_P Parameter: Organism Value: Zea mays
  misc_feature: MA Experiment 108689 PARAMETER Experiment Name: Zm_Drought_Roots_P Parameter: Plant Line Value: 35A19
  misc_feature: MA Experiment 108689 PARAMETER Experiment Name: Zm_Drought_Roots_P Parameter: Timepoint (hr) Value: 24
  misc_feature: MA Experiment 108689 PARAMETER Experiment Name: Zm_Drought_Roots_P Parameter: Tissue Value: Roots
  misc_feature: MA Experiment 108689 PARAMETER Experiment Name: Zm_Drought_Roots_P Parameter: Treatment Value: Drought vs. No Drought
  misc_feature: MA Experiment ID: 20000478 Result: Down-regulated in Transcription
  misc_feature: MA Experiment 20000478 PARAMETER Experiment Name: Zm_5mM_SA_P Parameter: Age (day) Value: 11
  misc_feature: MA Experiment 20000478 PARAMETER Experiment Name: Zm_5mM_SA_P Parameter: Organism Value: Zea mays
  misc_feature: MA Experiment 20000478 PARAMETER Experiment Name: Zm_5mM_SA_P Parameter: Plant Line Value: 35A19
  misc_feature: MA Experiment 20000478 PARAMETER Experiment Name: Zm_5mM_SA_P Parameter: Timepoint (hr) Value: 72
  misc_feature: MA Experiment 20000478 PARAMETER Experiment Name: Zm_5mM_SA_P Parameter: Tissue Value: Aerial
  misc_feature: MA Experiment 20000478 PARAMETER Experiment Name: Zm_5mM_SA_P Parameter: Treatment Value: 5mM SA vs. No Treatment
  misc_feature: MA Experiment ID: 20000479 Result: Down-regulated in Transcription
  misc_feature: MA Experiment 20000479 PARAMETER Experiment Name: Zm_Drought_P Parameter: Age (day) Value: 10
  misc_feature: MA Experiment 20000479 PARAMETER Experiment Name: Zm_Drought_P Parameter: Organism Value: Zea mays
  misc_feature: MA Experiment 20000479 PARAMETER Experiment Name: Zm_Drought_P Parameter: Plant Line Value: 35A19
  misc_feature: MA Experiment 20000479 PARAMETER Experiment Name: Zm_Drought_P Parameter: Timepoint (hr) Value: 48
  misc_feature: MA Experiment 20000479 PARAMETER Experiment Name: Zm_Drought_P Parameter: Tissue Value: Aerial
  misc_feature: MA Experiment 20000479 PARAMETER Experiment Name: Zm_Drought_P Parameter: Treatment Value: Drought vs. No Drought
  misc_feature: MA Experiment ID: 20000480 Result: Down-regulated in Transcription
  misc_feature: MA Experiment 20000480 PARAMETER Experiment Name: Zm_Drought_P Parameter: Age (day) Value: 11
  misc_feature: MA Experiment 20000480 PARAMETER Experiment Name: Zm_Drought_P Parameter: Organism Value: Zea mays
  misc_feature: MA Experiment 20000480 PARAMETER Experiment Name: Zm_Drought_P Parameter: Plant Line Value: 35A19
  misc_feature: MA Experiment 20000480 PARAMETER Experiment Name: Zm_Drought_P Parameter: Timepoint (hr) Value: 72
  misc_feature: MA Experiment 20000480 PARAMETER Experiment Name: Zm_Drought_P Parameter: Tissue Value: Aerial
  misc_feature: MA Experiment 20000480 PARAMETER Experiment Name: Zm_Drought_P Parameter: Treatment Value: Drought vs. No Drought
  misc_feature: MA Experiment ID: 20000487 Result: Down-regulated in Transcription
  misc_feature: MA Experiment 20000487 PARAMETER Experiment Name: Zm_50mM_NH4NO3_L_to_H_P Parameter: Organism Value: Zea mays
  misc_feature: MA Experiment 20000487 PARAMETER Experiment Name: Zm_50mM_NH4NO3_L_to_H_P Parameter: Timepoint (hr) Value: 4
  misc_feature: MA Experiment 20000487 PARAMETER Experiment Name: Zm_50mM_NH4NO3_L_to_H_P Parameter: Tissue Value: Leaves
  misc_feature: MA Experiment 20000487 PARAMETER Experiment Name: Zm_50mM_NH4NO3_L_to_H_P Parameter: Treatment Value: 50mM NH4NO3 vs. 100mM Mannitol
  misc_feature: MA Experiment ID: 20000632 Result: Down-regulated in Transcription
  misc_feature: MA Experiment 20000632 PARAMETER Experiment Name: Zm_Herbicide-Treatments_P Parameter: Timepoint (hr) Value: 4
  misc_feature: MA Experiment 20000632 PARAMETER Experiment Name: Zm_Herbicide-Treatments_P Parameter: Tissue Value: Aerial
  misc_feature: MA Experiment 20000632 PARAMETER Experiment Name: Zm_Herbicide-Treatments_P Parameter: Treatment Value: Glean vs. No Treatment

SEQ ID NO: 17046 - protein, 173 aa, Zea mays subsp. mays; identical to SEQ ID NO: 13848
  peptide (1)..(173): Ceres Seq. ID no. 12551454

SEQ ID NO: 17047 - protein, 161 aa, Zea mays subsp. mays; identical to SEQ ID NO: 13849
  peptide (1)..(161): Ceres Seq. ID no. 12551455
  misc_feature (2)..(161): Homolog of NCBI NO: 34907616 NR Description: contains EST C27797(C52876)~unknown protein
  misc_feature (1)..(142): Homolog of NCBI NO: 38345379 NR Description: OSJNBa0067K08.8 [Oryza sativa (japonica
  misc_feature (4)..(156): Homolog of NCBI NO: 15239379 NR Description: putative protein; protein id: At5g36710.1 thaliana] >gi|8885623|dbj|BAA97553.1| to unknown protein [Arabidopsis thaliana]
  misc_feature (4)..(156): Homolog of NCBI NO: 15239407 NR Description: putative protein; protein id: At5g36800.1
  misc_feature (1)..(142): Homolog of NCBI NO: 21703131 NR Description: AT5g16250/T21H19_170 [Arabidopsis thaliana]
  misc_feature (1)..(142): Homolog of NCBI NO: 15237310 NR Description: putative protein; protein id: At5g16250.1, by cDNA: 18222. [Arabidopsis thaliana] >gi|11346160|pir||T51495
  misc_feature (1)..(142): Homolog of NCBI NO: 21553926 NR Description: unknown [Arabidopsis thaliana]
  misc_feature (6)..(142): Homolog of NCBI NO: 18396262 NR Description: expressed protein; protein id: At3g02640.1, by cDNA: 4861., supported by cDNA: gi_17065095 [Arabidopsis

SEQ ID NO: 17048 - protein, 143 aa, Zea mays subsp. mays; identical to SEQ ID NO: 13850
  peptide (1)..(143): Ceres Seq. ID no. 12551456
  misc_feature (1)..(143): Homolog of NCBI NO: 34907616 NR Description: contains EST C27797(C52876)~unknown protein
  misc_feature (1)..(124): Homolog of NCBI NO: 38345379 NR Description: OSJNBa0067K08.8 [Oryza sativa (japonica
  misc_feature (1)..(138): Homolog of NCBI NO: 15239379 NR Description: putative protein; protein id: At5g36710.1 thaliana] >gi|8885623|dbj|BAA97553.1| to unknown protein [Arabidopsis thaliana]
  misc_feature (1)..(138): Homolog of NCBI NO: 15239407 NR Description: putative protein; protein id: At5g36800.1
  misc_feature (1)..(124): Homolog of NCBI NO: 21703131 NR Description: AT5g16250/T21H19_170 [Arabidopsis thaliana]
  misc_feature (1)..(124): Homolog of NCBI NO: 15237310 NR Description: putative protein; protein id: At5g16250.1, by cDNA: 18222. [Arabidopsis thaliana] >gi|11346160|pir||T51495
  misc_feature (1)..(124): Homolog of NCBI NO: 21553926 NR Description: unknown [Arabidopsis thaliana]
  misc_feature (1)..(124): Homolog of NCBI NO: 18396262 NR Description: expressed protein; protein id: At3g02640.1, by cDNA: 4861., supported by cDNA: gi_17065095 [Arabidopsis

SEQ ID NO: 17049 - DNA, 1835 bp, Zea mays subsp. mays
  misc_feature (1)..(1835): Ceres Seq. ID no. 12415689
  misc_feature: MA Experiment ID: 108559 Result: Down-regulated in Transcription
  misc_feature: MA Experiment 108559 PARAMETER Experiment Name: Zm_5mM_NO_P Parameter: Age (day) Value: 8
  misc_feature: MA Experiment 108559 PARAMETER Experiment Name: Zm_5mM_NO_P Parameter: Organism Value: Zea mays
  misc_feature: MA Experiment 108559 PARAMETER Experiment Name: Zm_5mM_NO_P Parameter: Plant Line Value: 35A19
  misc_feature: MA Experiment 108559 PARAMETER Experiment Name: Zm_5mM_NO_P Parameter: Timepoint (hr) Value: 12
  misc_feature: MA Experiment 108559 PARAMETER Experiment Name: Zm_5mM_NO_P Parameter: Tissue Value: Aerial
  misc_feature: MA Experiment 108559 PARAMETER Experiment Name: Zm_5mM_NO_P Parameter: Treatment Value: 5mM NO vs. No Treatment
gcacgagaccattacctagaacatcctaatcgaaaaaaaataatgctgcgcgcgcacgagcacgacacgagctttcttccatcaagacatggcgacgccggagctttggtggtactggtggctatgggtgacgacgatgctggccgtcgtcgtctcgaccgtcgtctgctacctgaccaaccagcaccgccgctgggggggctggggctcctcctcagggcgtcgctcggccgccgggcccgcgtcctctcccgctcatcggcaacctgctggacctgcggcgcgcgcccggcagcctccaccacacgctggcgcgcctggcccgcgcgcacggcgcccccgtcatgcgcctcgacctgggcctggtcccggccgtggtcgtctcctcccgcgacgctgcacgggaggcgttcgcggcgcacgaccgccgcatcgcggcacgccccgtcccggacagcaagcgcgcgctcggcttctgcgaccgctccatgctctcgctgcccagctcggccccgctctggcggaccctgcgcggcgtcatggccgcgcacgtcctgtcgccgcgcagcctcgcggcgtcgcgcgccgcgcgggagcgcaaggtcgccgacctgatcgggtacctccgcgcgcgggccgggaccgtggtggatcttaaagaggccgtctatggcggcgtcgccaacctcgtctcgactgccatgttctccatcgacgtcgtcgacgtgggcgccgccgagtcgtcgtcatcgtcgtcggcggcggcccacgggttgcaggagctcctggaggagctcatgcagtgcatggcccagcctaacgtctccgacttcttcccgttcctcagcgcactcgacctccaggggtgtcgtcgccgggtggccgtgcaactgggccaggtcctacaggtcttggacgacatcactgaccgccgtttggcctcctcctcctcctcctccacgtccagcaagggcggggacaggcgcggcgacttcctcgacatcctcctaggacctccagtccacgggcaagatcacgcgcgacaacgtgacgctgacgctcttcgacatcttcgcggccgggagcgacaccatggcgctgaccgtggtgtgggcgatggccgagctgctccgcaacccgggcgtgatggccaggctgcgcgcggaggtcagggacgcgctgggcggcagggacgccgtcgaggaggccgacgcggcgggcctgccgttcctgcaggccgtcgtgagggaggccatgcggctgcacccggcggcgcccgtgctgctgccgcacaaggccgtggaggacggggtacagataggcggctacgcggtgcccaggggttgcaccgtgatcttcaactcgtgggcgatcatgcgcgacccggcggcgtgggagaggcccgacgagttcctgccggagcggttcctggccagggacctggacttccgcgggaagcagctggagttcgtcccgttcggctccggccgtaggctgtgcccaggcgtgcccatggcggagcgggtggtgccgctggttctagcgtcgctggtgcacgcgttccagtggcagctgccggccggcatgtcggcggaccaggtcgacgtcagcgacaagttcaccaccaccagtgttttagccttccctcctatcaaagctgtgcctctgctctgatcaccacctagcaacccagcttgagtgtccagtcgattttggccagcaaaatcggaaaagaaatccctgcagccggctgcacacaagcaccacgcaggcttcgttcgtgacacgtatccacgcccaacaattttaaagcaatataacatcaatcttaaagc

SEQ ID NO: 17050 - protein, 382 aa, Zea mays subsp. mays
  peptide (1)..(382): Ceres Seq. ID no. 12415690
  misc_feature (1)..(229): Pfam Name: Cytochrome P450 Pfam Description: Cytochrome P450
  misc_feature (1)..(243): Homolog of NCBI NO: 15217636 NR Description: cytochrome P450 monooxygenase; protein id:
  misc_feature (1)..(222): Homolog of NCBI NO: 30690062 NR Description: cytochrome P450 family [Arabidopsis thaliana]
  misc_feature (1)..(243): Homolog of NCBI NO: 7406712 NR Description: putative ripening-related P-450 enzyme [Vitis
  misc_feature (1)..(243): Homolog of NCBI NO: 15225510 NR Description: cytochrome p450 family; protein id: At2g45550.1
  misc_feature (1)..(243): Homolog of NCBI NO: 37531380 NR Description: putative Cytochrome P450 [Oryza sativa (japonica
  misc_feature (1)..(243): Homolog of NCBI NO: 37531412 NR Description: putative cytochrome P450 [Oryza sativa (japonica
  misc_feature (1)..(222): Homolog of NCBI NO: 15225512 NR Description: cytochrome p450 family
  misc_feature (1)..(229): Homolog of NCBI NO: 34914136 NR Description: putative Cyt-P450 monooxygenase
  misc_feature (1)..(222): Homolog of NCBI NO: 19849279 NR Description: Cyt-P450 monooxygenase [Oryza sativa]
  misc_feature (1)..(229): Homolog of NCBI NO: 19849281 NR Description: Cyt-P450 monooxygenase [Oryza sativa]
MRLDLGLVPAVVVSSRDAAREAFAAHDRRIAARPVPDSKRALGFCDRSMLSLPSSAPLWRTLRGVMAAHVLSPRSLAASRAARERKVADLIGYLRARAGTVVDLKEAVYGGVANLVSTAMFSIDVVDVGAAESSSSSSAAAHGLQELLEELMQCMAQPNVSDFFPFLSALDLQGCRRRVAVQLGQVLQVLDDITDRRLASSSSSSTSSKGGDRRGDFLDILLGPPVHGQDHARQRDADALRHLRGRERHHGADRGVGDGRAAPQPGRDGQAARGGQGRAGRQGRRRGGRRGGPAVPAGRREGGHAAAPGGARAAAAQGRGGRGTDRRLRGAQGLHRDLQLVGDHARPGGVGEARRVPAGAVPGQGPGLPREAAGVRPVRLRP

SEQ ID NO: 17051 - protein, 334 aa, Zea mays subsp. mays
  peptide (1)..(334): Ceres Seq. ID no. 12415691
  misc_feature (1)..(181): Pfam Name: Cytochrome P450 Pfam Description: Cytochrome P450
  misc_feature (1)..(195): Homolog of NCBI NO: 15217636 NR Description: cytochrome P450 monooxygenase; protein id:
  misc_feature (1)..(174): Homolog of NCBI NO: 30690062 NR Description: cytochrome P450 family [Arabidopsis thaliana]
  misc_feature (1)..(195): Homolog of NCBI NO: 7406712 NR Description: putative ripening-related P-450 enzyme [Vitis
  misc_feature (1)..(195): Homolog of NCBI NO: 15225510 NR Description: cytochrome p450 family; protein id: At2g45550.1
  misc_feature (1)..(195): Homolog of NCBI NO: 37531380 NR Description: putative Cytochrome P450 [Oryza sativa (japonica
  misc_feature (1)..(195): Homolog of NCBI NO: 37531412 NR Description: putative cytochrome P450 [Oryza sativa (japonica
  misc_feature (1)..(174): Homolog of NCBI NO: 15225512 NR Description: cytochrome p450 family
  misc_feature (1)..(181): Homolog of NCBI NO: 34914136 NR Description: putative Cyt-P450 monooxygenase
  misc_feature (1)..(174): Homolog of NCBI NO: 19849279 NR Description: Cyt-P450 monooxygenase [Oryza sativa]
  misc_feature (1)..(181): Homolog of NCBI NO: 19849281 NR Description: Cyt-P450 monooxygenase [Oryza sativa]
MLSLPSSAPLWRTLRGVMAAHVLSPRSLAASRAARERKVADLIGYLRARAGTVVDLKEAVYGGVANLVSTAMFSIDVVDVGAAESSSSSSAAAHGLQELLEELMQCMAQPNVSDFFPFLSALDLQGCRRRVAVQLGQVLQVLDDITDRRLASSSSSSTSSKGGDRRGDFLDILLGPPVHGQDHARQRDADALRHLRGRERHHGADRGVGDGRAAPQPGRDGQAARGGQGRAGRQGRRRGGRRGGPAVPAGRREGGHAAAPGGARAAAAQGRGGRGTDRRLRGAQGLHRDLQLVGDHARPGGVGEARRVPAGAVPGQGPGLPREAAGVRPVRLRP

SEQ ID NO: 17052 - protein, 317 aa, Zea mays subsp. mays
  peptide (1)..(317): Ceres Seq. ID no. 12415692
  misc_feature (1)..(164): Pfam Name: Cytochrome P450 Pfam Description: Cytochrome P450
  misc_feature (1)..(178): Homolog of NCBI NO: 15217636 NR Description: cytochrome P450 monooxygenase; protein id:
  misc_feature (1)..(157): Homolog of NCBI NO: 30690062 NR Description: cytochrome P450 family [Arabidopsis thaliana]
  misc_feature (1)..(178): Homolog of NCBI NO: 7406712 NR Description: putative ripening-related P-450 enzyme [Vitis
  misc_feature (1)..(178): Homolog of NCBI NO: 15225510 NR Description: cytochrome p450 family; protein id: At2g45550.1
  misc_feature (1)..(178): Homolog of NCBI NO: 37531380 NR Description: putative Cytochrome P450 [Oryza sativa (japonica
  misc_feature (1)..(178): Homolog of NCBI NO: 37531412 NR Description: putative cytochrome P450 [Oryza sativa (japonica
  misc_feature (1)..(157): Homolog of NCBI NO: 15225512 NR Description: cytochrome p450 family
  misc_feature (1)..(164): Homolog of NCBI NO: 34914136 NR Description: putative Cyt-P450 monooxygenase
  misc_feature (1)..(157): Homolog of NCBI NO: 19849279 NR Description: Cyt-P450 monooxygenase [Oryza sativa]
  misc_feature (1)..(164): Homolog of NCBI NO: 19849281 NR Description: Cyt-P450 monooxygenase [Oryza sativa]
MAAHVLSPRSLAASRAARERKVADLIGYLRARAGTVVDLKEAVYGGVANLVSTAMFSIDVVDVGAAESSSSSSAAAHGLQELLEELMQCMAQPNVSDFFPFLSALDLQGCRRRVAVQLGQVLQVLDDITDRRLASSSSSSTSSKGGDRRGDFLDILLGPPVHGQDHARQRDADALRHLRGRERHHGADRGVGDGRAAPQPGRDGQAARGGQGRAGRQGRRRGGRRGGPAVPAGRREGGHAAAPGGARAAAAQGRGGRGTDRRLRGAQGLHRDLQLVGDHARPGGVGEARRVPAGAVPGQGPGLPREAAGVRPVRLRP

SEQ ID NO: 17053 - DNA, 1731 bp, Zea mays subsp. mays
  misc_feature (1)..(1731): Ceres Seq. ID no. 12376833
  misc_feature: MA Experiment ID: 108529 Result: Up-regulated in Transcription
  misc_feature: MA Experiment 108529 PARAMETER Experiment Name: Zm_Imbibed_Seeds_P Parameter: Age (day) Value: 5 vs. 2
  misc_feature: MA Experiment 108529 PARAMETER Experiment Name: Zm_Imbibed_Seeds_P Parameter: Organism Value: Zea mays
  misc_feature: MA Experiment 108529 PARAMETER Experiment Name: Zm_Imbibed_Seeds_P Parameter: Plant Line Value: 35A19
  misc_feature: MA Experiment 108529 PARAMETER Experiment Name: Zm_Imbibed_Seeds_P Parameter: Tissue Value: Roots vs. Embryo
  misc_feature: MA Experiment ID: 108534 Result: Down-regulated in Transcription
  misc_feature: MA Experiment 108534 PARAMETER Experiment Name: Zm_4deg_Cold_P Parameter: Age (hr) Value: 8
  misc_feature: MA Experiment 108534 PARAMETER Experiment Name: Zm_4deg_Cold_P Parameter: Organism Value: Zea mays
  misc_feature: MA Experiment 108534 PARAMETER Experiment Name: Zm_4deg_Cold_P Parameter: Plant Line Value: 35A19
  misc_feature: MA Experiment 108534 PARAMETER Experiment Name: Zm_4deg_Cold_P Parameter: Temperature (deg C) Value: 4 vs. 22
  misc_feature: MA Experiment 108534 PARAMETER Experiment Name: Zm_4deg_Cold_P Parameter: Timepoint (hr) Value: 6
  misc_feature: MA Experiment 108534 PARAMETER Experiment Name: Zm_4deg_Cold_P Parameter: Tissue Value: Aerial
  misc_feature: MA Experiment ID: 108535 Result: Down-regulated in Transcription
  misc_feature: MA Experiment 108535 PARAMETER Experiment Name: Zm_Meristem_P Parameter: Age (day) Value: 8
  misc_feature: MA Experiment 108535 PARAMETER Experiment Name: Zm_Meristem_P Parameter: Organism Value: Zea mays
  misc_feature: MA Experiment 108535 PARAMETER Experiment Name: Zm_Meristem_P Parameter: Plant Line Value: 35A19
  misc_feature: MA Experiment 108535 PARAMETER Experiment Name: Zm_Meristem_P Parameter: Tissue Value: Root Meristem vs. Above Root Meristem
  misc_feature: MA Experiment ID: 108543 Result: Down-regulated in Transcription
  misc_feature: MA Experiment ID: 108546 Result: Up-regulated in Transcription
  misc_feature: MA Experiment 108546 PARAMETER Experiment Name: Zm_Imbibed_Seeds_P Parameter: Age (day) Value: 3 vs. 2
  misc_feature: MA Experiment 108546 PARAMETER Experiment Name: Zm_Imbibed_Seeds_P Parameter: Organism Value: Zea mays
  misc_feature: MA Experiment 108546 PARAMETER Experiment Name: Zm_Imbibed_Seeds_P Parameter: Plant Line Value: 35A19
  misc_feature: MA Experiment 108546 PARAMETER Experiment Name: Zm_Imbibed_Seeds_P Parameter: Tissue Value: Roots vs. Embryo
gcacgagaccattacctagaacatcctaatcaaaagcccgattccccattcgctcctcacctctctgaacgccgatccacgctagaacgcgccatgccggccgatgccgctgccgctgccgccgcgcccgcccccgcaccgcatccacctccggcgatcctggacgctcgcacgggcggccgcatcctacgccgcgcggcggggcatctcgtccacccagcctctctcccgccgctcctcctcgcggcgctcctcctcctcctcttccgctccgctctcctggctggcacgctccgtctcgcctcctttgctgaccacgacccggccctccgctcccttctcgcccgcctctcctctcccaatccgccatcgccgccgcctcccccacaccacctcccgcgacgccgctcgccgttcacctccccctcgtcctctctctccgacgatgatatcctggtcagccccctcgatcccaccgcctcaactccctcccgccgccgcaactcctcctaccaccatgtccaattcacctcctactccaccgtgcccaaaccctatacgttgccgctcccggcctccgcttcccccttcttcatcgccgtctataatgagacggcgcctccgaagcccgcctcgcggcggggcagcgagcttggcctgcttgacttgaccaggcgggacgcagcggccatcgtcaacctcctcgcgctgctgtcggtccgcacatatcttcgcgatcctcgggtacatcgccgtgcactccattgcgctgggcgcagtgtttgcgtccgtggcggggcaccacagacctgggcagcgtctagtgttcctcctcaccggtgctgccaagggcgctaagagactcacagggttcgcgttcctccggtgggccacgagggacgccgttgtgcagatgctctgcctctggttctttgccgatgtgcacgaccaggcccagctgttcaggctctttgtggtcgccaaactcatgccattctccgcgtctgttaatccgtggcttggtgcagcggttgcaggcccagagctcggtggtttctttgttgcctgggctgtttttgatgcagttgtatcggttttgttcactgtggtgccttgggtggttgtcatggaccgtgatccacggccgcctgggcgcaatgctgtgaaggaagggtgctatcttgtatctctgatggcaactgatgccacaatgctcaagtgctgggaaacagttgtttgtggcagcatggggcggctcatcatggtgacatttggtggaaaggtttttggtggatttctgcattcaattgcgcaggtctacttcatggtggtatggctgctgttctactttgcagcaaggtgtaaggaggtgaggctgggtggtcgtcaatttggactggaggatgttgcagctgctcttgatggatttaggtagtgtctagttgccgcttgccgcctggatcatacatgaagagaggtatatttcatggcccatagtgcttattgatgaaacgctgctggtcttggctaagtagaggtttttgtagttatcttgatcttctaaatcttgctgagatggtaaatgatttggatgagagagagaacttgacaatgttgtatgtacagttttgccacagagtggtaatctgcttatagttccaccacatggcatacaaagaaaggatgtttggtccccttttccatggaaggttagaagcaagatacttggtg

SEQ ID NO: 17054 - protein, 285 aa, Zea mays subsp. mays
  peptide (1)..(285): Ceres Seq. ID no. 12376834
  misc_feature (57)..(158): Homolog of NCBI NO: 30687010 NR Description: expressed protein [Arabidopsis thaliana]
  misc_feature (32)..(239): Homolog of NCBI NO: 37535392 NR Description: hypothetical protein [Oryza sativa (japonica
ARDHYLEHPNQKPDSPFAPHLSERRSTLERAMPADAAAAAAAPAPAPHPPPAILDARTGGRILRRAAGHLVHPASLPPLLLAALLLLLFRSALLAGTLRLASFADHDPALRSLLARLSSPNPPSPPPPPHHLPRRRSPFTSPSSSLSDDDILVSPLDPTASTPSRRRNSSYHHVQFTSYSTVPKPYTLPLPASASPFFIAVYNETAPPKPASRRGSELGLLDLTRRDAAAIVNLLALLSVRTYLRDPRVHRRALHCAGRSVCVRGGAPQTWAASSVPPHRCCQGR

SEQ ID NO: 17055 - protein, 254 aa, Zea mays subsp. mays
  peptide (1)..(254): Ceres Seq. ID no. 12376835
  misc_feature (26)..(127): Homolog of NCBI NO: 30687010 NR Description: expressed protein [Arabidopsis thaliana]
  misc_feature (1)..(208): Homolog of NCBI NO: 37535392 NR Description: hypothetical protein [Oryza sativa (japonica
MPADAAAAAAAPAPAPHPPPAILDARTGGRILRRAAGHLVHPASLPPLLLAALLLLLFRSALLAGTLRLASFADHDPALRSLLARLSSPNPPSPPPPPHHLPRRRSPFTSPSSSLSDDDILVSPLDPTASTPSRRRNSSYHHVQFTSYSTVPKPYTLPLPASASPFFIAVYNETAPPKPASRRGSELGLLDLTRRDAAAIVNLLALLSVRTYLRDPRVHRRALHCAGRSVCVRGGAPQTWAASSVPPHRCCQGR

SEQ ID NO: 17056 - protein, 188 aa, Zea mays subsp. mays
  peptide (1)..(188): Ceres Seq. ID no. 12376836
  misc_feature (1)..(177): Pfam Name: Formin Homology 2 Domain Pfam Description: Formin Homology 2 Domain
  misc_feature (53)..(167): Homolog of NCBI NO: 15226024 NR Description: arabinogalactan-protein (AGP9)
  misc_feature (53)..(167): Homolog of NCBI NO: 13265426 NR Description: At2g14890 [Arabidopsis thaliana]
  misc_feature (66)..(183): Homolog of NCBI NO: 7441829 NR Description: proline-rich cell wall protein - upland cotton
  misc_feature (106)..(178): Homolog of NCBI NO: 15145797 NR Description: basic proline-rich protein [Sus scrofa]
  misc_feature (64)..(167): Homolog of NCBI NO: 7441829 NR Description: proline-rich cell wall protein - upland cotton
  misc_feature (64)..(167): Homolog of NCBI NO: 7441828 NR Description: extensin-like cell wall protein - sea-island
  misc_feature (1)..(180): Homolog of NCBI NO: 17933494 NR Description: Wiskott-Aldrich syndrome protein interacting
  misc_feature (26)..(178): Homolog of NCBI NO: 38345019 NR Description: OSJNBa0029H02.3 [Oryza sativa (japonica
  misc_feature (36)..(166): Homolog of NCBI NO: 38345019 NR Description: OSJNBa0029H02.3 [Oryza sativa (japonica
  misc_feature (1)..(188): Homolog of NCBI NO: 37535392 NR Description: hypothetical protein [Oryza sativa (japonica
MPLPLPPRPPPHRIHLRRSWTLARAAASYAARRGISSTQPLSRRSSSRRSSSSSSAPLSWLARSVSPPLLTTTRPSAPFSPASPLPIRHRRRLPHTTSRDAARRSPPPRPLSPTMISWSAPSIPPPQLPPAAATPPTTMSNSPPTPPCPNPIRCRSRPPLPPSSSPSIMRRRLRSPPRGGAASLACLT

SEQ ID NO: 17057 - DNA, 1480 bp, Zea mays subsp. mays
  misc_feature (1)..(1480): Ceres Seq. ID no. 12374638
  misc_feature: MA Experiment ID: 108527 Result: Up-regulated in Transcription
  misc_feature: MA Experiment 108527 PARAMETER Experiment Name: Zm_5mM_NO_P Parameter: Age (day) Value: 8
  misc_feature: MA Experiment 108527 PARAMETER Experiment Name: Zm_5mM_NO_P Parameter: Organism Value: Zea mays
  misc_feature: MA Experiment 108527 PARAMETER Experiment Name: Zm_5mM_NO_P Parameter: Plant Line Value: 35A19
  misc_feature: MA Experiment 108527 PARAMETER Experiment Name: Zm_5mM_NO_P Parameter: Timepoint (hr) Value: 6
  misc_feature: MA Experiment 108527 PARAMETER Experiment Name: Zm_5mM_NO_P Parameter: Tissue Value: Aerial
  misc_feature: MA Experiment 108527 PARAMETER Experiment Name: Zm_5mM_NO_P Parameter: Treatment Value: 5mM NO vs. No Treatment
  misc_feature: MA Experiment ID: 108529 Result: Up-regulated in Transcription
  misc_feature: MA Experiment 108529 PARAMETER Experiment Name: Zm_Imbibed_Seeds_P Parameter: Age (day) Value: 5 vs. 2
  misc_feature: MA Experiment 108529 PARAMETER Experiment Name: Zm_Imbibed_Seeds_P Parameter: Organism Value: Zea mays
  misc_feature: MA Experiment 108529 PARAMETER Experiment Name: Zm_Imbibed_Seeds_P Parameter: Plant Line Value: 35A19
  misc_feature: MA Experiment 108529 PARAMETER Experiment Name: Zm_Imbibed_Seeds_P Parameter: Tissue Value: Roots vs. Embryo
  misc_feature: MA Experiment ID: 108535 Result: Down-regulated in Transcription
  misc_feature: MA Experiment 108535 PARAMETER Experiment Name: Zm_Meristem_P Parameter: Age (day) Value: 8
  misc_feature: MA Experiment 108535 PARAMETER Experiment Name: Zm_Meristem_P Parameter: Organism Value: Zea mays
  misc_feature: MA Experiment 108535 PARAMETER Experiment Name: Zm_Meristem_P Parameter: Plant Line Value: 35A19
  misc_feature: MA Experiment 108535 PARAMETER Experiment Name: Zm_Meristem_P Parameter: Tissue Value: Root Meristem vs. Above Root Meristem
  misc_feature: MA Experiment ID: 108559 Result: Up-regulated in Transcription
  misc_feature: MA Experiment 108559 PARAMETER Experiment Name: Zm_5mM_NO_P Parameter: Age (day) Value: 8
  misc_feature: MA Experiment 108559 PARAMETER Experiment Name: Zm_5mM_NO_P Parameter: Organism Value: Zea mays
  misc_feature: MA Experiment 108559 PARAMETER Experiment Name: Zm_5mM_NO_P Parameter: Plant Line Value: 35A19
  misc_feature: MA Experiment 108559 PARAMETER Experiment Name: Zm_5mM_NO_P Parameter: Timepoint (hr) Value: 12
  misc_feature: MA Experiment 108559 PARAMETER Experiment Name: Zm_5mM_NO_P Parameter: Tissue Value: Aerial
  misc_feature: MA Experiment 108559 PARAMETER Experiment Name: Zm_5mM_NO_P Parameter: Treatment Value: 5mM NO vs. No Treatment
gcacgagaccattacctagaacatcctaatcgaaaactcgagacgactcgtctccctctttcaataagttcggcagggtaggacggcttcttcctctgcgccttcaccttcgcctgcgctgccggggctcgtcgcatggtttttaaatcgggtttgtaagttttagatctttatgtcaactaccaatctgaggcggcgactccatcatggagacgttgatggaaggaaaaacgagcatgttgacatatccagtgctgattccctcaatgaacctctattagggaagtccaatgatgacaactttggatcagaggtgtatgatcctagaaaacaggatctgtgggatgatgatatgaagaaagaacaactacactggtcatttcttttctcaaacttgattacacaatgggcacaatggttagcaagcattattgtgagctcaggatctatctttggtagattatcccccttctcttcagagaaccaaataaatccagtatatcttagccctttacaggaacaaaggttggatactttaagacacagattgcaaatctcttttgatggctcccgtattgaacatcaagtgtgtattactgatgtagattggttttctaggttgacatcatctcatgaagtaaattaattaataatttatgggctttatcattattaggatgccttgaggcaactctggcgtttagcttatcccgctcgtgagattccaccactcaaatctgaattatggaaggagatgggttggcaaggcaacgatccatctactgatttcaggggtggtggactcatatcgttggagaacctcatcttttttgctaggaactaccctaattcatttcagatgcttctgaacaaagtacaagggcagagatcagattgggagtacccttttgcagttgctggtatcaacgtttcattcatgctggtccagatgttggatctgaagtcaagtgttccatcttctaagtatggaattcgtttccttgaattgcttggacgtgatgagaacgcctttgaccacctgtactgtgtggcctttcggttgcttgatgctcagtggcttgtgaaacgtgcctcctatatggaattcaatgaggtcttgaaatcaacaagaactcagctggagcgggaactggttctagatgatgtgctggaggtgaaggacctgccgtcctacactatgctggatgagtaagctaaagccgagctgttgaacttggacgctggagaattgactaagctggtctgatggctaatagttatctagcgtatgctgatgtctgatcctaaatgcttaggcggcccacatgccattttacattgccgcatattttttttcttgttgtatactgaggtcttatgaggtgtttatatatgattcctttgtaaatattgtgtttgttatatgttatccttttggacatgctggttccaaggaaataaagcaatcgatctcgtattc

SEQ ID NO: 17058 - protein, 157 aa, Zea mays subsp. mays
  peptide (1)..(157): Ceres Seq. ID no. 12374639
  misc_feature (84)..(138): Homolog of NCBI NO: 7485905 NR Description: hypothetical protein F21B7.12 - Arabidopsis
  misc_feature (140)..(157): Homolog of NCBI NO: 21358221 NR Description: CG10068-PA [Drosophila melanogaster]
  misc_feature (146)..(157): Homolog of NCBI NO: 38567695 NR Description: B1160F02.16 [Oryza sativa (japonica
  misc_feature (84)..(138): Homolog of NCBI NO: 25363286 NR Description: protein F21B7.23 [imported] - Arabidopsis
  misc_feature (82)..(138): Homolog of NCBI NO: 38344760 NR Description: OSJNBa0068L06.3 [Oryza sativa (japonica
  misc_feature (84)..(138): Homolog of NCBI NO: 15218859 NR Description: hypothetical protein; protein id: At1g03620.1
  misc_feature (111)..(138): Homolog of NCBI NO: 18408759 NR Description: hypothetical protein; protein id: At1g67400.1
  misc_feature (111)..(146): Homolog of NCBI NO: 14140119 NR Description: putative protein [Oryza sativa]
  misc_feature (1)..(146): Homolog of NCBI NO: 21555509 NR Description: unknown [Arabidopsis thaliana]
  misc_feature (1)..(146): Homolog of NCBI NO: 18396599 NR Description: expressed protein
MSTTNLRRRLHHGDVDGRKNEHVDISSADSLNEPLLGKSNDDNFGSEVYDPRKQDLWDDDMKKEQLHWSFLFSNLITQWAQWLASIIVSSGSIFGRLSPFSSENQINPVYLSPLQEQRLDTLRHRLQISFDGSRIEHQVCITDVDWFSRLTSSHEVN

SEQ ID NO: 17059 - protein, 152 aa, Zea mays subsp. mays
  peptide (1)..(152): Ceres Seq. ID no. 12374640
  misc_feature (1)..(132): Pfam Name: Protein of unknown function, DUF609 Pfam Description: Protein of unknown function, DUF609
  misc_feature (1)..(152): Homolog of NCBI NO: 18411543 NR Description: putative protein
  misc_feature (1)..(152): Homolog of NCBI NO: 15810014 NR Description: At2g44770/F16B22.26 [Arabidopsis thaliana]
  misc_feature (1)..(152): Homolog of NCBI NO: 18406626 NR Description: expressed protein
  misc_feature (1)..(150): Homolog of NCBI NO: 38344760 NR Description: OSJNBa0068L06.3 [Oryza sativa (japonica
  misc_feature (1)..(150): Homolog of NCBI NO: 15218859 NR Description: hypothetical protein; protein id: At1g03620.1
  misc_feature (1)..(150): Homolog of NCBI NO: 18408759 NR Description: hypothetical protein; protein id: At1g67400.1
  misc_feature (1)..(150): Homolog of NCBI NO: 14140119 NR Description: putative protein [Oryza sativa]
  misc_feature (1)..(150): Homolog of NCBI NO: 6091761 NR Description: hypothetical protein [Arabidopsis thaliana]
  misc_feature (1)..(150): Homolog of NCBI NO: 21555509 NR Description: unknown [Arabidopsis thaliana]
  misc_feature (1)..(150): Homolog of NCBI NO: 18396599 NR Description: expressed protein
MGWQGNDPSTDFRGGGLISLENLIFFARNYPNSFQMLLNKVQGQRSDWEYPFAVAGINVSFMLVQMLDLKSSVPSSKYGIRFLELLGRDENAFDHLYCVAFRLLDAQWLVKRASYMEFNEVLKSTRTQLERELVLDDVLEVKDLPSYTMLDE

SEQ ID NO: 17060 - protein, 117 aa, Zea mays subsp. mays
  peptide (1)..(117): Ceres Seq. ID no. 12374641
  misc_feature (1)..(97): Pfam Name: Protein of unknown function, DUF609 Pfam Description: Protein of unknown function, DUF609
  misc_feature (1)..(115): Homolog of NCBI NO: 15218859 NR Description: hypothetical protein; protein id: At1g03620.1
  misc_feature (1)..(115): Homolog of NCBI NO: 18408759 NR Description: hypothetical protein; protein id: At1g67400.1
  misc_feature (1)..(115): Homolog of NCBI NO: 14140119 NR Description: putative protein [Oryza sativa]
  misc_feature (1)..(117): Homolog of NCBI NO: 18411543 NR Description: putative protein
  misc_feature (1)..(117): Homolog of NCBI NO: 18406626 NR Description: expressed protein
  misc_feature (1)..(115): Homolog of NCBI NO: 38344760 NR Description: OSJNBa0068L06.3 [Oryza sativa (japonica
  misc_feature (1)..(117): Homolog of NCBI NO: 15810014 NR Description: At2g44770/F16B22.26 [Arabidopsis thaliana]
  misc_feature (1)..(115): Homolog of NCBI NO: 6091761 NR Description: hypothetical protein [Arabidopsis thaliana]
  misc_feature (1)..(115): Homolog of NCBI NO: 21555509 NR Description: unknown [Arabidopsis thaliana]
  misc_feature (1)..(115): Homolog of NCBI NO: 18396599 NR Description: expressed protein
MLLNKVQGQRSDWEYPFAVAGINVSFMLVQMLDLKSSVPSSKYGIRFLELLGRDENAFDHLYCVAFRLLDAQWLVKRASYMEFNEVLKSTRTQLERELVLDDVLEVKDLPSYTMLDE

SEQ ID NO: 17061 - DNA, 511 bp, Zea mays subsp. mays
  misc_feature (1)..(511): Ceres Seq. ID no. 1669784
  misc_feature: MA Experiment ID: 108527 Result: Up-regulated in Transcription
  misc_feature: MA Experiment 108527 PARAMETER Experiment Name: Zm_5mM_NO_P Parameter: Age (day) Value: 8
  misc_feature: MA Experiment 108527 PARAMETER Experiment Name: Zm_5mM_NO_P Parameter: Organism Value: Zea mays
  misc_feature: MA Experiment 108527 PARAMETER Experiment Name: Zm_5mM_NO_P Parameter: Plant Line Value: 35A19
  misc_feature: MA Experiment 108527 PARAMETER Experiment Name: Zm_5mM_NO_P Parameter: Timepoint (hr) Value: 6
  misc_feature: MA Experiment 108527 PARAMETER Experiment Name: Zm_5mM_NO_P Parameter: Tissue Value: Aerial
  misc_feature: MA Experiment 108527 PARAMETER Experiment Name: Zm_5mM_NO_P Parameter: Treatment Value: 5mM NO vs. No Treatment
  misc_feature: MA Experiment ID: 108559 Result: Up-regulated in Transcription
  misc_feature: MA Experiment 108559 PARAMETER Experiment Name: Zm_5mM_NO_P Parameter: Age (day) Value: 8
  misc_feature: MA Experiment 108559 PARAMETER Experiment Name: Zm_5mM_NO_P Parameter: Organism Value: Zea mays
  misc_feature: MA Experiment 108559 PARAMETER Experiment Name: Zm_5mM_NO_P Parameter: Plant Line Value: 35A19
  misc_feature: MA Experiment 108559 PARAMETER Experiment Name: Zm_5mM_NO_P Parameter: Timepoint (hr) Value: 12
  misc_feature: MA Experiment 108559 PARAMETER Experiment Name: Zm_5mM_NO_P Parameter: Tissue Value: Aerial
  misc_feature: MA Experiment 108559 PARAMETER Experiment Name: Zm_5mM_NO_P Parameter: Treatment Value: 5mM NO vs. No Treatment
agaattttcagaagagagcagaccgccaccgaagcacacaagcagcgtcgtcagggcgtgaaggcaccaccgaatctcgggagcagcagctatggcgaggttcaacccatacgagaacaacggcggcacgtgcttggccgtcgccggcgccgactactgcgtcgtcgccgccgacacccgcctctccatcggttacagcatcctgtcccgtgaccactctaaaatctctcagctgtcagacaaatgtgttttggcctcatctgggtttcaaggtgatatcaaagctttgcagaaggctctggctgctaaggaattaatctatgaacacaataataacaagaagatgagctgcccagcaatggctcaacttctgtcaaacacactctactacaagagatttttcccatactacgctttcaatgtgttggccggactggacacccaaggtaaaggatgtgtctttacatacgatgctgttggatcttatgagaggacaggctatagtgctcag

SEQ ID NO: 17062 - protein, 70 aa, Zea mays subsp. mays
  peptide (1)..(70): Ceres Seq. ID no. 1669785
RIFRREQTATEAHKQRRQGVKAPPNLGSSSYGEVQPIREQRRHVLGRRRRRLLRRRRRHPPLHRLQHPVP

SEQ ID NO: 17063 - protein, 104 aa, Zea mays subsp. mays
  peptide (1)..(104): Ceres Seq. ID no. 1669786
NFQKRADRHRSTQAASSGREGTTESREQQLWRGSTHTRTTAARAWPSPAPTTASSPPTPASPSVTASCPVTTLKSLSCQTNVFWPHLGFKVISKLCRRLWLLRN

SEQ ID NO: 17064 - protein, 140 aa, Zea mays subsp. mays
  peptide (1)..(140): Ceres Seq. ID no. 1669787
  misc_feature (8)..(139): Pfam Name: Proteasome A-type and B-type Pfam Description: Proteasome A-type and B-type
  misc_feature (1)..(139): Homolog of NCBI NO: 7242197 NR Description: proteasome (prosome, macropain) subunit, beta
  misc_feature (1)..(139): Homolog of NCBI NO: 1165123 NR Description: component C5 of proteasome [Mus musculus]
  misc_feature (1)..(139): Homolog of NCBI NO: 12653473 NR Description: proteasome (prosome, macropain) subunit, beta
  misc_feature (1)..(139): Homolog of NCBI NO: 4506193 NR Description: proteasome beta 1 subunit
  misc_feature (3)..(139): Homolog of NCBI NO: 28829610 NR Description: similar to Petunia hybrida (Petunia). Proteasome beta type 1 (EC 3.4.99.46) (20S proteasome alpha subunit F) (20S
  misc_feature (2)..(139): Homolog of NCBI NO: 15232965 NR Description: 20S proteasome beta subunit F1 (PBF1)
  misc_feature (2)..(139): Homolog of NCBI NO: 600387 NR Description: proteosome subunit [Arabidopsis thaliana]
  misc_feature (5)..(139): Homolog of NCBI NO: 14594933 NR Description: putative beta6 proteasome subunit [Nicotiana
  misc_feature (2)..(139): Homolog of NCBI NO: 17380185 NR Description: Proteasome subunit beta type 1 (20S proteasome
  misc_feature (7)..(139): Homolog of NCBI NO: 17380182 NR Description: Proteasome subunit beta type 1 (20S proteasome
MARFNPYENNGGTCLAVAGADYCVVAADTRLSIGYSILSRDHSKISQLSDKCVLASSGFQGDIKALQKALAAKELIYEHNNNKKMSCPAMAQLLSNTLYYKRFFPYYAFNVLAGLDTQGKGCVFTYDAVGSYERTGYSAQ

SEQ ID NO: 17065 - DNA, 1640 bp, Zea mays subsp. mays
  misc_feature (1)..(1640): Ceres Seq. ID no. 12374684
  misc_feature: MA Experiment ID: 108522 Result: Up-regulated in Transcription
  misc_feature: MA Experiment 108522 PARAMETER Experiment Name: Zm_42deg_Heat_P Parameter: Age (day) Value: 8
  misc_feature: MA Experiment 108522 PARAMETER Experiment Name: Zm_42deg_Heat_P Parameter: Organism Value: Zea mays
  misc_feature: MA Experiment 108522 PARAMETER Experiment Name: Zm_42deg_Heat_P Parameter: Plant Line Value: 35A19
  misc_feature: MA Experiment 108522 PARAMETER Experiment Name: Zm_42deg_Heat_P Parameter: Temperature (deg C) Value: 42 vs. 22
  misc_feature: MA Experiment 108522 PARAMETER Experiment Name: Zm_42deg_Heat_P Parameter: Timepoint (hr) Value: 1
  misc_feature: MA Experiment 108522 PARAMETER Experiment Name: Zm_42deg_Heat_P Parameter: Tissue Value: Aerial
  misc_feature: MA Experiment ID: 108523 Result: Up-regulated in Transcription
  misc_feature: MA Experiment 108523 PARAMETER Experiment Name: Zm_42deg_Heat_P Parameter: Age (day) Value: 8
  misc_feature: MA Experiment 108523 PARAMETER Experiment Name: Zm_42deg_Heat_P Parameter: Organism Value: Zea mays
  misc_feature: MA Experiment 108523 PARAMETER Experiment Name: Zm_42deg_Heat_P Parameter: Plant Line Value: 35A19
  misc_feature: MA Experiment 108523 PARAMETER Experiment Name: Zm_42deg_Heat_P Parameter: Temperature (deg C) Value: 42 vs. 22
  misc_feature: MA Experiment 108523 PARAMETER Experiment Name: Zm_42deg_Heat_P Parameter: Timepoint (hr) Value: 6
  misc_feature: MA Experiment 108523 PARAMETER Experiment Name: Zm_42deg_Heat_P Parameter: Tissue Value: Aerial
  misc_feature: MA Experiment ID: 108535 Result: Up-regulated in Transcription
  misc_feature: MA Experiment 108535 PARAMETER Experiment Name: Zm_Meristem_P Parameter: Age (day) Value: 8
  misc_feature: MA Experiment 108535 PARAMETER Experiment Name: Zm_Meristem_P Parameter: Organism Value: Zea mays
  misc_feature: MA Experiment 108535 PARAMETER Experiment Name: Zm_Meristem_P Parameter: Plant Line Value: 35A19
  misc_feature: MA Experiment 108535 PARAMETER Experiment Name: Zm_Meristem_P Parameter: Tissue Value: Root Meristem vs. Above Root Meristem
  misc_feature: MA Experiment ID: 108543 Result: Up-regulated in Transcription
  misc_feature: MA Experiment ID: 108546 Result: Down-regulated in Transcription
  misc_feature: MA Experiment 108546 PARAMETER Experiment Name: Zm_Imbibed_Seeds_P Parameter: Age (day) Value: 3 vs. 2
  misc_feature: MA Experiment 108546 PARAMETER Experiment Name: Zm_Imbibed_Seeds_P Parameter: Organism Value: Zea mays
  misc_feature: MA Experiment 108546 PARAMETER Experiment Name: Zm_Imbibed_Seeds_P Parameter: Plant Line Value: 35A19
  misc_feature: MA Experiment 108546 PARAMETER Experiment Name: Zm_Imbibed_Seeds_P Parameter: Tissue Value: Roots vs. Embryo
  misc_feature: MA Experiment ID: 108597 Result: Down-regulated in Transcription
  misc_feature: MA Experiment 108597 PARAMETER Experiment Name: Zm_100uM_ABA_P Parameter: Age (day) Value: 9
  misc_feature: MA Experiment 108597 PARAMETER Experiment Name: Zm_100uM_ABA_P Parameter: Organism Value: Zea mays
  misc_feature: MA Experiment 108597 PARAMETER Experiment Name: Zm_100uM_ABA_P Parameter: Plant Line Value: 35A19
  misc_feature: MA Experiment 108597 PARAMETER Experiment Name: Zm_100uM_ABA_P Parameter: Timepoint (hr) Value: 24
  misc_feature: MA Experiment 108597 PARAMETER Experiment Name: Zm_100uM_ABA_P Parameter: Tissue Value: Aerial
  misc_feature: MA Experiment 108597 PARAMETER Experiment Name: Zm_100uM_ABA_P Parameter: Treatment Value: 100uM ABA vs. No Treatment
  misc_feature: MA Experiment ID: 20000487 Result: Down-regulated in Transcription
  misc_feature: MA Experiment 20000487 PARAMETER Experiment Name: Zm_50mM_NH4NO3_L_to_H_P Parameter: Organism Value: Zea mays
  misc_feature: MA Experiment 20000487 PARAMETER Experiment Name: Zm_50mM_NH4NO3_L_to_H_P Parameter: Timepoint (hr) Value: 4
  misc_feature: MA Experiment 20000487 PARAMETER Experiment Name: Zm_50mM_NH4NO3_L_to_H_P Parameter: Tissue Value: Leaves
  misc_feature: MA Experiment 20000487 PARAMETER Experiment Name: Zm_50mM_NH4NO3_L_to_H_P Parameter: Treatment Value: 50mM NH4NO3 vs. 100mM Mannitol
  misc_feature: MA Experiment ID: 20000535 Result: Up-regulated in Transcription
  misc_feature: MA Experiment 20000535 PARAMETER Experiment Name: Zm_Hybrid_Seed_Dev_P Parameter: DAP Value: 30 vs. 12
  misc_feature: MA Experiment 20000535 PARAMETER Experiment Name: Zm_Hybrid_Seed_Dev_P Parameter: Organism Value: Zea mays
  misc_feature: MA Experiment 20000535 PARAMETER Experiment Name: Zm_Hybrid_Seed_Dev_P Parameter: Plant Line Value: 35A19
  misc_feature: MA Experiment 20000535 PARAMETER Experiment Name: Zm_Hybrid_Seed_Dev_P Parameter: Tissue Value: Embryo vs. Unfert Floret
  misc_feature: MA Experiment ID: 20000632 Result: Down-regulated in Transcription
  misc_feature: MA Experiment 20000632 PARAMETER Experiment Name: Zm_Herbicide-Treatments_P Parameter: Timepoint (hr) Value: 4
  misc_feature: MA Experiment 20000632 PARAMETER Experiment Name: Zm_Herbicide-Treatments_P Parameter: Tissue Value: Aerial
  misc_feature: MA Experiment 20000632 PARAMETER Experiment Name: Zm_Herbicide-Treatments_P Parameter: Treatment Value: Glean vs. No Treatment
aaaaaaaaacaatttcaaacctcgcgtcggccgccgagcccatttcaaacccggacgccccctccccaagcgcaccgaggaagcagcaaggccagcggtggtccctttcccctccactgcagtctccagagtctagagacctccaccgtccactccaaagacgagcagcgggcaaacccaagcacccgcccaatccggttcgccttccttctcaccccgcccggactctgcggagagatctggcagcggtggctatgccattgggcgacgacgcggcggcggacttcgcgctgccggacgagctcctggcggcgctgccgcgggacccctacgagcagctggatctggcgcgccgcatcaccgcgctggcggtggcggggcgggtgtccgggctggagcgggaggcggggcgcctgcgcgcggaggccgcggggaaggaccgcgagagcgccgagctccgggagcggggtggcgctgctcgacgccgcgcttcaggagaccaacgccaggctccgcgccgcgctcgaggacaatattaagctcagcaaggagcgggactcgctggcgcagacgtccaagaagctggcacgcgacctgcacaagctggagtcattcaagaggcatctgatgcagtcattgcgtgatgatagttcatcaacacaggaaacagttgacattacaacgtgtgatcagccagtagcatcaaaagcatcatccagtgcagatggtggatctgtcagcaaccctgcaacgaatatatttactgagtcattggatgtgggaagcacaaaccgagatggtgctgcagcaaggcctccgatccagaaatactctctcacaacacacatcactccccgccttaccccagaggccactcctaaagtaatgtccacttctgcttctccaaggcgaatgtctaccacaggaacacccaagttgatgtctggttctacatcaccgtcaaaaactcgaatcgaatctcacatgtcaatgacaccatggtatccatcaagcaagcaatcctcggcggcaaactcgcctccacgaggacgttcaaacccaggtcgcactcctcgaatcgatggaaaggagttctttcgtcaggccaggagtcgtctatcctacgagcaatttggagcattcttagccaacatcaaagagctcaatgcccataagcagtcacgtgaggaaactctcaagaaagctgaagagatctttggtccagacaataaagatctgtacctgtctttccaaggcctgctgaaccgtagcatggtggcataaggcttcacaggtcgcttcgcaagtccaatggagttccctcttccgcaacgctaataggatacgcaagttgttgctggctttgcagagataatgaggttgctgcattggcaacttatctagctgtggatctgaaggcccagctgcaagttttggccccgtaataatccatatcggtggaacgagcggatctctctgaacgactgagtgtgcaaaccagcagtgtcgcttctgtaaaagtggtgtgtgtacttgccgaaagcggatgacaaattcattgcctaaatcagggtgcagtctgtcatgaagcgcgtccttgtaaaaccgtgaaaaaggtaaccatgagagtaacaaactcc

SEQ ID NO: 17066 - protein, 427 aa, Zea mays subsp. mays
  peptide (1)..(427): Ceres Seq. ID no. 12374685
  misc_feature (345)..(423): Homolog of NCBI NO: 23613663 NR Description: hypothetical protein, conserved [Plasmodium
  misc_feature (345)..(423): Homolog of NCBI NO: 23489944 NR Description: hypothetical protein [Plasmodium yoelii yoelii]
  misc_feature (169)..(372): Homolog of NCBI NO: 34909876 NR Description: B1143G03.2 [Oryza sativa (japonica
  misc_feature (158)..(347): Homolog of NCBI NO: 34909876 NR Description: B1143G03.2 [Oryza sativa (japonica
  misc_feature (160)..(365): Homolog of NCBI NO: 38344261 NR Description: OSJNBa0008M17.14 [Oryza sativa (japonica
  misc_feature (155)..(396): Homolog of NCBI NO: 7485048 NR Description: hypothetical protein - Arabidopsis thaliana
  misc_feature (169)..(424): Homolog of NCBI NO: 38344261 NR Description: OSJNBa0008M17.14 [Oryza sativa (japonica
  misc_feature (155)..(424): Homolog of NCBI NO: 18414476 NR Description: Expressed protein
  misc_feature (157)..(421): Homolog of NCBI NO: 15222835 NR Description: hypothetical protein; protein id: At1g56080.1
  misc_feature (160)..(425): Homolog of NCBI NO: 30684901 NR Description: expressed protein [Arabidopsis thaliana]
KKKQFQTSRRPPSPFQTRTPPPQAHRGSSKASGGPFPLHCSLQSLETSTVHSKDEQRANPSTRPIRFAFLLTPPGLCGEIWQRWLCHWATTRRRTSRCRTSSWRRCRGTPTSSWIWRAASPRWRWRGGCPGWSGRRGACARRPRGRTARAPSSGSGVALLDAALQETNARLRAALEDNIKLSKERDSLAQTSKKLARDLHKLESFKRHLMQSLRDDSSSTQETVDITTCDQPVASKASSSADGGSVSNPATNIFTESLDVGSTNRDGAAARPPIQKYSLTTHITPRLTPEATPKVMSTSASPRRMSTTGTPKLMSGSTSPSKTRIESHMSMTPWYPSSKQSSAANSPPRGRSNPGRTPRIDGKEFFRQARSRLSYEQFGAFLANIKELNAHKQSREETLKKAEEIFGPDNKDLYLSFQGLLNRSMVA

SEQ ID NO: 17067 - protein, 218 aa, Zea mays subsp. mays
  peptide (1)..(218): Ceres Seq. ID no. 12374686
  misc_feature (136)..(214): Homolog of NCBI NO: 23613663 NR Description: hypothetical protein, conserved [Plasmodium
  misc_feature (136)..(214): Homolog of NCBI NO: 23489944 NR Description: hypothetical protein [Plasmodium yoelii yoelii]
  misc_feature (1)..(163): Homolog of NCBI NO: 34909876 NR Description: B1143G03.2 [Oryza sativa (japonica
  misc_feature (1)..(138): Homolog of NCBI NO: 34909876 NR Description: B1143G03.2 [Oryza sativa (japonica
  misc_feature (1)..(156): Homolog of NCBI NO: 38344261 NR Description: OSJNBa0008M17.14 [Oryza sativa (japonica
  misc_feature (1)..(187): Homolog of NCBI NO: 7485048 NR Description: hypothetical protein - Arabidopsis thaliana
  misc_feature (1)..(215): Homolog of NCBI NO: 38344261 NR Description: OSJNBa0008M17.14 [Oryza sativa (japonica
  misc_feature (1)..(215): Homolog of NCBI NO: 18414476 NR Description: Expressed protein
  misc_feature (1)..(212): Homolog of NCBI NO: 15222835 NR Description: hypothetical protein; protein id: At1g56080.1
  misc_feature (1)..(216): Homolog of NCBI NO: 30684901 NR Description: expressed protein [Arabidopsis thaliana]
MQSLRDDSSSTQETVDITTCDQPVASKASSSADGGSVSNPATNIFTESLDVGSTNRDGAAARPPIQKYSLTTHITPRLTPEATPKVMSTSASPRRMSTTGTPKLMSGSTSPSKTRIESHMSMTPWYPSSKQSSAANSPPRGRSNPGRTPRIDGKEFFRQARSRLSYEQFGAFLANIKELNAHKQSREETLKKAEEIFGPDNKDLYLSFQGLLNRSMVA

SEQ ID NO: 17068 - DNA, 1345 bp, Zea mays subsp. mays
  misc_feature (1)..(1345): Ceres Seq. ID no. 12415368
  misc_feature: MA Experiment ID: 108559 Result: Down-regulated in Transcription
  misc_feature: MA Experiment 108559 PARAMETER Experiment Name: Zm_5mM_NO_P Parameter: Age (day) Value: 8
  misc_feature: MA Experiment 108559 PARAMETER Experiment Name: Zm_5mM_NO_P Parameter: Organism Value: Zea mays
  misc_feature: MA Experiment 108559 PARAMETER Experiment Name: Zm_5mM_NO_P Parameter: Plant Line Value: 35A19
  misc_feature: MA Experiment 108559 PARAMETER Experiment Name: Zm_5mM_NO_P Parameter: Timepoint (hr) Value: 12
  misc_feature: MA Experiment 108559 PARAMETER Experiment Name: Zm_5mM_NO_P Parameter: Tissue Value: Aerial
  misc_feature: MA Experiment 108559 PARAMETER Experiment Name: Zm_5mM_NO_P Parameter: Treatment Value: 5mM NO vs. No Treatment
  misc_feature: MA Experiment ID: 20000488 Result: Down-regulated in Transcription
  misc_feature: MA Experiment 20000488 PARAMETER Experiment Name: Zm_50mM_NH4NO3_L_to_H_P Parameter: Organism Value: Zea mays
  misc_feature: MA Experiment 20000488 PARAMETER Experiment Name: Zm_50mM_NH4NO3_L_to_H_P Parameter: Timepoint (hr) Value: 8
  misc_feature: MA Experiment 20000488 PARAMETER Experiment Name: Zm_50mM_NH4NO3_L_to_H_P Parameter: Tissue Value: Leaves
  misc_feature: MA Experiment 20000488 PARAMETER Experiment Name: Zm_50mM_NH4NO3_L_to_H_P Parameter: Treatment Value: 50mM NH4NO3 vs. 100mM Mannitol
gcacgagaccattacctagaacatcctaatcgaaaaagaatccagatccagcgcccgcatctctctctctcgcgcgcgcgcgcgagcgcgatgagctgccgcgacgggcgatcgtgctagcggtaacagcgagcggtgcgcgagggcggagtgggagtgtggatccgaggggcggcaaatctggcaggcgccgcggtggggctgcgggcgcgggggagggcggggggctgggcggacggcggggagggaggggaggactgcggtaggctcaggccctggcgcaggaggctgctcgcgtccatggcgctctcgtggtcctcggccctccgcctcgccgtcgccgccgtcctgctcgtcgccgtcgtcgtcgcgctcttcactctccccatcgagaagattttgaaggactttctggtttggatcaaggagaatttgggtccatggggtcctttggtgttggccctcgcttacatccctctgacagtcttagctgttccagcatcaattcttacacttggagggggctatctatttggcttgccagtggggtttgttgctgattccattggagcagcaattggtgcgactgctgcatttctgcttggcaggacgattgggaggtcttatgttctctccaaatgcaaagattaccctaagtttcaagcagtagctattgccatccaaagatctggcttcaagatcgtgttgctactaaggcttgtacctttacttccgttcaacatgttgaactacctgttatctgtcactcctgttggtgttggagaatacatgctggcttcttggttgggaatgatgccaatcactcttgctctggtgtacgttggaacaacactaaaagatctatcagatgtgacacatgggtggagtgagatctcgactactcgacggattctgataatatctggttttgtattatctgtggtcttgattatctgcgtcacaaaaattgcaaaatcatctctggagaaggcattggctgagaatggagagctccatgtaggaacatcgcagcttccaggtgtaacctctcccttggatctgcaacaacctcttgtaatcaagattgacacatcaaatgaagaccacgagaagtaaaagtgttgtgtttacaatctcagatctaaattctttggttgttgagtcggtagactgtatatacacccatactctggtgaggcccgtaaatgggtaaaaaagacatcatccccccttccaaaaaagggaatgaagtttagtttactgataggttatagtaatacgatatgcgctttgtttcactccacgtgctaccttatctttggtgaaaatactcgcacttaactgg

SEQ ID NO: 17069 - protein, 271 aa, Zea mays subsp. mays
  peptide (1)..(271): Ceres Seq. ID no. 12415369
  misc_feature (1)..(232): Homolog of NCBI NO: 23128177 NR Description: hypothetical protein [Nostoc punctiforme]
  misc_feature (34)..(232): Homolog of NCBI NO: 16331873 NR Description: hypothetical protein [Synechocystis sp. PCC 6803]
  misc_feature (1)..(235): Homolog of NCBI NO: 17229699 NR Description: hypothetical protein [Nostoc sp. PCC 7120]
  misc_feature (6)..(233): Homolog of NCBI NO: 23128176 NR Description: hypothetical protein [Nostoc punctiforme]
  misc_feature (9)..(233): Homolog of NCBI NO: 23042280 NR Description: hypothetical protein [Trichodesmium erythraeum
  misc_feature (1)..(263): Homolog of NCBI NO: 30687125 NR Description: expressed protein [Arabidopsis thaliana]
  misc_feature (7)..(266): Homolog of NCBI NO: 25406732 NR Description: protein F15K9.14 [imported] - Arabidopsis
  misc_feature (1)..(266): Homolog of NCBI NO: 30678508 NR Description: expressed protein [Arabidopsis thaliana]
  misc_feature (1)..(266): Homolog of NCBI NO: 40823094 NR Description: At1g03260 [Arabidopsis thaliana]
  misc_feature (1)..(271): Homolog of NCBI NO: 23617115 NR Description: contains EST AU173803(R3795)~integral membrane
MALSWSSALRLAVAAVLLVAVVVALFTLPIEKILKDFLVWIKENLGPWGPLVLALAYIPLTVLAVPASILTLGGGYLFGLPVGFVADSIGAAIGATAAFLLGRTIGRSYVLSKCKDYPKFQAVAIAIQRSGFKIVLLLRLVPLLPFNMLNYLLSVTPVGVGEYMLASWLGMMPITLALVYVGTTLKDLSDVTHGWSEISTTRRILIISGFVLSVVLIICVTKIAKSSLEKALAENGELHVGTSQLPGVTSPLDLQQPLVIKIDTSNEDHEK

SEQ ID NO: 17070 - DNA, 992 bp, Zea mays subsp. mays
  misc_feature (1)..(992): Ceres Seq. ID no. 12358927
  misc_feature: MA Experiment ID: 108559 Result: Down-regulated in Transcription
  misc_feature: MA Experiment 108559 PARAMETER Experiment Name: Zm_5mM_NO_P Parameter: Age (day) Value: 8
  misc_feature: MA Experiment 108559 PARAMETER Experiment Name: Zm_5mM_NO_P Parameter: Organism Value: Zea mays
  misc_feature: MA Experiment 108559 PARAMETER Experiment Name: Zm_5mM_NO_P Parameter: Plant Line Value: 35A19
  misc_feature: MA Experiment 108559 PARAMETER Experiment Name: Zm_5mM_NO_P Parameter: Timepoint (hr) Value: 12
  misc_feature: MA Experiment 108559 PARAMETER Experiment Name: Zm_5mM_NO_P Parameter: Tissue Value: Aerial
  misc_feature: MA Experiment 108559 PARAMETER Experiment Name: Zm_5mM_NO_P Parameter: Treatment Value: 5mM NO vs. No Treatment
  misc_feature: MA Experiment ID: 108597 Result: Down-regulated in Transcription
  misc_feature: MA Experiment 108597 PARAMETER Experiment Name: Zm_100uM_ABA_P Parameter: Age (day) Value: 9
  misc_feature: MA Experiment 108597 PARAMETER Experiment Name: Zm_100uM_ABA_P Parameter: Organism Value: Zea mays
  misc_feature: MA Experiment 108597 PARAMETER Experiment Name: Zm_100uM_ABA_P Parameter: Plant Line Value: 35A19
  misc_feature: MA Experiment 108597 PARAMETER Experiment Name: Zm_100uM_ABA_P Parameter: Timepoint (hr) Value: 24
  misc_feature: MA Experiment 108597 PARAMETER Experiment Name: Zm_100uM_ABA_P Parameter: Tissue Value: Aerial
  misc_feature: MA Experiment 108597 PARAMETER Experiment Name: Zm_100uM_ABA_P Parameter: Treatment Value: 100uM ABA vs. No Treatment
  misc_feature: MA Experiment ID: 108689 Result: Down-regulated in Transcription
  misc_feature: MA Experiment 108689 PARAMETER Experiment Name: Zm_Drought_Roots_P Parameter: Age (day) Value: 9
  misc_feature: MA Experiment 108689 PARAMETER Experiment Name: Zm_Drought_Roots_P Parameter: Organism Value: Zea mays
  misc_feature: MA Experiment 108689 PARAMETER Experiment Name: Zm_Drought_Roots_P Parameter: Plant Line Value: 35A19
  misc_feature: MA Experiment 108689 PARAMETER Experiment Name: Zm_Drought_Roots_P Parameter: Timepoint (hr) Value: 24
  misc_feature: MA Experiment 108689 PARAMETER Experiment Name: Zm_Drought_Roots_P Parameter: Tissue Value: Roots
  misc_feature: MA Experiment 108689 PARAMETER Experiment Name: Zm_Drought_Roots_P Parameter: Treatment Value: Drought vs. No Drought
  misc_feature: MA Experiment ID: 20000478 Result: Down-regulated in Transcription
  misc_feature: MA Experiment 20000478 PARAMETER Experiment Name: Zm_5mM_SA_P Parameter: Age (day) Value: 11
  misc_feature: MA Experiment 20000478 PARAMETER Experiment Name: Zm_5mM_SA_P Parameter: Organism Value: Zea mays
  misc_feature: MA Experiment 20000478 PARAMETER Experiment Name: Zm_5mM_SA_P Parameter: Plant Line Value: 35A19
  misc_feature: MA Experiment 20000478 PARAMETER Experiment Name: Zm_5mM_SA_P Parameter: Timepoint (hr) Value: 72
  misc_feature: MA Experiment 20000478 PARAMETER Experiment Name: Zm_5mM_SA_P Parameter: Tissue Value: Aerial
  misc_feature: MA Experiment 20000478 PARAMETER Experiment Name: Zm_5mM_SA_P Parameter: Treatment Value: 5mM SA vs. No Treatment
  misc_feature: MA Experiment ID: 20000532 Result: Up-regulated in Transcription
  misc_feature: MA Experiment 20000532 PARAMETER Experiment Name: Zm_0.001percent_MeJA_P Parameter: Age (day) Value: 10
  misc_feature: MA Experiment 20000532 PARAMETER Experiment Name: Zm_0.001percent_MeJA_P Parameter: Organism Value: Zea mays
  misc_feature: MA Experiment 20000532 PARAMETER Experiment Name: Zm_0.001percent_MeJA_P Parameter: Plant Line Value: 35A19
  misc_feature: MA Experiment 20000532 PARAMETER Experiment Name: Zm_0.001percent_MeJA_P Parameter: Timepoint (hr) Value: 48
  misc_feature: MA Experiment 20000532 PARAMETER Experiment Name: Zm_0.001percent_MeJA_P Parameter: Tissue Value: Aerial
  misc_feature: MA Experiment 20000532 PARAMETER Experiment Name: Zm_0.001percent_MeJA_P Parameter: Treatment Value: 0.001percent MeJA vs. No Treatment
  misc_feature: MA Experiment ID: 20000535 Result: Down-regulated in Transcription
  misc_feature: MA Experiment 20000535 PARAMETER Experiment Name: Zm_Hybrid_Seed_Dev_P Parameter: DAP Value: 30 vs. 12
  misc_feature: MA Experiment 20000535 PARAMETER Experiment Name: Zm_Hybrid_Seed_Dev_P Parameter: Organism Value: Zea mays
  misc_feature: MA Experiment 20000535 PARAMETER Experiment Name: Zm_Hybrid_Seed_Dev_P Parameter: Plant Line Value: 35A19
  misc_feature: MA Experiment 20000535 PARAMETER Experiment Name: Zm_Hybrid_Seed_Dev_P Parameter: Tissue Value: Embryo vs. Unfert Floret
agtacaacgcgcgactccatacaacaatacaaacaaagctgtaacgtactgtaaaagtaagatatggaggccgccggcggcggcggcgaggttcacaaggctagcaacgacaaggaggagcatttcgtgctcgtgcacggcgccggccacggcgcctggtgctggttcaagctggcgtgcctgctccggggctccggccgccaccgcgtctcctgcgtcgacctcgccggggccgccggcagcctcgtcgacccggacgacgtccgctcgttcgacgagtacgacgcgccgctcctcgacttgatggccgccttgccggacgacggccgcaaggtggttctggtagggcatagcgcaggaggactgagcgtcacccacgcgatgcatctgttcagagacaagatcaagcaggccatcttcgtagcagcgaccatgctcccgttcgggtaccagtcggagcaagatatcaaagatggagcacctgatctatccgagttcggcgacgacgtttacgacctcaagttcagtctgggagacgaccgccctccgacgagcgtggcgctgagagaggagcaccagcgcgcgatcctgtaccagcaatgcacccacgaggactccacgctcgcatccattctgctgcgcccgtggccggcagctctgggcgccgccaggttcggcttcggccgcgccgacgacggcgccgtgaacactgtgcgtcgggtgtacgtgaagacggccaacgaccgcatgctgaagccggagcagcaggaggcgatggtccgccggtggccgccgagcgaggtggcggcgatggacaccgaccacagccccttcttctccgccccagagcgcctcttcgagctgatcatcaagtcattgtgaatctctcatctgtagtaatcgcttgtgttcttccagactccagtgcctggtgctgtcctgtatgccatgccaaccaataagttatcatttatttatcaataaattatctc

SEQ ID NO: 17071 - protein, 272 aa, Zea mays subsp. mays
  peptide (1)..(272): Ceres Seq. ID no. 12358928
  misc_feature (49)..(270): Pfam Name: alpha/beta hydrolase fold Pfam Description: alpha/beta hydrolase fold
  misc_feature (9)..(270): Homolog of NCBI NO: 15222699 NR Description: hypothetical protein; protein id: At1g26360.1
  misc_feature (17)..(270): Homolog of NCBI NO: 30681236 NR Description: hydrolase family [Arabidopsis thaliana]
  misc_feature (15)..(272): Homolog of NCBI NO: 15230077 NR Description: alpha/beta hydrolase, putative; protein id:
  misc_feature (21)..(270): Homolog of NCBI NO: 21595837 NR Description: polyneuridine aldehyde esterase, putative
  misc_feature (21)..(270): Homolog of NCBI NO: 25518661 NR Description: hypothetical protein F12G12.19 - Arabidopsis
  misc_feature (21)..(270): Homolog of NCBI NO: 15218463 NR Description: polyneuridine aldehyde esterase, putative
  misc_feature (20)..(272): Homolog of NCBI NO: 15235844 NR Description: cyanohydrin lyase like protein
  misc_feature (20)..(272): Homolog of NCBI NO: 15866583 NR Description: hypothetical protein [Capsella rubella]
  misc_feature (18)..(271): Homolog of NCBI NO: 15237165 NR Description: polyneuridine aldehyde esterase-like
  misc_feature (17)..(271): Homolog of NCBI NO: 15228391 NR Description: putative alpha-hydroxynitrile lyase
MEAAGGGGEVHKASNDKEEHFVLVHGAGHGAWCWFKLACLLRGSGRHRVSCVDLAGAAGSLVDPDDVRSFDEYDAPLLDLMAALPDDGRKVVLVGHSAGGLSVTHAMHLFRDKIKQAIFVAATMLPFGYQSEQDIKDGAPDLSEFGDDVYDLKFSLGDDRPPTSVALREEHQRAILYQQCTHEDSTLASILLRPWPAALGAARFGFGRADDGAVNTVRRVYVKTANDRMLKPEQQEAMVRRWPPSEVAAMDTDHSPFFSAPERLFELIIKSL

SEQ ID NO: 17072 - protein, 192 aa, Zea mays subsp. mays
  peptide (1)..(192): Ceres Seq. ID no. 12358929
  misc_feature (1)..(190): Pfam Name: alpha/beta hydrolase fold Pfam Description: alpha/beta hydrolase fold
  misc_feature (1)..(190): Homolog of NCBI NO: 15222699 NR Description: hypothetical protein; protein id: At1g26360.1
  misc_feature (1)..(190): Homolog of NCBI NO: 30681236 NR Description: hydrolase family [Arabidopsis thaliana]
  misc_feature (1)..(192): Homolog of NCBI NO: 15230077 NR Description: alpha/beta hydrolase, putative; protein id:
  misc_feature (1)..(190): Homolog of NCBI NO: 25518661 NR Description: hypothetical protein F12G12.19 - Arabidopsis
  misc_feature (1)..(190): Homolog of NCBI NO: 21595837 NR Description: polyneuridine aldehyde esterase, putative
  misc_feature (1)..(190): Homolog of NCBI NO: 15218463 NR Description: polyneuridine aldehyde esterase, putative
  misc_feature (1)..(192): Homolog of NCBI NO: 15235844 NR Description: cyanohydrin lyase like protein
  misc_feature (1)..(192): Homolog of NCBI NO: 15866583 NR Description: hypothetical protein [Capsella rubella]
  misc_feature (1)..(191): Homolog of NCBI NO: 15237165 NR Description: polyneuridine aldehyde esterase-like
  misc_feature (1)..(191): Homolog of NCBI NO: 15228391 NR Description: putative alpha-hydroxynitrile lyase
MAALPDDGRKVVLVGHSAGGLSVTHAMHLFRDKIKQAIFVAATMLPFGYQSEQDIKDGAPDLSEFGDDVYDLKFSLGDDRPPTSVALREEHQRAILYQQCTHEDSTLASILLRPWPAALGAARFGFGRADDGAVNTVRRVYVKTANDRMLKPEQQEAMVRRWPPSEVAAMDTDHSPFFSAPERLFELIIKSL

SEQ ID NO: 17073 - protein, 166 aa, Zea mays subsp. mays
  peptide (1)..(166): Ceres Seq. ID no. 12358930
  misc_feature (1)..(164): Pfam Name: alpha/beta hydrolase fold Pfam Description: alpha/beta hydrolase fold
  misc_feature (1)..(164): Homolog of NCBI NO: 15222699 NR Description: hypothetical protein; protein id: At1g26360.1
  misc_feature (1)..(164): Homolog of NCBI NO: 30681236 NR Description: hydrolase family [Arabidopsis thaliana]
  misc_feature (1)..(166): Homolog of NCBI NO: 15230077 NR Description: alpha/beta hydrolase, putative; protein id:
  misc_feature (1)..(164): Homolog of NCBI NO: 25518661 NR Description: hypothetical protein F12G12.19 - Arabidopsis
  misc_feature (1)..(164): Homolog of NCBI NO: 21595837 NR Description: polyneuridine aldehyde esterase, putative
  misc_feature (1)..(164): Homolog of NCBI NO: 15218463 NR Description: polyneuridine aldehyde esterase, putative
  misc_feature (1)..(166): Homolog of NCBI NO: 15235844 NR Description: cyanohydrin lyase like protein
  misc_feature (1)..(166): Homolog of NCBI NO: 15866583 NR Description: hypothetical protein [Capsella rubella]
  misc_feature (1)..(165): Homolog of NCBI NO: 15237165 NR Description: polyneuridine aldehyde esterase-like
  misc_feature (1)..(165): Homolog of NCBI NO: 15228391 NR Description: putative alpha-hydroxynitrile lyase
MHLFRDKIKQAIFVAATMLPFGYQSEQDIKDGAPDLSEFGDDVYDLKFSLGDDRPPTSVALREEHQRAILYQQCTHEDSTLASILLRPWPAALGAARFGFGRADDGAVNTVRRVYVKTANDRMLKPEQQEAMVRRWPPSEVAAMDTDHSPFFSAPERLFELIIKSL

SEQ ID NO: 17074 - DNA, 1492 bp, Zea mays subsp. mays
  misc_feature (1)..(1492): Ceres Seq. ID no. 12366507
  misc_feature: MA Experiment ID: 108529 Result: Up-regulated in Transcription
  misc_feature: MA Experiment 108529 PARAMETER Experiment Name: Zm_Imbibed_Seeds_P Parameter: Age (day) Value: 5 vs. 2
  misc_feature: MA Experiment 108529 PARAMETER Experiment Name: Zm_Imbibed_Seeds_P Parameter: Organism Value: Zea mays
  misc_feature: MA Experiment 108529 PARAMETER Experiment Name: Zm_Imbibed_Seeds_P Parameter: Plant Line Value: 35A19
  misc_feature: MA Experiment 108529 PARAMETER Experiment Name: Zm_Imbibed_Seeds_P Parameter: Tissue Value: Roots vs. Embryo
  misc_feature: MA Experiment ID: 108535 Result: Down-regulated in Transcription
  misc_feature: MA Experiment 108535 PARAMETER Experiment Name: Zm_Meristem_P Parameter: Age (day) Value: 8
  misc_feature: MA Experiment 108535 PARAMETER Experiment Name: Zm_Meristem_P Parameter: Organism Value: Zea mays
  misc_feature: MA Experiment 108535 PARAMETER Experiment Name: Zm_Meristem_P Parameter: Plant Line Value: 35A19
  misc_feature: MA Experiment 108535 PARAMETER Experiment Name: Zm_Meristem_P Parameter: Tissue Value: Root Meristem vs. Above Root Meristem
  misc_feature: MA Experiment ID: 108689 Result: Down-regulated in Transcription
  misc_feature: MA Experiment 108689 PARAMETER Experiment Name: Zm_Drought_Roots_P Parameter: Age (day) Value: 9
  misc_feature: MA Experiment 108689 PARAMETER Experiment Name: Zm_Drought_Roots_P Parameter: Organism Value: Zea mays
  misc_feature: MA Experiment 108689 PARAMETER Experiment Name: Zm_Drought_Roots_P Parameter: Plant Line Value: 35A19
  misc_feature: MA Experiment 108689 PARAMETER Experiment Name: Zm_Drought_Roots_P Parameter: Timepoint (hr) Value: 24
  misc_feature: MA Experiment 108689 PARAMETER Experiment Name: Zm_Drought_Roots_P Parameter: Tissue Value: Roots
  misc_feature: MA Experiment 108689 PARAMETER Experiment Name: Zm_Drought_Roots_P Parameter: Treatment Value: Drought vs. No Drought
  misc_feature: MA Experiment ID: 20000478 Result: Down-regulated in Transcription
  misc_feature: MA Experiment 20000478 PARAMETER Experiment Name: Zm_5mM_SA_P Parameter: Age (day) Value: 11
  misc_feature: MA Experiment 20000478 PARAMETER Experiment Name: Zm_5mM_SA_P Parameter: Organism Value: Zea mays
  misc_feature: MA Experiment 20000478 PARAMETER Experiment Name: Zm_5mM_SA_P Parameter: Plant Line Value: 35A19
  misc_feature: MA Experiment 20000478 PARAMETER Experiment Name: Zm_5mM_SA_P Parameter: Timepoint (hr) Value: 72
  misc_feature: MA Experiment 20000478 PARAMETER Experiment Name: Zm_5mM_SA_P Parameter: Tissue Value: Aerial
  misc_feature: MA Experiment 20000478 PARAMETER Experiment Name: Zm_5mM_SA_P Parameter: Treatment Value: 5mM SA vs. No Treatment
  misc_feature: MA Experiment ID: 20000479 Result: Down-regulated in Transcription
  misc_feature: MA Experiment 20000479 PARAMETER Experiment Name: Zm_Drought_P Parameter: Age (day) Value: 10
  misc_feature: MA Experiment 20000479 PARAMETER Experiment Name: Zm_Drought_P Parameter: Organism Value: Zea mays
  misc_feature: MA Experiment 20000479 PARAMETER Experiment Name: Zm_Drought_P Parameter: Plant Line Value: 35A19
  misc_feature: MA Experiment 20000479 PARAMETER Experiment Name: Zm_Drought_P Parameter: Timepoint (hr) Value: 48
  misc_feature: MA Experiment 20000479 PARAMETER Experiment Name: Zm_Drought_P Parameter: Tissue Value: Aerial
  misc_feature: MA Experiment 20000479 PARAMETER Experiment Name: Zm_Drought_P Parameter: Treatment Value: Drought vs. No Drought
  misc_feature: MA Experiment ID: 20000480 Result: Down-regulated in Transcription
  misc_feature: MA Experiment 20000480 PARAMETER Experiment Name: Zm_Drought_P Parameter: Age (day) Value: 11
  misc_feature: MA Experiment 20000480 PARAMETER Experiment Name: Zm_Drought_P Parameter: Organism Value: Zea mays
  misc_feature: MA Experiment 20000480 PARAMETER Experiment Name: Zm_Drought_P Parameter: Plant Line Value: 35A19
  misc_feature: MA Experiment 20000480 PARAMETER Experiment Name: Zm_Drought_P Parameter: Timepoint (hr) Value: 72
  misc_feature: MA Experiment 20000480 PARAMETER Experiment Name: Zm_Drought_P Parameter: Tissue Value: Aerial
  misc_feature: MA Experiment 20000480 PARAMETER Experiment Name: Zm_Drought_P Parameter: Treatment Value: Drought vs. No Drought
  misc_feature: MA Experiment ID: 20000492 Result: Down-regulated in Transcription
  misc_feature: MA Experiment 20000492 PARAMETER Experiment Name: Zm_Hybrid_Seed_Dev_P Parameter: DAP Value: 12
  misc_feature: MA Experiment 20000492 PARAMETER Experiment Name: Zm_Hybrid_Seed_Dev_P Parameter: Organism Value: Zea mays
  misc_feature: MA Experiment 20000492 PARAMETER Experiment Name: Zm_Hybrid_Seed_Dev_P Parameter: Plant Line Value: 35A19
  misc_feature: MA Experiment 20000492 PARAMETER Experiment Name: Zm_Hybrid_Seed_Dev_P Parameter: Tissue Value: Fert Kernel vs. Unfert Floret
  misc_feature: MA Experiment ID: 20000535 Result: Down-regulated in Transcription
  misc_feature: MA Experiment 20000535 PARAMETER Experiment Name: Zm_Hybrid_Seed_Dev_P Parameter: DAP Value: 30 vs. 12
  misc_feature: MA Experiment 20000535 PARAMETER Experiment Name: Zm_Hybrid_Seed_Dev_P Parameter: Organism Value: Zea mays
  misc_feature: MA Experiment 20000535 PARAMETER Experiment Name: Zm_Hybrid_Seed_Dev_P Parameter: Plant Line Value: 35A19
  misc_feature: MA Experiment 20000535 PARAMETER Experiment Name: Zm_Hybrid_Seed_Dev_P Parameter: Tissue Value: Embryo vs. Unfert Floret
atccaccagcagctagcgtagcgagcgatggccaccgaactccggtcgccgctcctcccgccgccgccgcagcgacgactaagcccgcgggcagccgcgtgggcggcgctcgccgtctcggcgacggtcctgctcctccccttcctgatcggcagcagaagcaccaccaccagcaccagcagcacgagacacccccggccccgatcctccccaccatccaaccccgtggagctgaccctcctgaccgccgccagcgacaagggcgcggtgtgcctggacgggagccccccgggctaccacctgcaggcggggtccggcgccgggtccggcagctggctcatccatctcatggggggcggctggtgcgacaccgtccgcagctgctccgaccgcaggacgacctacctcggctcgtccctcttcatgcagaaagtcatggacttcactggcattctcagcaacgacccggcacagaatcctgatttctacagctggaacagagtgttcgttaggtactgcgacggggcatcgttttcgggggattcccagcgcgaggctgggcctgggaacggcacgctcttcttcagaggcctgcgcatctgggaggcagtcctcgacgagctcatgcacaagggcctcgcgcattccaaacaggccttgctcacaggttgttccgctggtggtctggccacgctgctgcactgcgacgattttcgcgcacggtttccccctgaggttcctgtgaaatgcctctccgatgccgggttctttgttgacgcgaaggatttgtcagggcagcgctccatgcgttctgtgtacagcggagttgttcatcttcagaacgttactaaagttttgcccaaggactgcctcctcgcaaacaaggacgatcccacgcagtgtttcttcccggcggagcttgttaagagcatcagcacgcccacgttgatcgtaaactctgcttacgactcttggcaggtacggtttgtcgttgcgccagacaggtcgtctcccgacgagtcatggcgcggctgcagagacgacgttcgcagatgcaattcctcccagatccaagtcctcaatgcatttaggaagacgatggtagatgacctcgtcgaggctgccgacggcaccaacagcagctggttcatcgactcttgcttcacacattgtcagactatcttcgacagctcaggatggaactcagcggccgcgccgaggatcgggaacaagacactgacggaggtgatcggggactggtactttggtaggagcccgagcccggtggtgaggcaggttggctgcgagtatccatgcaaccccacatgcaataggcagccaccagttgccggcttctacaacaaagctcttccgccgcgtgaacaagcgaacattcttgtattgggatgaaacatacaagtaaacggatgaaacatacaagtaaatgttgggtgtgtcctctacagctggtcatcagtgaccggattgggcc

SEQ ID NO: 17075 - protein, 460 aa, Zea mays subsp. mays
  peptide (1)..(460): Ceres Seq. ID no. 12366508
  misc_feature (59)..(416): Pfam Name: Pectinacetylesterase Pfam Description: Pectinacetylesterase
  misc_feature (67)..(435): Homolog of NCBI NO: 21703105 NR Description: At1g57590/T8L23_6 [Arabidopsis thaliana]
  misc_feature (67)..(435): Homolog of NCBI NO: 30696158 NR Description: pectinacetylesterase, putative [Arabidopsis
  misc_feature (67)..(435): Homolog of NCBI NO: 25347293 NR Description: probable pectinacetylesterase precursor T8L23.6
  misc_feature (25)..(434): Homolog of NCBI NO: 6478941 NR Description: putative pectinacetylesterase [Arabidopsis
  misc_feature (44)..(435): Homolog of NCBI NO: 28392968 NR Description: putative pectinacetylesterase [Arabidopsis
  misc_feature (67)..(435): Homolog of NCBI NO: 15226462 NR Description: pectinacetylesterase, putative
  misc_feature (2)..(434): Homolog of NCBI NO: 22330933 NR Description: pectinacetylesterase family; protein id:
  misc_feature (60)..(441): Homolog of NCBI NO: 10176854 NR Description: pectinacetylesterase [Arabidopsis thaliana]
  misc_feature (21)..(434): Homolog of NCBI NO: 6478931 NR Description: putative pectinacetylesterase [Arabidopsis
  misc_feature (59)..(439): Homolog of NCBI NO: 34907550 NR Description: putative pectinacetylesterase
MATELRSPLLPPPPQRRLSPRAAAWAALAVSATVLLLPFLIGSRSTTTSTSSTRHPRPRSSPPSNPVELTLLTAASDKGAVCLDGSPPGYHLQAGSGAGSGSWLIHLMGGGWCDTVRSCSDRRTTYLGSSLFMQKVMDFTGILSNDPAQNPDFYSWNRVFVRYCDGASFSGDSQREAGPGNGTLFFRGLRIWEAVLDELMHKGLAHSKQALLTGCSAGGLATLLHCDDFRARFPPEVPVKCLSDAGFFVDAKDLSGQRSMRSVYSGVVHLQNVTKVLPKDCLLANKDDPTQCFFPAELVKSISTPTLIVNSAYDSWQVRFVVAPDRSSPDESWRGCRDDVRRCNSSQIQVLNAFRKTMVDDLVEAADGTNSSWFIDSCFTHCQTIFDSSGWNSAAAPRIGNKTLTEVIGDWYFGRSPSPVVRQVGCEYPCNPTCNRQPPVAGFYNKALPPREQANILVLG

SEQ ID NO: 17076 - protein, 353 aa, Zea mays subsp. mays
  peptide (1)..(353): Ceres Seq. ID no. 12366509
  misc_feature (1)..(309): Pfam Name: Pectinacetylesterase Pfam Description: Pectinacetylesterase
  misc_feature (1)..(334): Homolog of NCBI NO: 10176854 NR Description: pectinacetylesterase [Arabidopsis thaliana]
  misc_feature (1)..(327): Homolog of NCBI NO: 6478941 NR Description: putative pectinacetylesterase [Arabidopsis
  misc_feature (1)..(327): Homolog of NCBI NO: 22330933 NR Description: pectinacetylesterase family; protein id:
  misc_feature (1)..(328): Homolog of NCBI NO: 28392968 NR Description: putative pectinacetylesterase [Arabidopsis
  misc_feature (1)..(328): Homolog of NCBI NO: 15226462 NR Description: pectinacetylesterase, putative
  misc_feature (1)..(328): Homolog of NCBI NO: 21703105 NR Description: At1g57590/T8L23_6 [Arabidopsis thaliana]
  misc_feature (1)..(328): Homolog of NCBI NO: 30696158 NR Description: pectinacetylesterase, putative [Arabidopsis
  misc_feature (1)..(328): Homolog of NCBI NO: 25347293 NR Description: probable pectinacetylesterase precursor T8L23.6
  misc_feature (1)..(327): Homolog of NCBI NO: 6478931 NR Description: putative pectinacetylesterase [Arabidopsis
  misc_feature (1)..(332): Homolog of NCBI NO: 34907550 NR Description: putative pectinacetylesterase
MGGGWCDTVRSCSDRRTTYLGSSLFMQKVMDFTGILSNDPAQNPDFYSWNRVFVRYCDGASFSGDSQREAGPGNGTLFFRGLRIWEAVLDELMHKGLAHSKQALLTGCSAGGLATLLHCDDFRARFPPEVPVKCLSDAGFFVDAKDLSGQRSMRSVYSGVVHLQNVTKVLPKDCLLANKDDPTQCFFPAELVKSISTPTLIVNSAYDSWQVRFVVAPDRSSPDESWRGCRDDVRRCNSSQIQVLNAFRKTMVDDLVEAADGTNSSWFIDSCFTHCQTIFDSSGWNSAAAPRIGNKTLTEVIGDWYFGRSPSPVVRQVGCEYPCNPTCNRQPPVAGFYNKALPPREQANILVLG

SEQ ID NO: 17077 - protein, 328 aa, Zea mays subsp. mays
  peptide (1)..(328): Ceres Seq. ID no. 12366510
  misc_feature (1)..(284): Pfam Name: Pectinacetylesterase Pfam Description: Pectinacetylesterase
  misc_feature (1)..(309): Homolog of NCBI NO: 10176854 NR Description: pectinacetylesterase [Arabidopsis thaliana]
  misc_feature (1)..(302): Homolog of NCBI NO: 6478941 NR Description: putative pectinacetylesterase [Arabidopsis
  misc_feature (1)..(302): Homolog of NCBI NO: 22330933 NR Description: pectinacetylesterase family; protein id:
  misc_feature (1)..(303): Homolog of NCBI NO: 28392968 NR Description: putative pectinacetylesterase [Arabidopsis
  misc_feature (1)..(303): Homolog of NCBI NO: 15226462 NR Description: pectinacetylesterase, putative
  misc_feature (1)..(303): Homolog of NCBI NO: 21703105 NR Description: At1g57590/T8L23_6 [Arabidopsis thaliana]
  misc_feature (1)..(303): Homolog of NCBI NO: 30696158 NR Description: pectinacetylesterase, putative [Arabidopsis
  misc_feature (1)..(303): Homolog of NCBI NO: 25347293 NR Description: probable pectinacetylesterase precursor T8L23.6
  misc_feature (1)..(302): Homolog of NCBI NO: 6478931 NR Description: putative pectinacetylesterase [Arabidopsis
  misc_feature (1)..(307): Homolog of NCBI NO: 34907550 NR Description: putative pectinacetylesterase
MQKVMDFTGILSNDPAQNPDFYSWNRVFVRYCDGASFSGDSQREAGPGNGTLFFRGLRIWEAVLDELMHKGLAHSKQALLTGCSAGGLATLLHCDDFRARFPPEVPVKCLSDAGFFVDAKDLSGQRSMRSVYSGVVHLQNVTKVLPKDCLLANKDDPTQCFFPAELVKSISTPTLIVNSAYDSWQVRFVVAPDRSSPDESWRGCRDDVRRCNSSQIQVLNAFRKTMVDDLVEAADGTNSSWFIDSCFTHCQTIFDSSGWNSAAAPRIGNKTLTEVIGDWYFGRSPSPVVRQVGCEYPCNPTCNRQPPVAGFYNKALPPREQANILVLG

SEQ ID NO: 17078 - DNA, 1326 bp, Zea mays subsp. mays
  misc_feature (1)..(1326): Ceres Seq. ID no. 12424016
  misc_feature: MA Experiment ID: 108527 Result: Down-regulated in Transcription
  misc_feature: MA Experiment 108527 PARAMETER Experiment Name: Zm_5mM_NO_P Parameter: Age (day) Value: 8
  misc_feature: MA Experiment 108527 PARAMETER Experiment Name: Zm_5mM_NO_P Parameter: Organism Value: Zea mays
  misc_feature: MA Experiment 108527 PARAMETER Experiment Name: Zm_5mM_NO_P Parameter: Plant Line Value: 35A19
  misc_feature: MA Experiment 108527 PARAMETER Experiment Name: Zm_5mM_NO_P Parameter: Timepoint (hr) Value: 6
  misc_feature: MA Experiment 108527 PARAMETER Experiment Name: Zm_5mM_NO_P Parameter: Tissue Value: Aerial
  misc_feature: MA Experiment 108527 PARAMETER Experiment Name: Zm_5mM_NO_P Parameter: Treatment Value: 5mM NO vs. No Treatment
  misc_feature: MA Experiment ID: 108528 Result: Up-regulated in Transcription
  misc_feature: MA Experiment 108528 PARAMETER Experiment Name: Zm_Imbibed_Seeds_P Parameter: Age (day) Value: 5 vs. 2
  misc_feature: MA Experiment 108528 PARAMETER Experiment Name: Zm_Imbibed_Seeds_P Parameter: Organism Value: Zea mays
  misc_feature: MA Experiment 108528 PARAMETER Experiment Name: Zm_Imbibed_Seeds_P Parameter: Plant Line Value: 35A19
  misc_feature: MA Experiment 108528 PARAMETER Experiment Name: Zm_Imbibed_Seeds_P Parameter: Tissue Value: Aerial vs. Embryo
  misc_feature: MA Experiment ID: 108530 Result: Up-regulated in Transcription
  misc_feature: MA Experiment 108530 PARAMETER Experiment Name: Zm_Imbibed_Seeds_P Parameter: Age (day) Value: 6 vs. 2
  misc_feature: MA Experiment 108530 PARAMETER Experiment Name: Zm_Imbibed_Seeds_P Parameter: Organism Value: Zea mays
  misc_feature: MA Experiment 108530 PARAMETER Experiment Name: Zm_Imbibed_Seeds_P Parameter: Plant Line Value: 35A19
  misc_feature: MA Experiment 108530 PARAMETER Experiment Name: Zm_Imbibed_Seeds_P Parameter: Tissue Value: Aerial vs. Embryo
  misc_feature: MA Experiment ID: 108547 Result: Up-regulated in Transcription
  misc_feature: MA Experiment 108547 PARAMETER Experiment Name: Zm_Imbibed_Seeds_P Parameter: Age (day) Value: 4 vs. 2
  misc_feature: MA Experiment 108547 PARAMETER Experiment Name: Zm_Imbibed_Seeds_P Parameter: Organism Value: Zea mays
  misc_feature: MA Experiment 108547 PARAMETER Experiment Name: Zm_Imbibed_Seeds_P Parameter: Plant Line Value: 35A19
  misc_feature: MA Experiment 108547 PARAMETER Experiment Name: Zm_Imbibed_Seeds_P Parameter: Tissue Value: Aerial vs. Embryo
aatccaccggatccccacccacacctcgctaccccgaccgatgaaggcgtcgatcaagttccgcgacgacgagcggccgctggtgcgcgccaaggtgccgatcgtcgtgctggggctgccgttccagtcggggctcgcggcgggaagggacctgcgggagctccgcttcgacgtgtccacggcgttcgcatcgggcccggcgctccggctctcgtaccgccccaacgacccggcgctccccttcgcgctcgccgtgcgcgcggggctcggcccgctggggtccccggcacgcgcgcccttcgcgctcgccgccgagttcaacctcgtcgcccacgacccctcctcgtcgcccgccttcttcctccgcctcaagccgcggctcggcgacttctcgctctcccacacgctgcgctcccctgcggcggcgccagcgccacggaaggccggggagccgagctccgacggccggcgggaggtgaagcctctggantacatgcnnccgttcacgttcaccgggagcgggctcgcgnccgacgtggcggcggcggggaccggcagcggggtcggcacgctgctgtccggcatgcggctcacgaccaggagcgtgctcccgctgtggggccgggcgagcctgcggttcaactggggcctgcgcgtgccgccggagctgctcgccgccgacggcaagggcgcttgcgcgcccgtcagcaanatnccnntgctggtcatgagcaaggtttgcatcgagcagtccccgcgctccgtcacgggcaccaaggccggcggccgagcacctgcacccgccctggcctccacgnacgcggcgtcgnacggcgacgcggcgttctcgctggtgaggcggcagctggagtcgctgagcgtggacaacatgctgntccggcgcgccgtggaggacctccgcgcggaggtccgcagcagcaacagcagggccgcgccgcccgctgcttntgntgcggggcgtggcttgggcagggtggcggcgaccgcgccacaaatgcagacgcagacgcagccttaccacgtgacgaagccggaccaccgaccccggggcgccgcgagggaggctgcggccgcgccggacgacgtcggcgaggagctgaagaaggcgttggaggcccgcctgcgctgagcagccagccttggctgccaggccgcgtcgcgtgcgagcccggcagctcaccggcaccgctcgagtgaaggtgaagtgctagtgtcgctgttaggcgttgtaatctgttggtgtcagcagcaatttggagctgctgatttgatcgctgagaagaaggggatcggacttgtcttgcc

SEQ ID NO: 17079 - protein, 405 aa, Zea mays subsp. mays
  peptide (1)..(405): Ceres Seq. ID no. 12424017
  misc_feature (12)..(292): Homolog of NCBI NO: 23103741 NR Description: hypothetical protein [Azotobacter vinelandii]
  misc_feature (2)..(303): Homolog of NCBI NO: 73648 NR Description: immediate-early protein IE180 - suid herpesvirus
  misc_feature (2)..(393): Homolog of NCBI NO: 29247944 NR Description: GLP_26_54603_52153 [Giardia lamblia ATCC 50803]
  misc_feature (4)..(398): Homolog of NCBI NO: 23106243 NR Description: hypothetical protein [Azotobacter vinelandii]
  misc_feature (164)..(164): Xaa is any aa, unknown or other
  misc_feature (166)..(166): Xaa is any aa, unknown or other
  misc_feature (167)..(167): Xaa is any aa, unknown or other
  misc_feature (177)..(177): Xaa is any aa, unknown or other
  misc_feature (238)..(238): Xaa is any aa, unknown or other
  misc_feature (239)..(239): Xaa is any aa, unknown or other
  misc_feature (240)..(240): Xaa is any aa, unknown or other
  misc_feature (273)..(273): Xaa is any aa, unknown or other
  misc_feature (277)..(277): Xaa is any aa, unknown or other
  misc_feature (299)..(299): Xaa is any aa, unknown or other
  misc_feature (323)..(323): Xaa is any aa, unknown or other
  misc_feature (324)..(324): Xaa is any aa, unknown or other
NPPDPHPHLATPTDEGVDQVPRRRAAAGARQGADRRAGAAVPVGARGGKGPAGAPLRRVHGVRIGPGAPALVPPQRPGAPLRARRARGARPAGVPGTRALRARRRVQPRRPRPLLVARLLPPPQAAARRLLALPHAALPCGGASATEGRGAELRRPAGGEASGXHXXVHVHRERARXRRGGGGDRQRGRHAAVRHAAHDQERAPAVGPGEPAVQLGPARAAGAARRRRQGRLRARQQXXXAGHEQGLHRAVPALRHGHQGRRPSTCTRPGLHXRGVXRRRGVLAGEAAAGVAERGQHAXPARRGGPPRGGPQQQQQGRAARCXXCGAWLGQGGGDRATNADADAALPRDEAGPPTPGRREGGCGRAGRRRRGAEEGVGGPPALSSQPWLPGRVACEPGSSPAPLE

SEQ ID NO: 17080 - protein, 382 aa, Zea mays subsp. mays
  peptide (1)..(382): Ceres Seq. ID no. 12424018
  misc_feature (64)..(141): Homolog of NCBI NO: 21740989 NR Description: OSJNBa0019K04.27 [Oryza sativa (japonica
  misc_feature (14)..(326): Homolog of NCBI NO: 15230911 NR Description: putative protein
  misc_feature (14)..(382): Homolog of NCBI NO: 28411873 NR Description: OSJNBa0016N23.25 [Oryza sativa (japonica
  misc_feature (163)..(163): Xaa is any aa, unknown or other
  misc_feature (166)..(166): Xaa is any aa, unknown or other
  misc_feature (177)..(177): Xaa is any aa, unknown or other
  misc_feature (237)..(237): Xaa is any aa, unknown or other
  misc_feature (238)..(238): Xaa is any aa, unknown or other
  misc_feature (239)..(239): Xaa is any aa, unknown or other
  misc_feature (240)..(240): Xaa is any aa, unknown or other
  misc_feature (273)..(273): Xaa is any aa, unknown or other
  misc_feature (277)..(277): Xaa is any aa, unknown or other
  misc_feature (299)..(299): Xaa is any aa, unknown or other
  misc_feature (323)..(323): Xaa is any aa, unknown or other
  misc_feature (324)..(324): Xaa is any aa, unknown or other
IHRIPTHTSLPRPMKASIKFRDDERPLVRAKVPIVVLGLPFQSGLAAGRDLRELRFDVSTAFASGPALRLSYRPNDPALPFALAVRAGLGPLGSPARAPFALAAEFNLVAHDPSSSPAFFLRLKPRLGDFSLSHTLRSPAAAPAPRKAGEPSSDGRREVKPLXYMXPFTFTGSGLAXDVAAAGTGSGVGTLLSGMRLTTRSVLPLWGRASLRFNWGLRVPPELLAADGKGACAPVSXXXXLVMSKVCIEQSPRSVTGTKAGGRAPAPALASTXAASXGDAAFSLVRRQLESLSVDNMLXRRAVEDLRAEVRSSNSRAAPPAAXXAGRGLGRVAATAPQMQTQTQPYHVTKPDHRPRGAAREAAAAPDDVGEELKKALEARLR

SEQ ID NO: 17081 - protein, 369 aa, Zea mays subsp. mays
  peptide (1)..(369): Ceres Seq. ID no. 12424019
  misc_feature (51)..(128): Homolog of NCBI NO: 21740989 NR Description: OSJNBa0019K04.27 [Oryza sativa (japonica
  misc_feature (1)..(313): Homolog of NCBI NO: 15230911 NR Description: putative protein
  misc_feature (1)..(369): Homolog of NCBI NO: 28411873 NR Description: OSJNBa0016N23.25 [Oryza sativa (japonica
  misc_feature (150)..(150): Xaa is any aa, unknown or other
  misc_feature (153)..(153): Xaa is any aa, unknown or other
  misc_feature (164)..(164): Xaa is any aa, unknown or other
  misc_feature (224)..(224): Xaa is any aa, unknown or other
  misc_feature (225)..(225): Xaa is any aa, unknown or other
  misc_feature (226)..(226): Xaa is any aa, unknown or other
  misc_feature (227)..(227): Xaa is any aa, unknown or other
  misc_feature (260)..(260): Xaa is any aa, unknown or other
  misc_feature (264)..(264): Xaa is any aa, unknown or other
  misc_feature (286)..(286): Xaa is any aa, unknown or other
  misc_feature (310)..(310): Xaa is any aa, unknown or other
  misc_feature (311)..(311): Xaa is any aa, unknown or other
MKASIKFRDDERPLVRAKVPIVVLGLPFQSGLAAGRDLRELRFDVSTAFASGPALRLSYRPNDPALPFALAVRAGLGPLGSPARAPFALAAEFNLVAHDPSSSPAFFLRLKPRLGDFSLSHTLRSPAAAPAPRKAGEPSSDGRREVKPLXYMXPFTFTGSGLAXDVAAAGTGSGVGTLLSGMRLTTRSVLPLWGRASLRFNWGLRVPPELLAADGKGACAPVSXXXXLVMSKVCIEQSPRSVTGTKAGGRAPAPALASTXAASXGDAAFSLVRRQLESLSVDNMLXRRAVEDLRAEVRSSNSRAAPPAAXXAGRGLGRVAATAPQMQTQTQPYHVTKPDHRPRGAAREAAAAPDDVGEELKKALEARLR

SEQ ID NO: 17082 - DNA, 1789 bp, Zea mays subsp. mays
  misc_feature (1)..(1789): Ceres Seq. ID no. 13586275
  misc_feature: MA Experiment ID: 20000487 Result: Up-regulated in Transcription
  misc_feature: MA Experiment 20000487 PARAMETER Experiment Name: Zm_50mM_NH4NO3_L_to_H_P Parameter: Organism Value: Zea mays
  misc_feature: MA Experiment 20000487 PARAMETER Experiment Name: Zm_50mM_NH4NO3_L_to_H_P Parameter: Timepoint (hr) Value: 4
  misc_feature: MA Experiment 20000487 PARAMETER Experiment Name: Zm_50mM_NH4NO3_L_to_H_P Parameter: Tissue Value: Leaves
  misc_feature: MA Experiment 20000487 PARAMETER Experiment Name: Zm_50mM_NH4NO3_L_to_H_P Parameter: Treatment Value: 50mM NH4NO3 vs. 100mM Mannitol
  misc_feature: MA Experiment ID: 20000488 Result: Up-regulated in Transcription
  misc_feature: MA Experiment 20000488 PARAMETER Experiment Name: Zm_50mM_NH4NO3_L_to_H_P Parameter: Organism Value: Zea mays
  misc_feature: MA Experiment 20000488 PARAMETER Experiment Name: Zm_50mM_NH4NO3_L_to_H_P Parameter: Timepoint (hr) Value: 8
  misc_feature: MA Experiment 20000488 PARAMETER Experiment Name: Zm_50mM_NH4NO3_L_to_H_P Parameter: Tissue Value: Leaves
  misc_feature: MA Experiment 20000488 PARAMETER Experiment Name: Zm_50mM_NH4NO3_L_to_H_P Parameter: Treatment Value: 50mM NH4NO3 vs. 100mM Mannitol
  misc_feature: MA Experiment ID: 20001612 Result: Up-regulated in Transcription
  misc_feature: MA Experiment 20001612 PARAMETER Experiment Name: Zm_50ppm_KNO3_L-to-H_P Parameter: Age (day) Value: 19
  misc_feature: MA Experiment 20001612 PARAMETER Experiment Name: Zm_50ppm_KNO3_L-to-H_P Parameter: Organism Value: Zea mays
  misc_feature: MA Experiment 20001612 PARAMETER Experiment Name: Zm_50ppm_KNO3_L-to-H_P Parameter: Plant Line Value: 35A19
  misc_feature: MA Experiment 20001612 PARAMETER Experiment Name: Zm_50ppm_KNO3_L-to-H_P Parameter: Timepoint (hr) Value: 8
  misc_feature: MA Experiment 20001612 PARAMETER Experiment Name: Zm_50ppm_KNO3_L-to-H_P Parameter: Tissue Value: Roots
  misc_feature: MA Experiment 20001612 PARAMETER Experiment Name: Zm_50ppm_KNO3_L-to-H_P Parameter: Treatment Value: 50ppm KNO3 vs. 50ppm KCl
  misc_feature: MA Experiment ID: 20001613 Result: Up-regulated in Transcription
  misc_feature: MA Experiment 20001613 PARAMETER Experiment Name: Zm_50ppm_KNO3_L-to-H_P Parameter: Age (day) Value: 20
  misc_feature: MA Experiment 20001613 PARAMETER Experiment Name: Zm_50ppm_KNO3_L-to-H_P Parameter: Organism Value: Zea mays
  misc_feature: MA Experiment 20001613 PARAMETER Experiment Name: Zm_50ppm_KNO3_L-to-H_P Parameter: Plant Line Value: 35A19
  misc_feature: MA Experiment 20001613 PARAMETER Experiment Name: Zm_50ppm_KNO3_L-to-H_P Parameter: Timepoint (hr) Value: 24
  misc_feature: MA Experiment 20001613 PARAMETER Experiment Name: Zm_50ppm_KNO3_L-to-H_P Parameter: Tissue Value: Roots
  misc_feature: MA Experiment 20001613 PARAMETER Experiment Name: Zm_50ppm_KNO3_L-to-H_P Parameter: Treatment Value: 50ppm KNO3 vs. 50ppm KCl
taaagggaacaaaagctggagctccaccgcggtggcggccgctctagaactagtggatcccccgggctgcaggaattcgcacgagaccattacctagaacatcctaatcgaaaaaagacaccaaacacccatgcacacgcaacctatcaagatgaaaagaggcctcctggtactttggtccttgttctacttcagtgttgcaaacgctgacactagaaaccaggccaagcagcctcttgagttcaatcaattgagagtatcaaggaaatatgttcaaggaaaacaagattcaactcccaagaacggaaccagtccatcagtgcatagaggctcaacaagcaatcaacgggagcaggataagatcatatgtatgcctgggcaaacaggggtagcagagtttgaccaatatgcaggatatgtgactgtggatgccaaggctggaagggctttgttctactactttgttgaggctcctcaagatccttcaaacaaacctcttgtcctatggctgaatggagggcctggctgttcatcctttggatctggggccatggttgaacttggacctttctctgttcatagtgacaacaagacactgtacaagaaanggcatgcatggaacagaatggccaacatgttgttcattgagatcccagctggtgttggatactcatattcaaacactacatcagattactataacactggtgaccaaagaacaacagatgatgcatatacctttcttattacttggctagagaaatttcctgaatatcaggaccgtgatttcttcataactggtgagagctatgcaggtcactatataccagaacttgcaaatctgattctctctaagaatagagccaccaatgtaactagtatcaagcttaaaggtgttgcgattggaaatgcanacttggatgataatttgactctaagagcatcatatgactactattggatgcatgctatgatttcgggaaaagcttataaagccgtcaaggataagtgcggctttaacgggacatacactgaagactgccaaaatgccatggacttagccacccaagaaaaaggaaatattgatgactatgacatctatgcaccaatatgccaagatgcctcaaacccttctaaatcaagtgactcgttagtgtttggtgatccatgcacaaaccactacgtctnctcttacctaaatcgtcctgaggtccaaagggcactccatgcaaacacaacagggttaggctacccatggatggactgtagtcagcagatatttgataattggaaagattcaccagagacaatgctgccatcaatcaagaaactcatttcaagtggcacgagaatatggctgtacagtggtgatatggatgcagtgtgctcattcatttcaacacaatatgtgctggacaatcttgggcttcctatagaagcagcttggcgtccatggcacgtcgacaatgaggttgctggctacgtcattgggtataaagggctggtcttcgcgacggtcagaggagctgtgcacatggtgccatactaccagcctcgcagggcattggcattattctcgtcattcctcgaaggggagctccctccacgctgatcgattaagctagcagggtttgtgaatgccatttactcattttccacagcctatggaatcataggcggtacatgaggcctagtgtttttactatacttgtagctggcctttattttttatataaatatataaaacaaaccaagcagggagctgacgattatattaataaaaaatgag

SEQ ID NO: 17083 - protein, 493 aa, Zea mays subsp. mays
  peptide (1)..(493): Ceres Seq. ID no. 13586276
  misc_feature (82)..(487): Pfam Name: Serine carboxypeptidase Pfam Description: Serine carboxypeptidase
  misc_feature (60)..(492): Homolog of NCBI NO: 15231911 NR Description: serine carboxypeptidase -related [Arabidopsis
  misc_feature (68)..(493): Homolog of NCBI NO: 11967861 NR Description: putative serine carboxypeptidase [Pisum sativum]
  misc_feature (64)..(491): Homolog of NCBI NO: 15227493 NR Description: serine carboxypeptidase -related [Arabidopsis
  misc_feature (18)..(492): Homolog of NCBI NO: 34899032 NR Description: putative serine carboxypeptidase II-3 precursor
  misc_feature (62)..(491): Homolog of NCBI NO: 15229439 NR Description: serine carboxypeptidase, putative [Arabidopsis
  misc_feature (51)..(492): Homolog of NCBI NO: 1706082 NR Description: Serine carboxypeptidase II-3 precursor (CP-MII.3)
  misc_feature (67)..(493): Homolog of NCBI NO: 34895992 NR Description: putative carboxypeptidase D
  misc_feature (60)..(491): Homolog of NCBI NO: 15234795 NR Description: serine carboxypeptidase -related [Arabidopsis
  misc_feature (60)..(491): Homolog of NCBI NO: 13877871 NR Description: putative serine carboxypeptidase II [Arabidopsis
  misc_feature (8)..(491): Homolog of NCBI NO: 34329345 NR Description: putative serine carboxypeptidase [Medicago
  misc_feature (160)..(160): Xaa is any aa, unknown or other
  misc_feature (262)..(262): Xaa is any aa, unknown or other
  misc_feature (353)..(353): Xaa is any aa, unknown or other
MHTQPIKMKRGLLVLWSLFYFSVANADTRNQAKQPLEFNQLRVSRKYVQGKQDSTPKNGTSPSVHRGSTSNQREQDKIICMPGQTGVAEFDQYAGYVTVDAKAGRALFYYFVEAPQDPSNKPLVLWLNGGPGCSSFGSGAMVELGPFSVHSDNKTLYKKXHAWNRMANMLFIEIPAGVGYSYSNTTSDYYNTGDQRTTDDAYTFLITWLEKFPEYQDRDFFITGESYAGHYIPELANLILSKNRATNVTSIKLKGVAIGNAXLDDNLTLRASYDYYWMHAMISGKAYKAVKDKCGFNGTYTEDCQNAMDLATQEKGNIDDYDIYAPICQDASNPSKSSDSLVFGDPCTNHYVXSYLNRPEVQRALHANTTGLGYPWMDCSQQIFDNWKDSPETMLPSIKKLISSGTRIWLYSGDMDAVCSFISTQYVLDNLGLPIEAAWRPWHVDNEVAGYVIGYKGLVFATVRGAVHMVPYYQPRRALALFSSFLEGELPPR

SEQ ID NO: 17084 - protein, 486 aa, Zea mays subsp. mays
  peptide (1)..(486): Ceres Seq. ID no. 13586277
  misc_feature (75)..(480): Pfam Name: Serine carboxypeptidase Pfam Description: Serine carboxypeptidase
  misc_feature (53)..(485): Homolog of NCBI NO: 15231911 NR Description: serine carboxypeptidase -related [Arabidopsis
  misc_feature (61)..(486): Homolog of NCBI NO: 11967861 NR Description: putative serine carboxypeptidase [Pisum sativum]
  misc_feature (57)..(484): Homolog of NCBI NO: 15227493 NR Description: serine carboxypeptidase -related [Arabidopsis
  misc_feature (11)..(485): Homolog of NCBI NO: 34899032 NR Description: putative serine carboxypeptidase II-3 precursor
  misc_feature (55)..(484): Homolog of NCBI NO: 15229439 NR Description: serine carboxypeptidase, putative [Arabidopsis
  misc_feature (44)..(485): Homolog of NCBI NO: 1706082 NR Description: Serine carboxypeptidase II-3 precursor (CP-MII.3)
  misc_feature (60)..(486): Homolog of NCBI NO: 34895992 NR Description: putative carboxypeptidase D
  misc_feature (53)..(484): Homolog of NCBI NO: 15234795 NR Description: serine carboxypeptidase -related [Arabidopsis
  misc_feature (53)..(484): Homolog of NCBI NO: 13877871 NR Description: putative serine carboxypeptidase II [Arabidopsis
  misc_feature (1)..(484): Homolog of NCBI NO: 34329345 NR Description: putative serine carboxypeptidase [Medicago
  misc_feature (153)..(153): Xaa is any aa, unknown or other
  misc_feature (255)..(255): Xaa is any aa, unknown or other
  misc_feature (346)..(346): Xaa is any aa, unknown or other
MKRGLLVLWSLFYFSVANADTRNQAKQPLEFNQLRVSRKYVQGKQDSTPKNGTSPSVHRGSTSNQREQDKIICMPGQTGVAEFDQYAGYVTVDAKAGRALFYYFVEAPQDPSNKPLVLWLNGGPGCSSFGSGAMVELGPFSVHSDNKTLYKKXHAWNRMANMLFIEIPAGVGYSYSNTTSDYYNTGDQRTTDDAYTFLITWLEKFPEYQDRDFFITGESYAGHYIPELANLILSKNRATNVTSIKLKGVAIGNAXLDDNLTLRASYDYYWMHAMISGKAYKAVKDKCGFNGTYTEDCQNAMDLATQEKGNIDDYDIYAPICQDASNPSKSSDSLVFGDPCTNHYVXSYLNRPEVQRALHANTTGLGYPWMDCSQQIFDNWKDSPETMLPSIKKLISSGTRIWLYSGDMDAVCSFISTQYVLDNLGLPIEAAWRPWHVDNEVAGYVIGYKGLVFATVRGAVHMVPYYQPRRALALFSSFLEGELPPR

SEQ ID NO: 17085 - protein, 413 aa, Zea mays subsp. mays
  peptide (1)..(413): Ceres Seq. ID no. 13586278
  misc_feature (2)..(407): Pfam Name: Serine carboxypeptidase Pfam Description: Serine carboxypeptidase
  misc_feature (1)..(412): Homolog of NCBI NO: 15231911 NR Description: serine carboxypeptidase -related [Arabidopsis
  misc_feature (1)..(413): Homolog of NCBI NO: 11967861 NR Description: putative serine carboxypeptidase [Pisum sativum]
  misc_feature (1)..(411): Homolog of NCBI NO: 15227493 NR Description: serine carboxypeptidase -related [Arabidopsis
  misc_feature (1)..(412): Homolog of NCBI NO: 34899032 NR Description: putative serine carboxypeptidase II-3 precursor
  misc_feature (1)..(411): Homolog of NCBI NO: 15229439 NR Description: serine carboxypeptidase, putative [Arabidopsis
  misc_feature (1)..(412): Homolog of NCBI NO: 1706082 NR Description: Serine carboxypeptidase II-3 precursor (CP-MII.3)
  misc_feature (1)..(413): Homolog of NCBI NO: 34895992 NR Description: putative carboxypeptidase D
  misc_feature (1)..(411): Homolog of NCBI NO: 15234795 NR Description: serine carboxypeptidase -related [Arabidopsis
  misc_feature (1)..(411): Homolog of NCBI NO: 13877871 NR Description: putative serine carboxypeptidase II [Arabidopsis
  misc_feature (1)..(411): Homolog of NCBI NO: 34329345 NR Description: putative serine carboxypeptidase [Medicago
  misc_feature (80)..(80): Xaa is any aa, unknown or other
  misc_feature (182)..(182): Xaa is any aa, unknown or other
  misc_feature (273)..(273): Xaa is any aa, unknown or other
MPGQTGVAEFDQYAGYVTVDAKAGRALFYYFVEAPQDPSNKPLVLWLNGGPGCSSFGSGAMVELGPFSVHSDNKTLYKKXHAWNRMANMLFIEIPAGVGYSYSNTTSDYYNTGDQRTTDDAYTFLITWLEKFPEYQDRDFFITGESYAGHYIPELANLILSKNRATNVTSIKLKGVAIGNAXLDDNLTLRASYDYYWMHAMISGKAYKAVKDKCGFNGTYTEDCQNAMDLATQEKGNIDDYDIYAPICQDASNPSKSSDSLVFGDPCTNHYVXSYLNRPEVQRALHANTTGLGYPWMDCSQQIFDNWKDSPETMLPSIKKLISSGTRIWLYSGDMDAVCSFISTQYVLDNLGLPIEAAWRPWHVDNEVAGYVIGYKGLVFATVRGAVHMVPYYQPRRALALFSSFLEGELPPR

SEQ ID NO: 17086 - DNA, 1125 bp, Zea mays subsp. mays
  misc_feature (1)..(1125): Ceres Seq. ID no. 12368184
  misc_feature: MA Experiment ID: 108504 Result: Up-regulated in Transcription
  misc_feature: MA Experiment 108504 PARAMETER Experiment Name: Zm_Drought_P Parameter: Age (day) Value: 8
  misc_feature: MA Experiment 108504 PARAMETER Experiment Name: Zm_Drought_P Parameter: Organism Value: Zea mays
  misc_feature: MA Experiment 108504 PARAMETER Experiment Name: Zm_Drought_P Parameter: Plant Line Value: 35A19
  misc_feature: MA Experiment 108504 PARAMETER Experiment Name: Zm_Drought_P Parameter: Timepoint (hr) Value: 12
  misc_feature: MA Experiment 108504 PARAMETER Experiment Name: Zm_Drought_P Parameter: Tissue Value: Aerial
  misc_feature: MA Experiment 108504 PARAMETER Experiment Name: Zm_Drought_P Parameter: Treatment Value: Drought vs. No Drought
  misc_feature: MA Experiment ID: 108522 Result: Up-regulated in Transcription
  misc_feature: MA Experiment 108522 PARAMETER Experiment Name: Zm_42deg_Heat_P Parameter: Age (day) Value: 8
  misc_feature: MA Experiment 108522 PARAMETER Experiment Name: Zm_42deg_Heat_P Parameter: Organism Value: Zea mays
  misc_feature: MA Experiment 108522 PARAMETER Experiment Name: Zm_42deg_Heat_P Parameter: Plant Line Value: 35A19
  misc_feature: MA Experiment 108522 PARAMETER Experiment Name: Zm_42deg_Heat_P Parameter: Temperature (deg C) Value: 42 vs. 22
  misc_feature: MA Experiment 108522 PARAMETER Experiment Name: Zm_42deg_Heat_P Parameter: Timepoint (hr) Value: 1
  misc_feature: MA Experiment 108522 PARAMETER Experiment Name: Zm_42deg_Heat_P Parameter: Tissue Value: Aerial
  misc_feature: MA Experiment ID: 108523 Result: Up-regulated in Transcription
  misc_feature: MA Experiment 108523 PARAMETER Experiment Name: Zm_42deg_Heat_P Parameter: Age (day) Value: 8
  misc_feature: MA Experiment 108523 PARAMETER Experiment Name: Zm_42deg_Heat_P Parameter: Organism Value: Zea mays
  misc_feature: MA Experiment 108523 PARAMETER Experiment Name: Zm_42deg_Heat_P Parameter: Plant Line Value: 35A19
  misc_feature: MA Experiment 108523 PARAMETER Experiment Name: Zm_42deg_Heat_P Parameter: Temperature (deg C) Value: 42 vs. 22
  misc_feature: MA Experiment 108523 PARAMETER Experiment Name: Zm_42deg_Heat_P Parameter: Timepoint (hr) Value: 6
  misc_feature: MA Experiment 108523 PARAMETER Experiment Name: Zm_42deg_Heat_P Parameter: Tissue Value: Aerial
  misc_feature: MA Experiment ID: 108527 Result: Up-regulated in Transcription
  misc_feature: MA Experiment 108527 PARAMETER Experiment Name: Zm_5mM_NO_P Parameter: Age (day) Value: 8
  misc_feature: MA Experiment 108527 PARAMETER Experiment Name: Zm_5mM_NO_P Parameter: Organism Value: Zea mays
  misc_feature: MA Experiment 108527 PARAMETER Experiment Name: Zm_5mM_NO_P Parameter: Plant Line Value: 35A19
  misc_feature: MA Experiment 108527 PARAMETER Experiment Name: Zm_5mM_NO_P Parameter: Timepoint (hr) Value: 6
  misc_feature: MA Experiment 108527 PARAMETER Experiment Name: Zm_5mM_NO_P Parameter: Tissue Value: Aerial
  misc_feature: MA Experiment 108527 PARAMETER Experiment Name: Zm_5mM_NO_P Parameter: Treatment Value: 5mM NO vs. No Treatment
  misc_feature: MA Experiment ID: 108530 Result: Up-regulated in Transcription
  misc_feature: MA Experiment 108530 PARAMETER Experiment Name: Zm_Imbibed_Seeds_P Parameter: Age (day) Value: 6 vs. 2
  misc_feature: MA Experiment 108530 PARAMETER Experiment Name: Zm_Imbibed_Seeds_P Parameter: Organism Value: Zea mays
  misc_feature: MA Experiment 108530 PARAMETER Experiment Name: Zm_Imbibed_Seeds_P Parameter: Plant Line Value: 35A19
  misc_feature: MA Experiment 108530 PARAMETER Experiment Name: Zm_Imbibed_Seeds_P Parameter: Tissue Value: Aerial vs. Embryo
  misc_feature: MA Experiment ID: 108533 Result: Up-regulated in Transcription
  misc_feature: MA Experiment 108533 PARAMETER Experiment Name: Zm_4deg_Cold_P Parameter: Age (hr) Value: 8
  misc_feature: MA Experiment 108533 PARAMETER Experiment Name: Zm_4deg_Cold_P Parameter: Organism Value: Zea mays
  misc_feature: MA Experiment 108533 PARAMETER Experiment Name: Zm_4deg_Cold_P Parameter: Plant Line Value: 35A19
  misc_feature: MA Experiment 108533 PARAMETER Experiment Name: Zm_4deg_Cold_P Parameter: Temperature (deg C) Value: 4 vs. 22
  misc_feature: MA Experiment 108533 PARAMETER Experiment Name: Zm_4deg_Cold_P Parameter: Timepoint (hr) Value: 1
  misc_feature: MA Experiment 108533 PARAMETER Experiment Name: Zm_4deg_Cold_P Parameter: Tissue Value: Aerial
  misc_feature: MA Experiment ID: 108534 Result: Up-regulated in Transcription
  misc_feature: MA Experiment 108534 PARAMETER Experiment Name: Zm_4deg_Cold_P Parameter: Age (hr) Value: 8
  misc_feature: MA Experiment 108534 PARAMETER Experiment Name: Zm_4deg_Cold_P Parameter: Organism Value: Zea mays
  misc_feature: MA Experiment 108534 PARAMETER Experiment Name: Zm_4deg_Cold_P Parameter: Plant Line Value: 35A19
  misc_feature: MA Experiment 108534 PARAMETER Experiment Name: Zm_4deg_Cold_P Parameter: Temperature (deg C) Value: 4 vs. 22
  misc_feature: MA Experiment 108534 PARAMETER Experiment Name: Zm_4deg_Cold_P Parameter: Timepoint (hr) Value: 6
  misc_feature: MA Experiment 108534 PARAMETER Experiment Name: Zm_4deg_Cold_P Parameter: Tissue Value: Aerial
  misc_feature: MA Experiment ID: 108536 Result: Up-regulated in Transcription
  misc_feature: MA Experiment 108536 PARAMETER Experiment Name: Zm_Meristem_P Parameter: Age (day) Value: 8
  misc_feature: MA Experiment 108536 PARAMETER Experiment Name: Zm_Meristem_P Parameter: Organism Value: Zea mays
  misc_feature: MA Experiment 108536 PARAMETER Experiment Name: Zm_Meristem_P Parameter: Plant Line Value: 35A19
  misc_feature: MA Experiment 108536 PARAMETER Experiment Name: Zm_Meristem_P Parameter: Tissue Value: Shoot Meristem vs. Above Shoot Meristem
  misc_feature: MA Experiment ID: 108543 Result: Up-regulated in Transcription
  misc_feature: MA Experiment ID: 108547 Result: Up-regulated in Transcription
  misc_feature: MA Experiment 108547 PARAMETER Experiment Name: Zm_Imbibed_Seeds_P Parameter: Age (day) Value: 4 vs. 2
  misc_feature: MA Experiment 108547 PARAMETER Experiment Name: Zm_Imbibed_Seeds_P Parameter: Organism Value: Zea mays
  misc_feature: MA Experiment 108547 PARAMETER Experiment Name: Zm_Imbibed_Seeds_P Parameter: Plant Line Value: 35A19
  misc_feature: MA Experiment 108547 PARAMETER Experiment Name: Zm_Imbibed_Seeds_P Parameter: Tissue Value: Aerial vs. Embryo
  misc_feature: MA Experiment ID: 108556 Result: Up-regulated in Transcription
  misc_feature: MA Experiment 108556 PARAMETER Experiment Name: Zm_Drought_P Parameter: Age (day) Value: 9
  misc_feature: MA Experiment 108556 PARAMETER Experiment Name: Zm_Drought_P Parameter: Organism Value: Zea mays
  misc_feature: MA Experiment 108556 PARAMETER Experiment Name: Zm_Drought_P Parameter: Plant Line Value: 35A19
  misc_feature: MA Experiment 108556 PARAMETER Experiment Name: Zm_Drought_P Parameter: Timepoint (hr) Value: 24
  misc_feature: MA Experiment 108556 PARAMETER Experiment Name: Zm_Drought_P Parameter: Tissue Value: Aerial
  misc_feature: MA Experiment 108556 PARAMETER Experiment Name: Zm_Drought_P Parameter: Treatment Value: Drought vs. No Drought
  misc_feature: MA Experiment ID: 108559 Result: Up-regulated in Transcription
  misc_feature: MA Experiment 108559 PARAMETER Experiment Name: Zm_5mM_NO_P Parameter: Age (day) Value: 8
  misc_feature: MA Experiment 108559 PARAMETER Experiment Name: Zm_5mM_NO_P Parameter: Organism Value: Zea mays
  misc_feature: MA Experiment 108559 PARAMETER Experiment Name: Zm_5mM_NO_P Parameter: Plant Line Value: 35A19
  misc_feature: MA Experiment 108559 PARAMETER Experiment Name: Zm_5mM_NO_P Parameter: Timepoint (hr) Value: 12
  misc_feature: MA Experiment 108559 PARAMETER Experiment Name: Zm_5mM_NO_P Parameter: Tissue Value: Aerial
  misc_feature: MA Experiment 108559 PARAMETER Experiment Name: Zm_5mM_NO_P Parameter: Treatment Value: 5mM NO vs. No Treatment
  misc_feature: MA Experiment ID: 108597 Result: Up-regulated in Transcription
  misc_feature: MA Experiment 108597 PARAMETER Experiment Name: Zm_100uM_ABA_P Parameter: Age (day) Value: 9
  misc_feature: MA Experiment 108597 PARAMETER Experiment Name: Zm_100uM_ABA_P Parameter: Organism Value: Zea mays
  misc_feature: MA Experiment 108597 PARAMETER Experiment Name: Zm_100uM_ABA_P Parameter: Plant Line Value: 35A19
  misc_feature: MA Experiment 108597 PARAMETER Experiment Name: Zm_100uM_ABA_P Parameter: Timepoint (hr) Value: 24
  misc_feature: MA Experiment 108597 PARAMETER Experiment Name: Zm_100uM_ABA_P Parameter: Tissue Value: Aerial
  misc_feature: MA Experiment 108597 PARAMETER Experiment Name: Zm_100uM_ABA_P Parameter: Treatment Value: 100uM ABA vs. No Treatment
  misc_feature: MA Experiment ID: 108687 Result: Up-regulated in Transcription
  misc_feature: MA Experiment 108687 PARAMETER Experiment Name: Zm_Embryos-Flowers__P Parameter: Tissue Value: Embryo vs. Aerial+
  misc_feature: MA Experiment ID: 108688 Result: Down-regulated in Transcription
  misc_feature: MA Experiment 108688 PARAMETER Experiment Name: Zm_Embryos-Flowers__P Parameter: Tissue Value: Immature Flowers vs. Aerial+
  misc_feature: MA Experiment ID: 20000535 Result: Down-regulated in Transcription
  misc_feature: MA Experiment 20000535 PARAMETER Experiment Name: Zm_Hybrid_Seed_Dev_P Parameter: DAP Value: 30 vs. 12
  misc_feature: MA Experiment 20000535 PARAMETER Experiment Name: Zm_Hybrid_Seed_Dev_P Parameter: Organism Value: Zea mays
  misc_feature: MA Experiment 20000535 PARAMETER Experiment Name: Zm_Hybrid_Seed_Dev_P Parameter: Plant Line Value: 35A19
  misc_feature: MA Experiment 20000535 PARAMETER Experiment Name: Zm_Hybrid_Seed_Dev_P Parameter: Tissue Value: Embryo vs. Unfert Floret
cacatagaccaccacgacacccttccccacaccagcagtcgagctgagcacgacacaaagccggctggggccgcctcgccatggcgatccggatgagcaacaacgtgatcggcgcgctgaacctggtgacactcctgctctcggtccccatcctcgtctcgggaatctggctgcggtcgcgcgccgacggcaccgagtgcgaccacctcctgtccaccccggccatcgcgctgggcgcggtgctcatggccgtcgctgtcgcgggtctcgccggcgcctgcttccgcgccacctggctgctatggctctacctcctcgccatgctcgtgttcatcgtcgcgctgctctgcttcaccgtcttcgccttcgccgtcaccaacaggggcgccggggaggccgtgtcgggggtaggctacagggagtaccgcctcggggactactccacctggctgcggcgccacgtcgaaagccgcaaggactgggcccggatccggagctgcctcgccgacgcgcacgtctgcaggcgcctggaggagagggagagggagagcaaggacgcggcgggtctggttcggctcggcctgtccccggtcgagtccgggtgctgcaanccgcccacgagntgcaacttcacgtacaccgncggcacggagtggaccaggacagcggcgggctccgcgcccgccggccgggactgcagcgcgtggggcaacgacgaggacgacctctgctacgggtgccagtcgtgcaaggccggcgtggtggacgcgctcaagcgggactggaagcgggccgccatcgtcaacgtcgtcatcctctccttcatcgtcgtcgtttactccgtcggctgctgcgccttcaagaacagccgccgggacaactacgcctaccacagcggccgcggatggaaacgaggcggtgacgcttaaatgcttaatcaaacttttccttatcatctgcgttagtgcaatttaccattatcttgtatattagcctgagttcgtgatctgctttagttcagtttaccattagcttgtatattattagcctcagtttgtatcacttagttgtttggcagcatattagcagaatttcgggcagtatatgagcagaatttcgctgccc

SEQ ID NO: 17087 - protein, 282 aa, Zea mays subsp. mays
  peptide (1)..(282): Ceres Seq. ID no. 12368185
  misc_feature (5)..(249): Pfam Name: Tetraspanin family Pfam Description: Tetraspanin family
  misc_feature (5)..(267): Homolog of NCBI NO: 15237490 NR Description: senescence-associated protein 5-like protein
  misc_feature (5)..(267): Homolog of NCBI NO: 17979386 NR Description: putative senescence-associated protein 5
  misc_feature (3)..(265): Homolog of NCBI NO: 15238641 NR Description: senescence-associated protein - like; protein id:
  misc_feature (3)..(267): Homolog of NCBI NO: 15231187 NR Description: putative protein
  misc_feature (3)..(273): Homolog of NCBI NO: 21537169 NR Description: senescence-associated protein-like protein
  misc_feature (3)..(273): Homolog of NCBI NO: 15234743 NR Description: senescence-associated protein homolog
  misc_feature (3)..(268): Homolog of NCBI NO: 15234374 NR Description: senescence-associated protein -like
  misc_feature (4)..(277): Homolog of NCBI NO: 20197174 NR Description: hypothetical protein [Arabidopsis thaliana]
  misc_feature (4)..(277): Homolog of NCBI NO: 3551954 NR Description: senescence-associated protein 5 [Hemerocallis
  misc_feature (1)..(279): Homolog of NCBI NO: 29367553 NR Description: senescence-associated protein-like protein
  misc_feature (177)..(177): Xaa is any aa, unknown or other
  misc_feature (181)..(181): Xaa is any aa, unknown or other
  misc_feature (188)..(188): Xaa is any aa, unknown or other
MAIRMSNNVIGALNLVTLLLSVPILVSGIWLRSRADGTECDHLLSTPAIALGAVLMAVAVAGLAGACFRATWLLWLYLLAMLVFIVALLCFTVFAFAVTNRGAGEAVSGVGYREYRLGDYSTWLRRHVESRKDWARIRSCLADAHVCRRLEERERESKDAAGLVRLGLSPVESGCCXPPTXCNFTYTXGTEWTRTAAGSAPAGRDCSAWGNDEDDLCYGCQSCKAGVVDALKRDWKRAAIVNVVILSFIVVVYSVGCCAFKNSRRDNYAYHSGRGWKRGGDA

SEQ ID NO: 17088 - protein, 278 aa, Zea mays subsp. mays
  peptide (1)..(278): Ceres Seq. ID no. 12368186
  misc_feature (1)..(245): Pfam Name: Tetraspanin family Pfam Description: Tetraspanin family
  misc_feature (1)..(263): Homolog of NCBI NO: 15231187 NR Description: putative protein
  misc_feature (1)..(269): Homolog of NCBI NO: 21537169 NR Description: senescence-associated protein-like protein
  misc_feature (1)..(269): Homolog of NCBI NO: 15234743 NR Description: senescence-associated protein homolog
  misc_feature (1)..(264): Homolog of NCBI NO: 15234374 NR Description: senescence-associated protein -like
  misc_feature (1)..(263): Homolog of NCBI NO: 17979386 NR Description: putative senescence-associated protein 5
  misc_feature (1)..(261): Homolog of NCBI NO: 15238641 NR Description: senescence-associated protein - like; protein id:
  misc_feature (1)..(263): Homolog of NCBI NO: 15237490 NR Description: senescence-associated protein 5-like protein
  misc_feature (1)..(273): Homolog of NCBI NO: 20197174 NR Description: hypothetical protein [Arabidopsis thaliana]
  misc_feature (1)..(273): Homolog of NCBI NO: 3551954 NR Description: senescence-associated protein 5 [Hemerocallis
  misc_feature (1)..(275): Homolog of NCBI NO: 29367553 NR Description: senescence-associated protein-like protein
  misc_feature (173)..(173): Xaa is any aa, unknown or other
  misc_feature (177)..(177): Xaa is any aa, unknown or other
  misc_feature (184)..(184): Xaa is any aa, unknown or other
MSNNVIGALNLVTLLLSVPILVSGIWLRSRADGTECDHLLSTPAIALGAVLMAVAVAGLAGACFRATWLLWLYLLAMLVFIVALLCFTVFAFAVTNRGAGEAVSGVGYREYRLGDYSTWLRRHVESRKDWARIRSCLADAHVCRRLEERERESKDAAGLVRLGLSPVESGCCXPPTXCNFTYTXGTEWTRTAAGSAPAGRDCSAWGNDEDDLCYGCQSCKAGVVDALKRDWKRAAIVNVVILSFIVVVYSVGCCAFKNSRRDNYAYHSGRGWKRGGDA

SEQ ID NO: 17089 - protein, 227 aa, Zea mays subsp. mays
  peptide (1)..(227): Ceres Seq. ID no. 12368187
  misc_feature (1)..(194): Pfam Name: Tetraspanin family Pfam Description: Tetraspanin family
  misc_feature (1)..(212): Homolog of NCBI NO: 15237490 NR Description: senescence-associated protein 5-like protein
  misc_feature (1)..(212): Homolog of NCBI NO: 17979386 NR Description: putative senescence-associated protein 5
  misc_feature (1)..(210): Homolog of NCBI NO: 15238641 NR Description: senescence-associated protein - like; protein id:
  misc_feature (1)..(212): Homolog of NCBI NO: 15231187 NR Description: putative protein
  misc_feature (1)..(218): Homolog of NCBI NO: 21537169 NR Description: senescence-associated protein-like protein
  misc_feature (1)..(218): Homolog of NCBI NO: 15234743 NR Description: senescence-associated protein homolog
  misc_feature (1)..(213): Homolog of NCBI NO: 15234374 NR Description: senescence-associated protein -like
  misc_feature (1)..(222): Homolog of NCBI NO: 20197174 NR Description: hypothetical protein [Arabidopsis thaliana]
  misc_feature (1)..(222): Homolog of NCBI NO: 3551954 NR Description: senescence-associated protein 5 [Hemerocallis
  misc_feature (1)..(224): Homolog of NCBI NO: 29367553 NR Description: senescence-associated protein-like protein
  misc_feature (122)..(122): Xaa is any aa, unknown or other
  misc_feature (126)..(126): Xaa is any aa, unknown or other
  misc_feature (133)..(133): Xaa is any aa, unknown or other
MAVAVAGLAGACFRATWLLWLYLLAMLVFIVALLCFTVFAFAVTNRGAGEAVSGVGYREYRLGDYSTWLRRHVESRKDWARIRSCLADAHVCRRLEERERESKDAAGLVRLGLSPVESGCCXPPTXCNFTYTXGTEWTRTAAGSAPAGRDCSAWGNDEDDLCYGCQSCKAGVVDALKRDWKRAAIVNVVILSFIVVVYSVGCCAFKNSRRDNYAYHSGRGWKRGGDA

SEQ ID NO: 17090 - DNA, 1112 bp, Zea mays subsp. mays
  misc_feature (1)..(1112): Ceres Seq. ID no. 12387373
  misc_feature: MA Experiment ID: 108528 Result: Up-regulated in Transcription
  misc_feature: MA Experiment 108528 PARAMETER Experiment Name: Zm_Imbibed_Seeds_P Parameter: Age (day) Value: 5 vs. 2
  misc_feature: MA Experiment 108528 PARAMETER Experiment Name: Zm_Imbibed_Seeds_P Parameter: Organism Value: Zea mays
  misc_feature: MA Experiment 108528 PARAMETER Experiment Name: Zm_Imbibed_Seeds_P Parameter: Plant Line Value: 35A19
  misc_feature: MA Experiment 108528 PARAMETER Experiment Name: Zm_Imbibed_Seeds_P Parameter: Tissue Value: Aerial vs. Embryo
  misc_feature: MA Experiment ID: 108530 Result: Up-regulated in Transcription
  misc_feature: MA Experiment 108530 PARAMETER Experiment Name: Zm_Imbibed_Seeds_P Parameter: Age (day) Value: 6 vs. 2
  misc_feature: MA Experiment 108530 PARAMETER Experiment Name: Zm_Imbibed_Seeds_P Parameter: Organism Value: Zea mays
  misc_feature: MA Experiment 108530 PARAMETER Experiment Name: Zm_Imbibed_Seeds_P Parameter: Plant Line Value: 35A19
  misc_feature: MA Experiment 108530 PARAMETER Experiment Name: Zm_Imbibed_Seeds_P Parameter: Tissue Value: Aerial vs. Embryo
  misc_feature: MA Experiment ID: 108543 Result: Up-regulated in Transcription
  misc_feature: MA Experiment ID: 108545 Result: Up-regulated in Transcription
  misc_feature: MA Experiment 108545 PARAMETER Experiment Name: Zm_Imbibed_Seeds_P Parameter: Age (day) Value: 3 vs. 2
  misc_feature: MA Experiment 108545 PARAMETER Experiment Name: Zm_Imbibed_Seeds_P Parameter: Organism Value: Zea mays
  misc_feature: MA Experiment 108545 PARAMETER Experiment Name: Zm_Imbibed_Seeds_P Parameter: Plant Line Value: 35A19
  misc_feature: MA Experiment 108545 PARAMETER Experiment Name: Zm_Imbibed_Seeds_P Parameter: Tissue Value: Aerial vs. Embryo
  misc_feature: MA Experiment ID: 108547 Result: Up-regulated in Transcription
  misc_feature: MA Experiment 108547 PARAMETER Experiment Name: Zm_Imbibed_Seeds_P Parameter: Age (day) Value: 4 vs. 2
  misc_feature: MA Experiment 108547 PARAMETER Experiment Name: Zm_Imbibed_Seeds_P Parameter: Organism Value: Zea mays
  misc_feature: MA Experiment 108547 PARAMETER Experiment Name: Zm_Imbibed_Seeds_P Parameter: Plant Line Value: 35A19
  misc_feature: MA Experiment 108547 PARAMETER Experiment Name: Zm_Imbibed_Seeds_P Parameter: Tissue Value: Aerial vs. Embryo
  misc_feature: MA Experiment ID: 108559 Result: Down-regulated in Transcription
  misc_feature: MA Experiment 108559 PARAMETER Experiment Name: Zm_5mM_NO_P Parameter: Age (day) Value: 8
  misc_feature: MA Experiment 108559 PARAMETER Experiment Name: Zm_5mM_NO_P Parameter: Organism Value: Zea mays
  misc_feature: MA Experiment 108559 PARAMETER Experiment Name: Zm_5mM_NO_P Parameter: Plant Line Value: 35A19
  misc_feature: MA Experiment 108559 PARAMETER Experiment Name: Zm_5mM_NO_P Parameter: Timepoint (hr) Value: 12
  misc_feature: MA Experiment 108559 PARAMETER Experiment Name: Zm_5mM_NO_P Parameter: Tissue Value: Aerial
  misc_feature: MA Experiment 108559 PARAMETER Experiment Name: Zm_5mM_NO_P Parameter: Treatment Value: 5mM NO vs. No Treatment
  misc_feature: MA Experiment ID: 20000626 Result: Down-regulated in Transcription
  misc_feature: MA Experiment 20000626 PARAMETER Experiment Name: Zm_Herbicide-Treatments_P Parameter: Timepoint (hr) Value: 12
  misc_feature: MA Experiment 20000626 PARAMETER Experiment Name: Zm_Herbicide-Treatments_P Parameter: Tissue Value: Aerial
  misc_feature: MA Experiment 20000626 PARAMETER Experiment Name: Zm_Herbicide-Treatments_P Parameter: Treatment Value: Roundup vs. No Treatment
  misc_feature: MA Experiment ID: 20000630 Result: Down-regulated in Transcription
  misc_feature: MA Experiment 20000630 PARAMETER Experiment Name: Zm_Herbicide-Treatments_P Parameter: Timepoint (hr) Value: 4
  misc_feature: MA Experiment 20000630 PARAMETER Experiment Name: Zm_Herbicide-Treatments_P Parameter: Tissue Value: Aerial
  misc_feature: MA Experiment 20000630 PARAMETER Experiment Name: Zm_Herbicide-Treatments_P Parameter: Treatment Value: Roundup vs. No Treatment
aaccgctcgccgcgtgctccctttgtgactaaaccgcatcctccccgcgccgacctgctccggcgagttaaacatggccgtcctcctccgcggcacctccgccgccgcctcgactgctggcccctcctcggcgctgctcgccaccaccttccgccgctcccgcggctgccttctgccccgtgccgcgccgcagcgccgcttgtatgtggcccgcgcctcggcccagccccttgaggtctgcgctaaggagtccatcaccatccctggccgcctcggagactgtcctttcacacagagggttttgttgactatagaggagaagcatctgccttatgatctgaagctagttgatctagctaataagccagattggttatttgaaatcaacccagaaggtaaagtgcctatcgtgaagctcgaggaaaaatggatcggtgattctgatgttataacacaagcattagaggagaaataccctgaaccacccttggcaactccaccagaaaaagcttcagttggatcaaaaatattttccactttcattggtttcctcaaaagcaaagatccaagcgatggaacagaagaggcactacttaatgagcttacttcatttgatagttatctaaaagacaatggtccatttattaatggtggaataatttctgctgctgatctctctctgggtcctaaactatatcacatggagataactctgggccactacaagaattggtctgttccagattcactttcttatgtaaaaacatatatgaagtcgattttctcaatggattcttttgtcaaaactcaagctctgacagaggatgtaattgctggatggcgcccaaaagtcatgggttaaattcatttctaaagttagacgttaaggagagggagagaggtgtcgattggcgaatggagggtctagatgcaaaggtttgtcgcatggctgtaatatgtacatgaattgtggtggattttgttaggaattttctagggcatagcatatctggtattcatatccaatctcctttgctttgtatgtcaaatggaaaacatctatacaattgtaaaacatatattttatgtaaatgagcattctcgttgaactt

SEQ ID NO: 17091 - protein, 262 aa, Zea mays subsp. mays
  peptide (1)..(262): Ceres Seq. ID no. 12387374
  misc_feature (170)..(240): Pfam Name: Glutathione S-transferase, C-terminal domain Pfam Description: Glutathione S-transferase, C-terminal domain
  misc_feature (53)..(260): Homolog of NCBI NO: 28192425 NR Description: dehydroascorbate reductase [Oryza sativa]
  misc_feature (54)..(260): Homolog of NCBI NO: 28192421 NR Description: dehydroascorbate reductase [Triticum aestivum]
  misc_feature (53)..(260): Homolog of NCBI NO: 28192427 NR Description: dehydroascorbate reductase [Nicotiana tabacum]
  misc_feature (12)..(236): Homolog of NCBI NO: 11271417 NR Description: valine-tRNA ligase-like protein - Arabidopsis
  misc_feature (40)..(256): Homolog of NCBI NO: 10952512 NR Description: dehydroascorbate reductase [Spinacia oleracea]
  misc_feature (45)..(262): Homolog of NCBI NO: 22653415 NR Description: dehydroascorbate reductase [Brassica juncea]
  misc_feature (12)..(262): Homolog of NCBI NO: 17473687 NR Description: unknown protein [Arabidopsis thaliana]
  misc_feature (13)..(262): Homolog of NCBI NO: 22653413 NR Description: dehydroascorbate reductase [Brassica juncea]
  misc_feature (12)..(262): Homolog of NCBI NO: 18418055 NR Description: dehydroascorbate reductase, putative
  misc_feature (12)..(262): Homolog of NCBI NO: 10952514 NR Description: dehydroascorbate reductase [Arabidopsis thaliana]
MAVLLRGTSAAASTAGPSSALLATTFRRSRGCLLPRAAPQRRLYVARASAQPLEVCAKESITIPGRLGDCPFTQRVLLTIEEKHLPYDLKLVDLANKPDWLFEINPEGKVPIVKLEEKWIGDSDVITQALEEKYPEPPLATPPEKASVGSKIFSTFIGFLKSKDPSDGTEEALLNELTSFDSYLKDNGPFINGGIISAADLSLGPKLYHMEITLGHYKNWSVPDSLSYVKTYMKSIFSMDSFVKTQALTEDVIAGWRPKVMG

SEQ ID NO: 17092 - DNA, 1393 bp, Zea mays subsp. mays
  misc_feature (1)..(1393): Ceres Seq. ID no. 12360042
  misc_feature: MA Experiment ID: 108504 Result: Up-regulated in Transcription
  misc_feature: MA Experiment 108504 PARAMETER Experiment Name: Zm_Drought_P Parameter: Age (day) Value: 8
  misc_feature: MA Experiment 108504 PARAMETER Experiment Name: Zm_Drought_P Parameter: Organism Value: Zea mays
  misc_feature: MA Experiment 108504 PARAMETER Experiment Name: Zm_Drought_P Parameter: Plant Line Value: 35A19
  misc_feature: MA Experiment 108504 PARAMETER Experiment Name: Zm_Drought_P Parameter: Timepoint (hr) Value: 12
  misc_feature: MA Experiment 108504 PARAMETER Experiment Name: Zm_Drought_P Parameter: Tissue Value: Aerial
  misc_feature: MA Experiment 108504 PARAMETER Experiment Name: Zm_Drought_P Parameter: Treatment Value: Drought vs. No Drought
  misc_feature: MA Experiment ID: 108535 Result: Down-regulated in Transcription
  misc_feature: MA Experiment 108535 PARAMETER Experiment Name: Zm_Meristem_P Parameter: Age (day) Value: 8
  misc_feature: MA Experiment 108535 PARAMETER Experiment Name: Zm_Meristem_P Parameter: Organism Value: Zea mays
  misc_feature: MA Experiment 108535 PARAMETER Experiment Name: Zm_Meristem_P Parameter: Plant Line Value: 35A19
  misc_feature: MA Experiment 108535 PARAMETER Experiment Name: Zm_Meristem_P Parameter: Tissue Value: Root Meristem vs. Above Root Meristem
  misc_feature: MA Experiment ID: 108689 Result: Up-regulated in Transcription
  misc_feature: MA Experiment 108689 PARAMETER Experiment Name: Zm_Drought_Roots_P Parameter: Age (day) Value: 9
  misc_feature: MA Experiment 108689 PARAMETER Experiment Name: Zm_Drought_Roots_P Parameter: Organism Value: Zea mays
  misc_feature: MA Experiment 108689 PARAMETER Experiment Name: Zm_Drought_Roots_P Parameter: Plant Line Value: 35A19
  misc_feature: MA Experiment 108689 PARAMETER Experiment Name: Zm_Drought_Roots_P Parameter: Timepoint (hr) Value: 24
  misc_feature: MA Experiment 108689 PARAMETER Experiment Name: Zm_Drought_Roots_P Parameter: Tissue Value: Roots
  misc_feature: MA Experiment 108689 PARAMETER Experiment Name: Zm_Drought_Roots_P Parameter: Treatment Value: Drought vs. No Drought
  misc_feature: MA Experiment ID: 20000478 Result: Down-regulated in Transcription
  misc_feature: MA Experiment 20000478 PARAMETER Experiment Name: Zm_5mM_SA_P Parameter: Age (day) Value: 11
  misc_feature: MA Experiment 20000478 PARAMETER Experiment Name: Zm_5mM_SA_P Parameter: Organism Value: Zea mays
  misc_feature: MA Experiment 20000478 PARAMETER Experiment Name: Zm_5mM_SA_P Parameter: Plant Line Value: 35A19
  misc_feature: MA Experiment 20000478 PARAMETER Experiment Name: Zm_5mM_SA_P Parameter: Timepoint (hr) Value: 72
  misc_feature: MA Experiment 20000478 PARAMETER Experiment Name: Zm_5mM_SA_P Parameter: Tissue Value: Aerial
  misc_feature: MA Experiment 20000478 PARAMETER Experiment Name: Zm_5mM_SA_P Parameter: Treatment Value: 5mM SA vs. No Treatment
  misc_feature: MA Experiment ID: 20000488 Result: Down-regulated in Transcription
  misc_feature: MA Experiment 20000488 PARAMETER Experiment Name: Zm_50mM_NH4NO3_L_to_H_P Parameter: Organism Value: Zea mays
  misc_feature: MA Experiment 20000488 PARAMETER Experiment Name: Zm_50mM_NH4NO3_L_to_H_P Parameter: Timepoint (hr) Value: 8
  misc_feature: MA Experiment 20000488 PARAMETER Experiment Name: Zm_50mM_NH4NO3_L_to_H_P Parameter: Tissue Value: Leaves
  misc_feature: MA Experiment 20000488 PARAMETER Experiment Name: Zm_50mM_NH4NO3_L_to_H_P Parameter: Treatment Value: 50mM NH4NO3 vs. 100mM Mannitol
  misc_feature: MA Experiment ID: 20000626 Result: Down-regulated in Transcription
  misc_feature: MA Experiment 20000626 PARAMETER Experiment Name: Zm_Herbicide-Treatments_P Parameter: Timepoint (hr) Value: 12
  misc_feature: MA Experiment 20000626 PARAMETER Experiment Name: Zm_Herbicide-Treatments_P Parameter: Tissue Value: Aerial
  misc_feature: MA Experiment 20000626 PARAMETER Experiment Name: Zm_Herbicide-Treatments_P Parameter: Treatment Value: Roundup vs. No Treatment
  misc_feature: MA Experiment ID: 20001613 Result: Down-regulated in Transcription
  misc_feature: MA Experiment 20001613 PARAMETER Experiment Name: Zm_50ppm_KNO3_L-to-H_P Parameter: Age (day) Value: 20
  misc_feature: MA Experiment 20001613 PARAMETER Experiment Name: Zm_50ppm_KNO3_L-to-H_P Parameter: Organism Value: Zea mays
  misc_feature: MA Experiment 20001613 PARAMETER Experiment Name: Zm_50ppm_KNO3_L-to-H_P Parameter: Plant Line Value: 35A19
  misc_feature: MA Experiment 20001613 PARAMETER Experiment Name: Zm_50ppm_KNO3_L-to-H_P Parameter: Timepoint (hr) Value: 24
  misc_feature: MA Experiment 20001613 PARAMETER Experiment Name: Zm_50ppm_KNO3_L-to-H_P Parameter: Tissue Value: Roots
  misc_feature: MA Experiment 20001613 PARAMETER Experiment Name: Zm_50ppm_KNO3_L-to-H_P Parameter: Treatment Value: 50ppm KNO3 vs. 50ppm KCl
  misc_feature: MA Experiment ID: 20001614 Result: Down-regulated in Transcription
  misc_feature: MA Experiment 20001614 PARAMETER Experiment Name: Zm_50ppm_KNO3_L-to-H_P Parameter: Age (day) Value: 21
  misc_feature: MA Experiment 20001614 PARAMETER Experiment Name: Zm_50ppm_KNO3_L-to-H_P Parameter: Organism Value: Zea mays
  misc_feature: MA Experiment 20001614 PARAMETER Experiment Name: Zm_50ppm_KNO3_L-to-H_P Parameter: Plant Line Value: 35A19
  misc_feature: MA Experiment 20001614 PARAMETER Experiment Name: Zm_50ppm_KNO3_L-to-H_P Parameter: Timepoint (hr) Value: 48
  misc_feature: MA Experiment 20001614 PARAMETER Experiment Name: Zm_50ppm_KNO3_L-to-H_P Parameter: Tissue Value: Roots
  misc_feature: MA Experiment 20001614 PARAMETER Experiment Name: Zm_50ppm_KNO3_L-to-H_P Parameter: Treatment Value: 50ppm KNO3 vs. 50ppm KCl
ccaggacaaacaccgcgcacgcaccgccttctccactacttacccgaatcctaacgctattccactgcattctgctccgaaatggccctcgccaccaacgccgccgccgcagccgccatctccggagggtccgcctcacagccccgccgcgcgtcgccgtcgctgctcctgctcaggcgccgctgcgccgtcggcgccgtacacgccgcggagccgtcgaagaaccccggcgtcgtcccggccgccgcgaaggcctcgacgccgacggtcgtgcccgagaacgacaccgtcccggccccgtcccttggcccgaacgcgtcgttgcgcgcgaggtgggcggtggacagctggaggacgaagaaggccctgcagcagccagaatacccgaaccagacagagctcgaggaggcggtcaacacgatcgagaagtctccgccgatcgtctttgccggggaggcgcgtcacctggaggagcgcctcgccgacgccgccgtcggccgcgcattcctcctccagggcggcgactgcgccgaaagttttaaagagttcctgagggggatcgccaacccccttggcatcaaggtgagcgacaagatggagcccggcgagctggtgaagctgatcgacatactgaacccgacgaacaagcccgggaggatcaccgtcatcacaaggatgggggcagagaacatcagggtcaagttacctcaccttatccgcgcggtccgccaggctggacagagtgtcacctggatcactgacccgatgcacgggaacaccatcaagactccttgcggacgaaagactcggccatttgactccattctggccgaggtacgcccttcttcgatgtgcacgaccaagagggaagccagcctggaggtgtccaccttgagatgaccggtcagaacgtgaccgaatgcacgggcgggtcaagcaacgtcaccttcgacaacctgagagaccgctaccacacgcaatgcgaccccaggctgaacgcgtcccagtccctggagctcgccttcatactcgccgagaagcttaggaagcggaggatgcggcggtcgtcggtggcgtctgggctcggcggcagcatcttgcccttgccgccctttggcttttgatgtcttgcacgctggctgtgtgcatgcagggtgcagtgcaggggtgtggtaggagaatcttacgttgtcgtttgccttgctatgtagtatgtaatgctttaatttactgcattctacgtcgttttttcccttcttcttctatttgtttctttttgtacgtagctgcagctcataagagattgaataatactattgctgccacatatatagacggagttggctttgtgaattaataaagtccattgctgctgtcgtcaactgtttccttc

SEQ ID NO: 17093 - protein, 272 aa, Zea mays subsp. mays
  peptide (1)..(272): Ceres Seq. ID no. 12360043
  misc_feature (84)..(156): Pfam Name: Class-II DAHP synthetase family Pfam Description: Class-II DAHP synthetase family
  misc_feature (155)..(253): Homolog of NCBI NO: 114193 NR Description: Phospho-2-dehydro-3-deoxyheptonate aldolase 1, precursor (Phospho-2-keto-3-deoxyheptonate aldolase 1) (DAHP
  misc_feature (37)..(156): Homolog of NCBI NO: 114193 NR Description: Phospho-2-dehydro-3-deoxyheptonate aldolase 1, precursor (Phospho-2-keto-3-deoxyheptonate aldolase 1) (DAHP
  misc_feature (155)..(253): Homolog of NCBI NO: 24745903 NR Description: 3-deoxy-D-arabino-heptulosonate 7-phosphate
  misc_feature (37)..(156): Homolog of NCBI NO: 24745903 NR Description: 3-deoxy-D-arabino-heptulosonate 7-phosphate
  misc_feature (155)..(253): Homolog of NCBI NO: 584777 NR Description: Phospho-2-dehydro-3-deoxyheptonate aldolase 1, precursor (Phospho-2-keto-3-deoxyheptonate aldolase 1) (DAHP
  misc_feature (37)..(156): Homolog of NCBI NO: 584777 NR Description: Phospho-2-dehydro-3-deoxyheptonate aldolase 1, precursor (Phospho-2-keto-3-deoxyheptonate aldolase 1) (DAHP
  misc_feature (155)..(253): Homolog of NCBI NO: 584778 NR Description: Phospho-2-dehydro-3-deoxyheptonate aldolase 2, precursor (Phospho-2-keto-3-deoxyheptonate aldolase 2) (DAHP
  misc_feature (1)..(156): Homolog of NCBI NO: 584778 NR Description: Phospho-2-dehydro-3-deoxyheptonate aldolase 2, precursor (Phospho-2-keto-3-deoxyheptonate aldolase 2) (DAHP
  misc_feature (155)..(253): Homolog of NCBI NO: 34906844 NR Description: putative phospho-2-dehydro-3-deoxyheptonate
  misc_feature (1)..(156): Homolog of NCBI NO: 34906844 NR Description: putative phospho-2-dehydro-3-deoxyheptonate
MALATNAAAAAAISGGSASQPRRASPSLLLLRRRCAVGAVHAAEPSKNPGVVPAAAKASTPTVVPENDTVPAPSLGPNASLRARWAVDSWRTKKALQQPEYPNQTELEEAVNTIEKSPPIVFAGEARHLEERLADAAVGRAFLLQGGDCAESFKEFLRGIANPLGIKVSDKMEPGELVKLIDILNPTNKPGRITVITRMGAENIRVKLPHLIRAVRQAGQSVTWITDPMHGNTIKTPCGRKTRPFDSILAEVRPSSMCTTKREASLEVSTLR

SEQ ID NO: 17094 - protein, 183 aa, Zea mays subsp. mays
  peptide (1)..(183): Ceres Seq. ID no. 12360044
  misc_feature (17)..(176): Homolog of NCBI NO: 14017929 NR Description: KIAA1856 protein [Homo sapiens]
  misc_feature (5)..(177): Homolog of NCBI NO: 25143299 NR Description: pre-mRNA splicing SR protein related RSR-1 (68.2
QDKHRARTAFSTTYPNPNAIPLHSAPKWPSPPTPPPQPPSPEGPPHSPAARRRRCSCSGAAAPSAPYTPRSRRRTPASSRPPRRPRRRRSCPRTTPSRPRPLARTRRCARGGRWTAGGRRRPCSSQNTRTRQSSRRRSTRSRSLRRSSLPGRRVTWRSASPTPPSAAHSSSRAATAPKVLKSS

SEQ ID NO: 17095 - protein, 179 aa, Zea mays subsp. mays
  peptide (1)..(179): Ceres Seq. ID no. 12360045
RTNTAHAPPSPLLTRILTLFHCILLRNGPRHQRRRRSRHLRRVRLTAPPRVAVAAPAQAPLRRRRRTRRGAVEEPRRRPGRREGLDADGRARERHRPGPVPWPERVVAREVGGGQLEDEEGPAAARIPEPDRARGGGQHDREVSADRLCRGGASPGGAPRRRRRRPRIPPPGRRLRRKF

SEQ ID NO: 17096 - DNA, 1391 bp, Zea mays subsp. mays
  misc_feature (1)..(1391): Ceres Seq. ID no. 12415942
  misc_feature: MA Experiment ID: 108527 Result: Up-regulated in Transcription
  misc_feature: MA Experiment 108527 PARAMETER Experiment Name: Zm_5mM_NO_P Parameter: Age (day) Value: 8
  misc_feature: MA Experiment 108527 PARAMETER Experiment Name: Zm_5mM_NO_P Parameter: Organism Value: Zea mays
  misc_feature: MA Experiment 108527 PARAMETER Experiment Name: Zm_5mM_NO_P Parameter: Plant Line Value: 35A19
  misc_feature: MA Experiment 108527 PARAMETER Experiment Name: Zm_5mM_NO_P Parameter: Timepoint (hr) Value: 6
  misc_feature: MA Experiment 108527 PARAMETER Experiment Name: Zm_5mM_NO_P Parameter: Tissue Value: Aerial
  misc_feature: MA Experiment 108527 PARAMETER Experiment Name: Zm_5mM_NO_P Parameter: Treatment Value: 5mM NO vs. No Treatment
  misc_feature: MA Experiment ID: 108543 Result: Down-regulated in Transcription
  misc_feature: MA Experiment ID: 108544 Result: Down-regulated in Transcription
  misc_feature: MA Experiment ID: 108559 Result: Up-regulated in Transcription
  misc_feature: MA Experiment 108559 PARAMETER Experiment Name: Zm_5mM_NO_P Parameter: Age (day) Value: 8
  misc_feature: MA Experiment 108559 PARAMETER Experiment Name: Zm_5mM_NO_P Parameter: Organism Value: Zea mays
  misc_feature: MA Experiment 108559 PARAMETER Experiment Name: Zm_5mM_NO_P Parameter: Plant Line Value: 35A19
  misc_feature: MA Experiment 108559 PARAMETER Experiment Name: Zm_5mM_NO_P Parameter: Timepoint (hr) Value: 12
  misc_feature: MA Experiment 108559 PARAMETER Experiment Name: Zm_5mM_NO_P Parameter: Tissue Value: Aerial
  misc_feature: MA Experiment 108559 PARAMETER Experiment Name: Zm_5mM_NO_P Parameter: Treatment Value: 5mM NO vs. No Treatment
  misc_feature: MA Experiment ID: 20000480 Result: Up-regulated in Transcription
  misc_feature: MA Experiment 20000480 PARAMETER Experiment Name: Zm_Drought_P Parameter: Age (day) Value: 11
  misc_feature: MA Experiment 20000480 PARAMETER Experiment Name: Zm_Drought_P Parameter: Organism Value: Zea mays
  misc_feature: MA Experiment 20000480 PARAMETER Experiment Name: Zm_Drought_P Parameter: Plant Line Value: 35A19
  misc_feature: MA Experiment 20000480 PARAMETER Experiment Name: Zm_Drought_P Parameter: Timepoint (hr) Value: 72
  misc_feature: MA Experiment 20000480 PARAMETER Experiment Name: Zm_Drought_P Parameter: Tissue Value: Aerial
  misc_feature: MA Experiment 20000480 PARAMETER Experiment Name: Zm_Drought_P Parameter: Treatment Value: Drought vs. No Drought
  misc_feature: MA Experiment ID: 20000535 Result: Up-regulated in Transcription
  misc_feature: MA Experiment 20000535 PARAMETER Experiment Name: Zm_Hybrid_Seed_Dev_P Parameter: DAP Value: 30 vs. 12
  misc_feature: MA Experiment 20000535 PARAMETER Experiment Name: Zm_Hybrid_Seed_Dev_P Parameter: Organism Value: Zea mays
  misc_feature: MA Experiment 20000535 PARAMETER Experiment Name: Zm_Hybrid_Seed_Dev_P Parameter: Plant Line Value: 35A19
  misc_feature: MA Experiment 20000535 PARAMETER Experiment Name: Zm_Hybrid_Seed_Dev_P Parameter: Tissue Value: Embryo vs. Unfert Floret
  misc_feature: MA Experiment ID: 20000626 Result: Up-regulated in Transcription
  misc_feature: MA Experiment 20000626 PARAMETER Experiment Name: Zm_Herbicide-Treatments_P Parameter: Timepoint (hr) Value: 12
  misc_feature: MA Experiment 20000626 PARAMETER Experiment Name: Zm_Herbicide-Treatments_P Parameter: Tissue Value: Aerial
  misc_feature: MA Experiment 20000626 PARAMETER Experiment Name: Zm_Herbicide-Treatments_P Parameter: Treatment Value: Roundup vs. No Treatment
agtattcgaagagaagtctgatcgtcttatctgcggtctggcggcgtccgacgagagtggaaatgatcgctctctccaagatagccctggtgtctgcggtggcgctgctggggctgggctgggcgtaccaggccacccgcccgccgcccccggcgatcttgggcgccccaggagggccgccgatcagctcacctagaatccggctgaaagacggccggcaccttgcctacagggaggaaggagtgcgcagggagaacgccaggttcaggatcgttttcatccatggcttctcctccaccaaggagagcgggttccccgtgtcccaggagcttgtggagcagctgggcatatacatgctcttcttcgacagagccgggtatggcgacagcgacgccaacccgaagcgctgcctcaagagcgacgccacggacgtcgaggagctcgccgatgcgctgcagctcggggacaggttctacgtggtagggtgctccgtgggcggctacccagcatggagctgcctcaaatacattcccaacaggctggccggagtggccctggccgcgccggcggtgaactactggtggccgctgcctgctaacgtgtcgagggccgcgtacgggaggctccacgcccgggaccgtaggaccttctggatcgcgcaccacgcgccggcgctgctccacgcctggctcgcgcagaagtggttccgggtgtcgccgatcgtcagggccgagcgcgacgcgttcaccgccaaggactgggagatcctcaccgcgctctggaggaagcagcgcgagagcggcctggtggacccggccaaagcgacgcagcaggggatctacgagtcgctgtgccgggacgcgacgatcctgttcggcacgtgggagttcgaccccacggagatcgagaacccgttccccgacggggagggcggcgtcagcatctggcaggggcgccaggacaagatcgtccaggtggagatccagcggtacgtggcgcagaagctgccgtgggtgcggtaccacgagcaccccgaggccgggcacgcgctcccggacatggacgggatcggggacgagatcatcagggagctcctgctcggcgagagcgagctgcaccaggagcccagggcgcaggatgcctgagcctcaactgaacgttgggaagggttggtgaagagattaaactagctactgtagtagatagatactcgcgtataactggagaataaacggtgttggccccaaggcagtggttgatgaacttccagttgctggattttgctggccagtagtttgtcacgctacttattggtccccacatagatgggttaattaagagacgcttcataggtgggttgatgaactcagattcagcaaccttcatgttcc

SEQ ID NO: 17097 - protein, 380 aa, Zea mays subsp. mays
  peptide (1)..(380): Ceres Seq. ID no. 12415943
  misc_feature (116)..(377): Pfam Name: alpha/beta hydrolase fold Pfam Description: alpha/beta hydrolase fold
  misc_feature (15)..(370): Homolog of NCBI NO: 15221193 NR Description: unknown protein; protein id: At1g74290.1
  misc_feature (33)..(365): Homolog of NCBI NO: 21537089 NR Description: unknown [Arabidopsis thaliana]
  misc_feature (26)..(377): Homolog of NCBI NO: 38346334 NR Description: OSJNBa0073L04.5 [Oryza sativa (japonica
  misc_feature (22)..(365): Homolog of NCBI NO: 18410582 NR Description: expressed protein
  misc_feature (31)..(365): Homolog of NCBI NO: 21592662 NR Description: unknown [Arabidopsis thaliana]
  misc_feature (43)..(364): Homolog of NCBI NO: 37536162 NR Description: putative alpha/beta hydrolase
  misc_feature (43)..(364): Homolog of NCBI NO: 22122901 NR Description: hypothetical protein [Oryza sativa (japonica
  misc_feature (32)..(366): Homolog of NCBI NO: 15242253 NR Description: putative protein
  misc_feature (24)..(377): Homolog of NCBI NO: 15228377 NR Description: putative protein
  misc_feature (21)..(368): Homolog of NCBI NO: 34908462 NR Description: P0683F02.22 [Oryza sativa (japonica
YSKRSLIVLSAVWRRPTRVEMIALSKIALVSAVALLGLGWAYQATRPPPPAILGAPGGPPISSPRIRLKDGRHLAYREEGVRRENARFRIVFIHGFSSTKESGFPVSQELVEQLGIYMLFFDRAGYGDSDANPKRCLKSDATDVEELADALQLGDRFYVVGCSVGGYPAWSCLKYIPNRLAGVALAAPAVNYWWPLPANVSRAAYGRLHARDRRTFWIAHHAPALLHAWLAQKWFRVSPIVRAERDAFTAKDWEILTALWRKQRESGLVDPAKATQQGIYESLCRDATILFGTWEFDPTEIENPFPDGEGGVSIWQGRQDKIVQVEIQRYVAQKLPWVRYHEHPEAGHALPDMDGIGDEIIRELLLGESELHQEPRAQDA

SEQ ID NO: 17098 - protein, 360 aa, Zea mays subsp. mays
  peptide (1)..(360): Ceres Seq. ID no. 12415944
  misc_feature (96)..(357): Pfam Name: alpha/beta hydrolase fold Pfam Description: alpha/beta hydrolase fold
  misc_feature (1)..(350): Homolog of NCBI NO: 15221193 NR Description: unknown protein; protein id: At1g74290.1
  misc_feature (13)..(345): Homolog of NCBI NO: 21537089 NR Description: unknown [Arabidopsis thaliana]
  misc_feature (6)..(357): Homolog of NCBI NO: 38346334 NR Description: OSJNBa0073L04.5 [Oryza sativa (japonica
  misc_feature (2)..(345): Homolog of NCBI NO: 18410582 NR Description: expressed protein
  misc_feature (11)..(345): Homolog of NCBI NO: 21592662 NR Description: unknown [Arabidopsis thaliana]
  misc_feature (23)..(344): Homolog of NCBI NO: 37536162 NR Description: putative alpha/beta hydrolase
  misc_feature (23)..(344): Homolog of NCBI NO: 22122901 NR Description: hypothetical protein [Oryza sativa (japonica
  misc_feature (12)..(346): Homolog of NCBI NO: 15242253 NR Description: putative protein
  misc_feature (4)..(357): Homolog of NCBI NO: 15228377 NR Description: putative protein
  misc_feature (1)..(348): Homolog of NCBI NO: 34908462 NR Description: P0683F02.22 [Oryza sativa (japonica
MIALSKIALVSAVALLGLGWAYQATRPPPPAILGAPGGPPISSPRIRLKDGRHLAYREEGVRRENARFRIVFIHGFSSTKESGFPVSQELVEQLGIYMLFFDRAGYGDSDANPKRCLKSDATDVEELADALQLGDRFYVVGCSVGGYPAWSCLKYIPNRLAGVALAAPAVNYWWPLPANVSRAAYGRLHARDRRTFWIAHHAPALLHAWLAQKWFRVSPIVRAERDAFTAKDWEILTALWRKQRESGLVDPAKATQQGIYESLCRDATILFGTWEFDPTEIENPFPDGEGGVSIWQGRQDKIVQVEIQRYVAQKLPWVRYHEHPEAGHALPDMDGIGDEIIRELLLGESELHQEPRAQDA

SEQ ID NO: 17099 - protein, 263 aa, Zea mays subsp. mays
  peptide (1)..(263): Ceres Seq. ID no. 12415945
  misc_feature (1)..(260): Pfam Name: alpha/beta hydrolase fold Pfam Description: alpha/beta hydrolase fold
  misc_feature (1)..(253): Homolog of NCBI NO: 15221193 NR Description: unknown protein; protein id: At1g74290.1
  misc_feature (1)..(248): Homolog of NCBI NO: 21537089 NR Description: unknown [Arabidopsis thaliana]
  misc_feature (1)..(260): Homolog of NCBI NO: 38346334 NR Description: OSJNBa0073L04.5 [Oryza sativa (japonica
  misc_feature (1)..(248): Homolog of NCBI NO: 18410582 NR Description: expressed protein
  misc_feature (1)..(248): Homolog of NCBI NO: 21592662 NR Description: unknown [Arabidopsis thaliana]
  misc_feature (1)..(247): Homolog of NCBI NO: 37536162 NR Description: putative alpha/beta hydrolase
  misc_feature (1)..(247): Homolog of NCBI NO: 22122901 NR Description: hypothetical protein [Oryza sativa (japonica
  misc_feature (1)..(249): Homolog of NCBI NO: 15242253 NR Description: putative protein
  misc_feature (1)..(260): Homolog of NCBI NO: 15228377 NR Description: putative protein
  misc_feature (1)..(251): Homolog of NCBI NO: 34908462 NR Description: P0683F02.22 [Oryza sativa (japonica
MLFFDRAGYGDSDANPKRCLKSDATDVEELADALQLGDRFYVVGCSVGGYPAWSCLKYIPNRLAGVALAAPAVNYWWPLPANVSRAAYGRLHARDRRTFWIAHHAPALLHAWLAQKWFRVSPIVRAERDAFTAKDWEILTALWRKQRESGLVDPAKATQQGIYESLCRDATILFGTWEFDPTEIENPFPDGEGGVSIWQGRQDKIVQVEIQRYVAQKLPWVRYHEHPEAGHALPDMDGIGDEIIRELLLGESELHQEPRAQDA

SEQ ID NO: 17100 - DNA, 990 bp, Zea mays subsp. mays
  misc_feature (1)..(990): Ceres Seq. ID no. 12382534
  misc_feature: MA Experiment ID: 108529 Result: Up-regulated in Transcription
  misc_feature: MA Experiment 108529 PARAMETER Experiment Name: Zm_Imbibed_Seeds_P Parameter: Age (day) Value: 5 vs. 2
  misc_feature: MA Experiment 108529 PARAMETER Experiment Name: Zm_Imbibed_Seeds_P Parameter: Organism Value: Zea mays
  misc_feature: MA Experiment 108529 PARAMETER Experiment Name: Zm_Imbibed_Seeds_P Parameter: Plant Line Value: 35A19
  misc_feature: MA Experiment 108529 PARAMETER Experiment Name: Zm_Imbibed_Seeds_P Parameter: Tissue Value: Roots vs. Embryo
  misc_feature: MA Experiment ID: 108535 Result: Down-regulated in Transcription
  misc_feature: MA Experiment 108535 PARAMETER Experiment Name: Zm_Meristem_P Parameter: Age (day) Value: 8
  misc_feature: MA Experiment 108535 PARAMETER Experiment Name: Zm_Meristem_P Parameter: Organism Value: Zea mays
  misc_feature: MA Experiment 108535 PARAMETER Experiment Name: Zm_Meristem_P Parameter: Plant Line Value: 35A19
  misc_feature: MA Experiment 108535 PARAMETER Experiment Name: Zm_Meristem_P Parameter: Tissue Value: Root Meristem vs. Above Root Meristem
aaactagccaaggtccaagtgaccatcacgtttcagtttcattctctgggtaggggagctgctgcagccgtgtgtatggcgtcctcttcctcctccctgacgcggttatttatcccgcctcaccgagcgcaccatgaggcagccatggccgcttcggccggcgcctctctgcgtaacggcggcgggatgcagatgctggatcttgtgatgcagaggtgggccgagatggtgttgtgctgcggcgcggattggaattgcgtgtcgcagctgtggaacagggtggtgctgcgcaagtggctaaacatcggcgcggggtccggggattccgacttcagcgccgacgagcacgatacctcggagggcgagaccgaccgcgaaggcatgtctggtttgaatcatgccctatgtaacgaagaaaggatattaggtggattgggtgcaagcacgactggtgacgaaatgagcgatttaccttactgccttagaatgcncagatcagagatcagtcgtgctcagtatgttgatgttagagaactcaggatttatgtagggacatggaatgttggaggcagatttccacccagtgacttggacattgaagaatggctggctacggaggagccagctgaaatttatgttatcggctttcaagagattgttccactcaatgctgggaatatatttggtgctgaagacaatcgtccagttgcagtatgggagcacatcatccgtgaaactttgaataagaattgttcagataaatcagggtttaagtgccatagtgatcctctttcaccatcaaggtttaatccatcagatgttgttctttccatggaacatggattgcttagtgagtctgacaaggatagtgatggggagcttcatccattgattgaacgagaccataattgtggacttcaagctaaaacaaatgaaaatnttgaagctttcccagaagataatttagcctgtgatgccatcattgataat

SEQ ID NO: 17101 - protein, 330 aa, Zea mays subsp. mays
  peptide (1)..(330): Ceres Seq. ID no. 12382535
  misc_feature (181)..(301): Pfam Name: Endonuclease/Exonuclease/phosphatase family Pfam Description: Endonuclease/Exonuclease/phosphatase family
  misc_feature (108)..(301): Homolog of NCBI NO: 25352249 NR Description: hypothetical protein F14O23.9 [imported] -
  misc_feature (108)..(301): Homolog of NCBI NO: 15081807 NR Description: At1g71710/F14O23_9 [Arabidopsis thaliana]
  misc_feature (108)..(301): Homolog of NCBI NO: 18409892 NR Description: RIBOSOMAL PROTEIN, putative
  misc_feature (73)..(318): Homolog of NCBI NO: 30693006 NR Description: inositol polyphosphate 5-phosphatase I (IP5PI)
  misc_feature (73)..(292): Homolog of NCBI NO: 4204695 NR Description: putative inositol polyphosphate 5-phosphatase
  misc_feature (73)..(120): Homolog of NCBI NO: 10444261 NR Description: inositol polyphosphate 5-phosphatase I
  misc_feature (146)..(318): Homolog of NCBI NO: 10444261 NR Description: inositol polyphosphate 5-phosphatase I
  misc_feature (73)..(120): Homolog of NCBI NO: 18399139 NR Description: inositol polyphosphate 5-phosphatase II, putative
  misc_feature (146)..(318): Homolog of NCBI NO: 18399139 NR Description: inositol polyphosphate 5-phosphatase II, putative
  misc_feature (174)..(301): Homolog of NCBI NO: 34910610 NR Description: P0683B11.14 [Oryza sativa (japonica
  misc_feature (164)..(164): Xaa is any aa, unknown or other
  misc_feature (314)..(314): Xaa is any aa, unknown or other
KLAKVQVTITFQFHSLGRGAAAAVCMASSSSSLTRLFIPPHRAHHEAAMAASAGASLRNGGGMQMLDLVMQRWAEMVLCCGADWNCVSQLWNRVVLRKWLNIGAGSGDSDFSADEHDTSEGETDREGMSGLNHALCNEERILGGLGASTTGDEMSDLPYCLRMXRSEISRAQYVDVRELRIYVGTWNVGGRFPPSDLDIEEWLATEEPAEIYVIGFQEIVPLNAGNIFGAEDNRPVAVWEHIIRETLNKNCSDKSGFKCHSDPLSPSRFNPSDVVLSMEHGLLSESDKDSDGELHPLIERDHNCGLQAKTNENXEAFPEDNLACDAIIDN

SEQ ID NO: 17102 - protein, 305 aa, Zea mays subsp. mays
  peptide (1)..(305): Ceres Seq. ID no. 12382536
  misc_feature (156)..(276): Pfam Name: Endonuclease/Exonuclease/phosphatase family Pfam Description: Endonuclease/Exonuclease/phosphatase family
  misc_feature (149)..(276): Homolog of NCBI NO: 34910610 NR Description: P0683B11.14 [Oryza sativa (japonica
  misc_feature (83)..(276): Homolog of NCBI NO: 25352249 NR Description: hypothetical protein F14O23.9 [imported] -
  misc_feature (83)..(276): Homolog of NCBI NO: 15081807 NR Description: At1g71710/F14O23_9 [Arabidopsis thaliana]
  misc_feature (83)..(276): Homolog of NCBI NO: 18409892 NR Description: RIBOSOMAL PROTEIN, putative
  misc_feature (48)..(293): Homolog of NCBI NO: 30693006 NR Description: inositol polyphosphate 5-phosphatase I (IP5PI)
  misc_feature (48)..(267): Homolog of NCBI NO: 4204695 NR Description: putative inositol polyphosphate 5-phosphatase
  misc_feature (48)..(95): Homolog of NCBI NO: 10444261 NR Description: inositol polyphosphate 5-phosphatase I
  misc_feature (121)..(293): Homolog of NCBI NO: 10444261 NR Description: inositol polyphosphate 5-phosphatase I
  misc_feature (48)..(95): Homolog of NCBI NO: 18399139 NR Description: inositol polyphosphate 5-phosphatase II, putative
  misc_feature (121)..(293): Homolog of NCBI NO: 18399139 NR Description: inositol polyphosphate 5-phosphatase II, putative
  misc_feature (139)..(139): Xaa is any aa, unknown or other
  misc_feature (289)..(289): Xaa is any aa, unknown or other
MASSSSSLTRLFIPPHRAHHEAAMAASAGASLRNGGGMQMLDLVMQRWAEMVLCCGADWNCVSQLWNRVVLRKWLNIGAGSGDSDFSADEHDTSEGETDREGMSGLNHALCNEERILGGLGASTTGDEMSDLPYCLRMXRSEISRAQYVDVRELRIYVGTWNVGGRFPPSDLDIEEWLATEEPAEIYVIGFQEIVPLNAGNIFGAEDNRPVAVWEHIIRETLNKNCSDKSGFKCHSDPLSPSRFNPSDVVLSMEHGLLSESDKDSDGELHPLIERDHNCGLQAKTNENXEAFPEDNLACDAIIDN

SEQ ID NO: 17103 - protein, 282 aa, Zea mays subsp. mays
  peptide (1)..(282): Ceres Seq. ID no. 12382537
  misc_feature (133)..(253): Pfam Name: Endonuclease/Exonuclease/phosphatase family Pfam Description: Endonuclease/Exonuclease/phosphatase family
  misc_feature (60)..(253): Homolog of NCBI NO: 25352249 NR Description: hypothetical protein F14O23.9 [imported] -
  misc_feature (60)..(253): Homolog of NCBI NO: 15081807 NR Description: At1g71710/F14O23_9 [Arabidopsis thaliana]
  misc_feature (60)..(253): Homolog of NCBI NO: 18409892 NR Description: RIBOSOMAL PROTEIN, putative
  misc_feature (25)..(270): Homolog of NCBI NO: 30693006 NR Description: inositol polyphosphate 5-phosphatase I (IP5PI)
  misc_feature (25)..(244): Homolog of NCBI NO: 4204695 NR Description: putative inositol polyphosphate 5-phosphatase
  misc_feature (25)..(72): Homolog of NCBI NO: 10444261 NR Description: inositol polyphosphate 5-phosphatase I
  misc_feature (98)..(270): Homolog of NCBI NO: 10444261 NR Description: inositol polyphosphate 5-phosphatase I
  misc_feature (25)..(72): Homolog of NCBI NO: 18399139 NR Description: inositol polyphosphate 5-phosphatase II, putative
  misc_feature (98)..(270): Homolog of NCBI NO: 18399139 NR Description: inositol polyphosphate 5-phosphatase II, putative
  misc_feature (126)..(253): Homolog of NCBI NO: 34910610 NR Description: P0683B11.14 [Oryza sativa (japonica
  misc_feature (116)..(116): Xaa is any aa, unknown or other
  misc_feature (266)..(266): Xaa is any aa, unknown or other
MAASAGASLRNGGGMQMLDLVMQRWAEMVLCCGADWNCVSQLWNRVVLRKWLNIGAGSGDSDFSADEHDTSEGETDREGMSGLNHALCNEERILGGLGASTTGDEMSDLPYCLRMXRSEISRAQYVDVRELRIYVGTWNVGGRFPPSDLDIEEWLATEEPAEIYVIGFQEIVPLNAGNIFGAEDNRPVAVWEHIIRETLNKNCSDKSGFKCHSDPLSPSRFNPSDVVLSMEHGLLSESDKDSDGELHPLIERDHNCGLQAKTNENXEAFPEDNLACDAIIDN

SEQ ID NO: 17104 - DNA, 1642 bp, Zea mays subsp. mays
  misc_feature (1)..(1642): Ceres Seq. ID no. 13496541
  misc_feature: MA Experiment ID: 108535 Result: Down-regulated in Transcription
  misc_feature: MA Experiment 108535 PARAMETER Experiment Name: Zm_Meristem_P Parameter: Age (day) Value: 8
  misc_feature: MA Experiment 108535 PARAMETER Experiment Name: Zm_Meristem_P Parameter: Organism Value: Zea mays
  misc_feature: MA Experiment 108535 PARAMETER Experiment Name: Zm_Meristem_P Parameter: Plant Line Value: 35A19
  misc_feature: MA Experiment 108535 PARAMETER Experiment Name: Zm_Meristem_P Parameter: Tissue Value: Root Meristem vs. Above Root Meristem
  misc_feature: MA Experiment ID: 108543 Result: Up-regulated in Transcription
  misc_feature: MA Experiment ID: 20000535 Result: Down-regulated in Transcription
  misc_feature: MA Experiment 20000535 PARAMETER Experiment Name: Zm_Hybrid_Seed_Dev_P Parameter: DAP Value: 30 vs. 12
  misc_feature: MA Experiment 20000535 PARAMETER Experiment Name: Zm_Hybrid_Seed_Dev_P Parameter: Organism Value: Zea mays
  misc_feature: MA Experiment 20000535 PARAMETER Experiment Name: Zm_Hybrid_Seed_Dev_P Parameter: Plant Line Value: 35A19
  misc_feature: MA Experiment 20000535 PARAMETER Experiment Name: Zm_Hybrid_Seed_Dev_P Parameter: Tissue Value: Embryo vs. Unfert Floret
cgcaattaaccctcactaaagggaacaaaagctggagctccaccgcggtggcggccgctctagaactagtggatcccccgggctgcaggaattcgcacgagaccattacctanaacatcctaatcgaaaaacgacacgcccttgtatccgacagcgaatctccactggcactactgctccgagcccgagacgaataatggcgggggcggcagcggcggcagtagctgtgctggtgctcgccgcggcgcacggcgcgctctgcgggtgctgggaccaccgccgcgcagcgccagcgccgtcgccgtcctgggaccaccgcgggacgaacagcacggcggcgctggagggttgcgggtgcgagccgtcgccgccgccgccgtggaggttcaggaacgacaagctgagggcgctgtacccggtgatccaggcgttcaagcagacgatcacgtgcgacccgctgggcgtgacggcgacgtggacgggcacggagctctgcgacagcttcttcaacaacggcagcaccaccacgtactacaggggattctactgcgactacccgccggacgcgccgggcgtgctgacggtggcgtccatcgacttcaacgggttcgggctgtgcgcgccgtcgctggccgggttcatcgacgcgttcccggacctggcgctgttccacgccaactccaacaacttctccggcgacgtgccggacctgacccagctgcgctacttctacgagctggacctgtccaacaacaacttctcgggcgcgttcccggaggccgtggtgccgctgggcgggctgctgttcctggacctccgcttcaaccggtacgcgggggaggtgccagcgccggtgttcgcgctcacggtggaggcgctcttcctcaacaacaacggctttggcgggcggatcccggacacgctcggcagcacgggcgcgcagtacctggtggtggccaacaaccagttcacgggccccatcccgcgctccatctacaacgcgtcggccacgctgtcggaggtgctgttcctcaacaaccgcctgtccgggtgcctcccctacgagatcgggctggtggaggggctggccgtgttcgacgccggcgggaacgagatcacggggcccgtgccgctgtcgttcggctgcctccgcgacgtggaggagctcaacctggcggggaaccagctgtacgggcaggtgcccgacgtggtgtgcctgctggcgcggacggggaagctgcagaacctgtcgctgtcggacaacttcttccactcggtggggcaccactgcatggagctggtgcgcagccgtgtcctggacgtgcggcgcaactgcattctggggttccccgaccagcggcccccgctcgagtgcgccgccttctacgtcgaccccagcaagcactgccccttcatcccgcacatcccctgcgagctgcctgggtacacggcgcacggccatcctcaccaaggccatgggggtgggaactgatccatggccacccatggtgatttggtagcctttttggggggaggaataagttccactgctgcattcatgacactgggtggggctcgaaaaactccatccgtgacaaataatattatccttttaataagaggtactagttatttacagcgt

SEQ ID NO: 17105 - protein, 431 aa, Zea mays subsp. mays
  peptide (1)..(431): Ceres Seq. ID no. 13496542
  misc_feature (60)..(404): Homolog of NCBI NO: 15233976 NR Description: leucine-rich repeat extensin family [Arabidopsis
  misc_feature (32)..(404): Homolog of NCBI NO: 37718858 NR Description: putative leucine-rich receptor-like protein
  misc_feature (43)..(396): Homolog of NCBI NO: 15228861 NR Description: leucine-rich repeat extensin family [Arabidopsis
  misc_feature (60)..(404): Homolog of NCBI NO: 15235668 NR Description: leucine-rich repeat extensin family [Arabidopsis
  misc_feature (60)..(393): Homolog of NCBI NO: 34912294 NR Description: putative extensin-like protein
  misc_feature (60)..(404): Homolog of NCBI NO: 15230120 NR Description: leucine-rich repeat extensin family [Arabidopsis
  misc_feature (55)..(413): Homolog of NCBI NO: 15222811 NR Description: leucine rich repeat protein family [Arabidopsis
  misc_feature (34)..(412): Homolog of NCBI NO: 15230349 NR Description: leucine rich repeat protein family [Arabidopsis
  misc_feature (61)..(420): Homolog of NCBI NO: 32490271 NR Description: OSJNBb0116K07.13 [Oryza sativa (japonica
  misc_feature (64)..(405): Homolog of NCBI NO: 30680322 NR Description: extensin-related protein [Arabidopsis thaliana]
MAGAAAAAVAVLVLAAAHGALCGCWDHRRAAPAPSPSWDHRGTNSTAALEGCGCEPSPPPPWRFRNDKLRALYPVIQAFKQTITCDPLGVTATWTGTELCDSFFNNGSTTTYYRGFYCDYPPDAPGVLTVASIDFNGFGLCAPSLAGFIDAFPDLALFHANSNNFSGDVPDLTQLRYFYELDLSNNNFSGAFPEAVVPLGGLLFLDLRFNRYAGEVPAPVFALTVEALFLNNNGFGGRIPDTLGSTGAQYLVVANNQFTGPIPRSIYNASATLSEVLFLNNRLSGCLPYEIGLVEGLAVFDAGGNEITGPVPLSFGCLRDVEELNLAGNQLYGQVPDVVCLLARTGKLQNLSLSDNFFHSVGHHCMELVRSRVLDVRRNCILGFPDQRPPLECAAFYVDPSKHCPFIPHIPCELPGYTAHGHPHQGHGGGN

SEQ ID NO: 17106 - DNA, 1204 bp, Zea mays subsp. mays
  misc_feature (1)..(1204): Ceres Seq. ID no. 12360865
  misc_feature: MA Experiment ID: 108515 Result: Up-regulated in Transcription
  misc_feature: MA Experiment 108515 PARAMETER Experiment Name: Zm_2mM_SA_P Parameter: Age (day) Value: 8
  misc_feature: MA Experiment 108515 PARAMETER Experiment Name: Zm_2mM_SA_P Parameter: Organism Value: Zea mays
  misc_feature: MA Experiment 108515 PARAMETER Experiment Name: Zm_2mM_SA_P Parameter: Plant Line Value: 35A19
  misc_feature: MA Experiment 108515 PARAMETER Experiment Name: Zm_2mM_SA_P Parameter: Timepoint (hr) Value: 12
  misc_feature: MA Experiment 108515 PARAMETER Experiment Name: Zm_2mM_SA_P Parameter: Tissue Value: Aerial
  misc_feature: MA Experiment 108515 PARAMETER Experiment Name: Zm_2mM_SA_P Parameter: Treatment Value: 2mM SA vs. No Treatment
  misc_feature: MA Experiment ID: 108526 Result: Up-regulated in Transcription
  misc_feature: MA Experiment 108526 PARAMETER Experiment Name: Zm_5mM_NO_P Parameter: Age (day) Value: 8
  misc_feature: MA Experiment 108526 PARAMETER Experiment Name: Zm_5mM_NO_P Parameter: Organism Value: Zea mays
  misc_feature: MA Experiment 108526 PARAMETER Experiment Name: Zm_5mM_NO_P Parameter: Plant Line Value: 35A19
  misc_feature: MA Experiment 108526 PARAMETER Experiment Name: Zm_5mM_NO_P Parameter: Timepoint (hr) Value: 1
  misc_feature: MA Experiment 108526 PARAMETER Experiment Name: Zm_5mM_NO_P Parameter: Tissue Value: Aerial
  misc_feature: MA Experiment 108526 PARAMETER Experiment Name: Zm_5mM_NO_P Parameter: Treatment Value: 5mM NO vs. No Treatment
  misc_feature: MA Experiment ID: 108527 Result: Up-regulated in Transcription
  misc_feature: MA Experiment 108527 PARAMETER Experiment Name: Zm_5mM_NO_P Parameter: Age (day) Value: 8
  misc_feature: MA Experiment 108527 PARAMETER Experiment Name: Zm_5mM_NO_P Parameter: Organism Value: Zea mays
  misc_feature: MA Experiment 108527 PARAMETER Experiment Name: Zm_5mM_NO_P Parameter: Plant Line Value: 35A19
  misc_feature: MA Experiment 108527 PARAMETER Experiment Name: Zm_5mM_NO_P Parameter: Timepoint (hr) Value: 6
  misc_feature: MA Experiment 108527 PARAMETER Experiment Name: Zm_5mM_NO_P Parameter: Tissue Value: Aerial
  misc_feature: MA Experiment 108527 PARAMETER Experiment Name: Zm_5mM_NO_P Parameter: Treatment Value: 5mM NO vs. No Treatment
  misc_feature: MA Experiment ID: 108528 Result: Down-regulated in Transcription
  misc_feature: MA Experiment 108528 PARAMETER Experiment Name: Zm_Imbibed_Seeds_P Parameter: Age (day) Value: 5 vs. 2
  misc_feature: MA Experiment 108528 PARAMETER Experiment Name: Zm_Imbibed_Seeds_P Parameter: Organism Value: Zea mays
  misc_feature: MA Experiment 108528 PARAMETER Experiment Name: Zm_Imbibed_Seeds_P Parameter: Plant Line Value: 35A19
  misc_feature: MA Experiment 108528 PARAMETER Experiment Name: Zm_Imbibed_Seeds_P Parameter: Tissue Value: Aerial vs. Embryo
  misc_feature: MA Experiment ID: 108530 Result: Down-regulated in Transcription
  misc_feature: MA Experiment 108530 PARAMETER Experiment Name: Zm_Imbibed_Seeds_P Parameter: Age (day) Value: 6 vs. 2
  misc_feature: MA Experiment 108530 PARAMETER Experiment Name: Zm_Imbibed_Seeds_P Parameter: Organism Value: Zea mays
  misc_feature: MA Experiment 108530 PARAMETER Experiment Name: Zm_Imbibed_Seeds_P Parameter: Plant Line Value: 35A19
  misc_feature: MA Experiment 108530 PARAMETER Experiment Name: Zm_Imbibed_Seeds_P Parameter: Tissue Value: Aerial vs. Embryo
  misc_feature: MA Experiment ID: 108543 Result: Up-regulated in Transcription
  misc_feature: MA Experiment ID: 108547 Result: Down-regulated in Transcription
  misc_feature: MA Experiment 108547 PARAMETER Experiment Name: Zm_Imbibed_Seeds_P Parameter: Age (day) Value: 4 vs. 2
  misc_feature: MA Experiment 108547 PARAMETER Experiment Name: Zm_Imbibed_Seeds_P Parameter: Organism Value: Zea mays
  misc_feature: MA Experiment 108547 PARAMETER Experiment Name: Zm_Imbibed_Seeds_P Parameter: Plant Line Value: 35A19
  misc_feature: MA Experiment 108547 PARAMETER Experiment Name: Zm_Imbibed_Seeds_P Parameter: Tissue Value: Aerial vs. Embryo
  misc_feature: MA Experiment ID: 108556 Result: Down-regulated in Transcription
  misc_feature: MA Experiment 108556 PARAMETER Experiment Name: Zm_Drought_P Parameter: Age (day) Value: 9
  misc_feature: MA Experiment 108556 PARAMETER Experiment Name: Zm_Drought_P Parameter: Organism Value: Zea mays
  misc_feature: MA Experiment 108556 PARAMETER Experiment Name: Zm_Drought_P Parameter: Plant Line Value: 35A19
  misc_feature: MA Experiment 108556 PARAMETER Experiment Name: Zm_Drought_P Parameter: Timepoint (hr) Value: 24
  misc_feature: MA Experiment 108556 PARAMETER Experiment Name: Zm_Drought_P Parameter: Tissue Value: Aerial
  misc_feature: MA Experiment 108556 PARAMETER Experiment Name: Zm_Drought_P Parameter: Treatment Value: Drought vs. No Drought
  misc_feature: MA Experiment ID: 108559 Result: Up-regulated in Transcription
  misc_feature: MA Experiment 108559 PARAMETER Experiment Name: Zm_5mM_NO_P Parameter: Age (day) Value: 8
  misc_feature: MA Experiment 108559 PARAMETER Experiment Name: Zm_5mM_NO_P Parameter: Organism Value: Zea mays
  misc_feature: MA Experiment 108559 PARAMETER Experiment Name: Zm_5mM_NO_P Parameter: Plant Line Value: 35A19
  misc_feature: MA Experiment 108559 PARAMETER Experiment Name: Zm_5mM_NO_P Parameter: Timepoint (hr) Value: 12
  misc_feature: MA Experiment 108559 PARAMETER Experiment Name: Zm_5mM_NO_P Parameter: Tissue Value: Aerial
  misc_feature: MA Experiment 108559 PARAMETER Experiment Name: Zm_5mM_NO_P Parameter: Treatment Value: 5mM NO vs. No Treatment
  misc_feature: MA Experiment ID: 20000477 Result: Up-regulated in Transcription
  misc_feature: MA Experiment 20000477 PARAMETER Experiment Name: Zm_5mM_SA_P Parameter: Age (day) Value: 10
  misc_feature: MA Experiment 20000477 PARAMETER Experiment Name: Zm_5mM_SA_P Parameter: Organism Value: Zea mays
  misc_feature: MA Experiment 20000477 PARAMETER Experiment Name: Zm_5mM_SA_P Parameter: Plant Line Value: 35A19
  misc_feature: MA Experiment 20000477 PARAMETER Experiment Name: Zm_5mM_SA_P Parameter: Timepoint (hr) Value: 48
  misc_feature: MA Experiment 20000477 PARAMETER Experiment Name: Zm_5mM_SA_P Parameter: Tissue Value: Aerial
  misc_feature: MA Experiment 20000477 PARAMETER Experiment Name: Zm_5mM_SA_P Parameter: Treatment Value: 5mM SA vs. No Treatment
  misc_feature: MA Experiment ID: 20000535 Result: Up-regulated in Transcription
  misc_feature: MA Experiment 20000535 PARAMETER Experiment Name: Zm_Hybrid_Seed_Dev_P Parameter: DAP Value: 30 vs. 12
  misc_feature: MA Experiment 20000535 PARAMETER Experiment Name: Zm_Hybrid_Seed_Dev_P Parameter: Organism Value: Zea mays
  misc_feature: MA Experiment 20000535 PARAMETER Experiment Name: Zm_Hybrid_Seed_Dev_P Parameter: Plant Line Value: 35A19
  misc_feature: MA Experiment 20000535 PARAMETER Experiment Name: Zm_Hybrid_Seed_Dev_P Parameter: Tissue Value: Embryo vs. Unfert Floret
  misc_feature: MA Experiment ID: 20000626 Result: Up-regulated in Transcription
  misc_feature: MA Experiment 20000626 PARAMETER Experiment Name: Zm_Herbicide-Treatments_P Parameter: Timepoint (hr) Value: 12
  misc_feature: MA Experiment 20000626 PARAMETER Experiment Name: Zm_Herbicide-Treatments_P Parameter: Tissue Value: Aerial
  misc_feature: MA Experiment 20000626 PARAMETER Experiment Name: Zm_Herbicide-Treatments_P Parameter: Treatment Value: Roundup vs. No Treatment
  misc_feature: MA Experiment ID: 20000627 Result: Up-regulated in Transcription
  misc_feature: MA Experiment 20000627 PARAMETER Experiment Name: Zm_Herbicide-Treatments_P Parameter: Timepoint (hr) Value: 12
  misc_feature: MA Experiment 20000627 PARAMETER Experiment Name: Zm_Herbicide-Treatments_P Parameter: Tissue Value: Aerial
  misc_feature: MA Experiment 20000627 PARAMETER Experiment Name: Zm_Herbicide-Treatments_P Parameter: Treatment Value: Finale vs. No Treatment
gcacgagaccattacctagaacatcctaatcaaaaaatacaaaaaaggcagacggctacccgttcgaaaaaaaaaacagcagcagccggcggcggccatagcccaggagcccggagctgtttcttcgtcgcaggaatgggcaaggacggcatccagtacgcagtggtggacgccttcacggcggagccgttcaagggcaacccagccgcggtgtgcctcctcgaggacgccgccaaggccgccgacgagcggtggatgcagtccgtcgccgccgagttcaacatctccgagaccgccttcctcctccgggaaaagtcctccgcggccggcgccgtcccgctgttccagctccgatggttcacccccgtcgctgaggtggagctctgcggccacgccacgctggcttccgcccacttcctcttcacatccgtcctcgcggagcacgagaagctcgtcgagttctcgaccaagtccgggattcttacggccaaaaaggtccctgcgccgcagagcacgggcgtgtcgggcgaggggaagctgttcattgagctggatttccccacgattgaccttgttgattgccatccttccgagctgccggcaatccccgacaccctcaacggagcctccattgtcagcgttcacaagtcaacgacggccggtgacctcattgtggagctttcatcaggaaaggaggttgctgatatcattcctaacattcatgaaattgaaaagtgttccggcagaggaattattgttacagggccagcgcctgctggatctggctacgacttcttcacgcgttttttctgcccaaaatttggaatagatgaggatcccgtttgtggcagtgcacattgtgttttagcaccttactggggtgggaagctggggaaacacaaactgatagcgtttcaagcatcccctcggagtggaatactatacctggagttagaagctacaggcaggagagtgcgaattcagggagaagcggtcagtgtgatgactggcaccctcttagcataacccctgctcaatgaacatcctatgtcttcacttcagttgtgtggcatgatttctctgcagctaggaataaattaagtctcttttcacctgtccaaaggtgttagatacactgcttccagactatgaagcagagtgtatgaggatgtttcttttgaataaatcagtgggtgttcaatgc

SEQ ID NO: 17107 - protein, 341 aa, Zea mays subsp. mays
  peptide (1)..(341): Ceres Seq. ID no. 12360866
  misc_feature (154)..(339): Homolog of NCBI NO: 23017885 NR Description: hypothetical protein [Thermobifida fusca]
  misc_feature (50)..(187): Homolog of NCBI NO: 17229436 NR Description: hypothetical protein [Nostoc sp. PCC 7120]
  misc_feature (181)..(340): Homolog of NCBI NO: 17229436 NR Description: hypothetical protein [Nostoc sp. PCC 7120]
  misc_feature (56)..(187): Homolog of NCBI NO: 23129095 NR Description: hypothetical protein [Nostoc punctiforme]
  misc_feature (181)..(339): Homolog of NCBI NO: 23129095 NR Description: hypothetical protein [Nostoc punctiforme]
  misc_feature (51)..(340): Homolog of NCBI NO: 15236201 NR Description: putative protein; protein id: At4g02850.1
  misc_feature (48)..(340): Homolog of NCBI NO: 15218739 NR Description: unknown protein
  misc_feature (46)..(340): Homolog of NCBI NO: 20466358 NR Description: putative protein [Arabidopsis thaliana]
  misc_feature (46)..(340): Homolog of NCBI NO: 15236203 NR Description: putative protein
  misc_feature (46)..(341): Homolog of NCBI NO: 34903112 NR Description: unnamed protein product [Oryza sativa (japonica
ARDHYLEHPNQKIQKRQTATRSKKKTAAAGGGHSPGARSCFFVAGMGKDGIQYAVVDAFTAEPFKGNPAAVCLLEDAAKAADERWMQSVAAEFNISETAFLLREKSSAAGAVPLFQLRWFTPVAEVELCGHATLASAHFLFTSVLAEHEKLVEFSTKSGILTAKKVPAPQSTGVSGEGKLFIELDFPTIDLVDCHPSELPAIPDTLNGASIVSVHKSTTAGDLIVELSSGKEVADIIPNIHEIEKCSGRGIIVTGPAPAGSGYDFFTRFFCPKFGIDEDPVCGSAHCVLAPYWGGKLGKHKLIAFQASPRSGILYLELEATGRRVRIQGEAVSVMTGTLLA

SEQ ID NO: 17108 - protein, 296 aa, Zea mays subsp. mays
  peptide (1)..(296): Ceres Seq. ID no. 12360867
  misc_feature (109)..(294): Homolog of NCBI NO: 23017885 NR Description: hypothetical protein [Thermobifida fusca]
  misc_feature (5)..(142): Homolog of NCBI NO: 17229436 NR Description: hypothetical protein [Nostoc sp. PCC 7120]
  misc_feature (136)..(295): Homolog of NCBI NO: 17229436 NR Description: hypothetical protein [Nostoc sp. PCC 7120]
  misc_feature (11)..(142): Homolog of NCBI NO: 23129095 NR Description: hypothetical protein [Nostoc punctiforme]
  misc_feature (136)..(294): Homolog of NCBI NO: 23129095 NR Description: hypothetical protein [Nostoc punctiforme]
  misc_feature (6)..(295): Homolog of NCBI NO: 15236201 NR Description: putative protein; protein id: At4g02850.1
  misc_feature (3)..(295): Homolog of NCBI NO: 15218739 NR Description: unknown protein
  misc_feature (1)..(295): Homolog of NCBI NO: 20466358 NR Description: putative protein [Arabidopsis thaliana]
  misc_feature (1)..(295): Homolog of NCBI NO: 15236203 NR Description: putative protein
  misc_feature (1)..(296): Homolog of NCBI NO: 34903112 NR Description: unnamed protein product [Oryza sativa (japonica
MGKDGIQYAVVDAFTAEPFKGNPAAVCLLEDAAKAADERWMQSVAAEFNISETAFLLREKSSAAGAVPLFQLRWFTPVAEVELCGHATLASAHFLFTSVLAEHEKLVEFSTKSGILTAKKVPAPQSTGVSGEGKLFIELDFPTIDLVDCHPSELPAIPDTLNGASIVSVHKSTTAGDLIVELSSGKEVADIIPNIHEIEKCSGRGIIVTGPAPAGSGYDFFTRFFCPKFGIDEDPVCGSAHCVLAPYWGGKLGKHKLIAFQASPRSGILYLELEATGRRVRIQGEAVSVMTGTLLA

SEQ ID NO: 17109 - protein, 256 aa, Zea mays subsp. mays
  peptide (1)..(256): Ceres Seq. ID no. 12360868
  misc_feature (69)..(254): Homolog of NCBI NO: 23017885 NR Description: hypothetical protein [Thermobifida fusca]
  misc_feature (1)..(102): Homolog of NCBI NO: 17229436 NR Description: hypothetical protein [Nostoc sp. PCC 7120]
  misc_feature (96)..(255): Homolog of NCBI NO: 17229436 NR Description: hypothetical protein [Nostoc sp. PCC 7120]
  misc_feature (1)..(102): Homolog of NCBI NO: 23129095 NR Description: hypothetical protein [Nostoc punctiforme]
  misc_feature (96)..(254): Homolog of NCBI NO: 23129095 NR Description: hypothetical protein [Nostoc punctiforme]
  misc_feature (1)..(255): Homolog of NCBI NO: 15236201 NR Description: putative protein; protein id: At4g02850.1
  misc_feature (1)..(255): Homolog of NCBI NO: 15218739 NR Description: unknown protein
  misc_feature (1)..(255): Homolog of NCBI NO: 20466358 NR Description: putative protein [Arabidopsis thaliana]
  misc_feature (1)..(255): Homolog of NCBI NO: 15236203 NR Description: putative protein
  misc_feature (1)..(256): Homolog of NCBI NO: 34903112 NR Description: unnamed protein product [Oryza sativa (japonica
MQSVAAEFNISETAFLLREKSSAAGAVPLFQLRWFTPVAEVELCGHATLASAHFLFTSVLAEHEKLVEFSTKSGILTAKKVPAPQSTGVSGEGKLFIELDFPTIDLVDCHPSELPAIPDTLNGASIVSVHKSTTAGDLIVELSSGKEVADIIPNIHEIEKCSGRGIIVTGPAPAGSGYDFFTRFFCPKFGIDEDPVCGSAHCVLAPYWGGKLGKHKLIAFQASPRSGILYLELEATGRRVRIQGEAVSVMTGTLLA

SEQ ID NO: 17110 - DNA, 1410 bp, Zea mays subsp. mays
  misc_feature (1)..(1410): Ceres Seq. ID no. 12383255
  misc_feature: MA Experiment ID: 20001610 Result: Up-regulated in Transcription
  misc_feature: MA Experiment 20001610 PARAMETER Experiment Name: Zm_50ppm_KNO3_L-to-H_P Parameter: Age (day) Value: 19
  misc_feature: MA Experiment 20001610 PARAMETER Experiment Name: Zm_50ppm_KNO3_L-to-H_P Parameter: Organism Value: Zea mays
  misc_feature: MA Experiment 20001610 PARAMETER Experiment Name: Zm_50ppm_KNO3_L-to-H_P Parameter: Plant Line Value: 35A19
  misc_feature: MA Experiment 20001610 PARAMETER Experiment Name: Zm_50ppm_KNO3_L-to-H_P Parameter: Timepoint (hr) Value: 2
  misc_feature: MA Experiment 20001610 PARAMETER Experiment Name: Zm_50ppm_KNO3_L-to-H_P Parameter: Tissue Value: Roots
  misc_feature: MA Experiment 20001610 PARAMETER Experiment Name: Zm_50ppm_KNO3_L-to-H_P Parameter: Treatment Value: 50ppm KNO3 vs. 50ppm KCl
gcacgagaccattacctagaacatcctaatcgaaaaaataatctagcaacagaaaataatgcacagagaagtaatccgagtggcgatcacaccacagagcgagagtgaggagagaactctcactgagaggggagtggatggtcggacggatgacaggagaaatgggagggctcagatcgaggatcctcaggaccttgcagtccttccccaccgccgctcccgcgcagtcgcccaacctcatcctcgcgccgctccctcccggcgccggcccctcgcctcagccgcccgcggcgccgtgcgtccgcctccaggaaccggcgccgctgggcgatgaagcgcgggccgcgcccgaggtgcccggcggcggaggcgatgacgacaaggagaacgtctcgccaggcgccaccccgcgcaaggccaagaagatgaagctcagctcggaccaccacgacagaagcccgggcctcggggaggagcagcgcgccgatggcgccacgcgctaccgccggccggacctcgcctcggcgacgctcttcgacccggacctcctcgccgccttccgccgcgccgtcgacgcctacgcgcaggccctggacgcggccaggcgccgcgacgtcgacgtcgacgacggggacggcgtccctggcggcggaggtgggccgggcgtcgcggaccccctggatgcgttcgagcggcggtgcccgcccggcggcgagcgcgcggtggtgctgtacaccacgtcgatccgcggcgtgcgcaggacgttcgaggactgcgcccgcgtgcgccgcctgctcggcggcctccgcgtcgcgttcctggagcgcgacgtctccatgcacgcgccctacagggaggagctccgggcgctgcttctctgcgagcggggggaggacggcggcggcgcgttccccgtgccgccgcggctgttcgtggacggccggtacctcggcggcgccgacgaggtcgtggcgctgcacgagcggtcccagctccggcccgtgctccggcgcgcggcgtggcgcggcgcaggggagggcccgtgcgcggtctgcggcggcgcgtggttcgtggtgtgcggcgcgtgcggcggcagtcattggctccatgacgccagcgccggcgccggccgcgtgccgtgctccgcgtgcaacgagaacggactcgtgccctgccctctctgcagctaagatcgaacgcgcggggaccgggatggttttggtttgggaggcgttctcttgattatttggtcatgtcatcgctacgatccttcccatggtcgctggaacgaaggattgatctctgtccgtccatcaaattgaacagactgtatttattaagatcattgtatgtccctgtttaagctcagctctcgatgagacgatttttactatttccagccaattctcc

SEQ ID NO: 17111 - protein, 350 aa, Zea mays subsp. mays
  peptide (1)..(350): Ceres Seq. ID no. 12383256
  misc_feature (184)..(350): Homolog of NCBI NO: 15240060 NR Description: putative protein; protein id: At5g06470.1
  misc_feature (179)..(349): Homolog of NCBI NO: 17381052 NR Description: putative peptide transporter protein [Arabidopsis
  misc_feature (179)..(349): Homolog of NCBI NO: 15217659 NR Description: peptide transporter, putative
  misc_feature (92)..(350): Homolog of NCBI NO: 38346321 NR Description: OJ000126_13.3 [Oryza sativa (japonica
  misc_feature (182)..(350): Homolog of NCBI NO: 15235179 NR Description: putative protein; protein id: At4g10630.1
  misc_feature (179)..(349): Homolog of NCBI NO: 34899868 NR Description: OJ1714_H10.16 [Oryza sativa (japonica
  misc_feature (13)..(164): Homolog of NCBI NO: 26451045 NR Description: unknown protein [Arabidopsis thaliana]
  misc_feature (13)..(164): Homolog of NCBI NO: 15240974 NR Description: putative protein; protein id: At5g01420.1
  misc_feature (171)..(350): Homolog of NCBI NO: 26451045 NR Description: unknown protein [Arabidopsis thaliana]
  misc_feature (171)..(350): Homolog of NCBI NO: 15240974 NR Description: putative protein; protein id: At5g01420.1
MVGRMTGEMGGLRSRILRTLQSFPTAAPAQSPNLILAPLPPGAGPSPQPPAAPCVRLQEPAPLGDEARAAPEVPGGGGDDDKENVSPGATPRKAKKMKLSSDHHDRSPGLGEEQRADGATRYRRPDLASATLFDPDLLAAFRRAVDAYAQALDAARRRDVDVDDGDGVPGGGGGPGVADPLDAFERRCPPGGERAVVLYTTSIRGVRRTFEDCARVRRLLGGLRVAFLERDVSMHAPYREELRALLLCERGEDGGGAFPVPPRLFVDGRYLGGADEVVALHERSQLRPVLRRAAWRGAGEGPCAVCGGAWFVVCGACGGSHWLHDASAGAGRVPCSACNENGLVPCPLCS

SEQ ID NO: 17112 - protein, 346 aa, Zea mays subsp. mays
  peptide (1)..(346): Ceres Seq. ID no. 12383257
  misc_feature (175)..(345): Homolog of NCBI NO: 15217659 NR Description: peptide transporter, putative
  misc_feature (88)..(346): Homolog of NCBI NO: 38346321 NR Description: OJ000126_13.3 [Oryza sativa (japonica
  misc_feature (178)..(346): Homolog of NCBI NO: 15235179 NR Description: putative protein; protein id: At4g10630.1
  misc_feature (175)..(345): Homolog of NCBI NO: 34899868 NR Description: OJ1714_H10.16 [Oryza sativa (japonica
  misc_feature (9)..(160): Homolog of NCBI NO: 26451045 NR Description: unknown protein [Arabidopsis thaliana]
  misc_feature (9)..(160): Homolog of NCBI NO: 15240974 NR Description: putative protein; protein id: At5g01420.1
  misc_feature (167)..(346): Homolog of NCBI NO: 26451045 NR Description: unknown protein [Arabidopsis thaliana]
  misc_feature (167)..(346): Homolog of NCBI NO: 15240974 NR Description: putative protein; protein id: At5g01420.1
  misc_feature (180)..(346): Homolog of NCBI NO: 15240060 NR Description: putative protein; protein id: At5g06470.1
  misc_feature (175)..(345): Homolog of NCBI NO: 17381052 NR Description: putative peptide transporter protein [Arabidopsis
MTGEMGGLRSRILRTLQSFPTAAPAQSPNLILAPLPPGAGPSPQPPAAPCVRLQEPAPLGDEARAAPEVPGGGGDDDKENVSPGATPRKAKKMKLSSDHHDRSPGLGEEQRADGATRYRRPDLASATLFDPDLLAAFRRAVDAYAQALDAARRRDVDVDDGDGVPGGGGGPGVADPLDAFERRCPPGGERAVVLYTTSIRGVRRTFEDCARVRRLLGGLRVAFLERDVSMHAPYREELRALLLCERGEDGGGAFPVPPRLFVDGRYLGGADEVVALHERSQLRPVLRRAAWRGAGEGPCAVCGGAWFVVCGACGGSHWLHDASAGAGRVPCSACNENGLVPCPLCS

SEQ ID NO: 17113 - protein, 342 aa, Zea mays subsp. mays
  peptide (1)..(342): Ceres Seq. ID no. 12383258
  misc_feature (176)..(342): Homolog of NCBI NO: 15240060 NR Description: putative protein; protein id: At5g06470.1
  misc_feature (171)..(341): Homolog of NCBI NO: 17381052 NR Description: putative peptide transporter protein [Arabidopsis
  misc_feature (171)..(341): Homolog of NCBI NO: 15217659 NR Description: peptide transporter, putative
  misc_feature (84)..(342): Homolog of NCBI NO: 38346321 NR Description: OJ000126_13.3 [Oryza sativa (japonica
  misc_feature (174)..(342): Homolog of NCBI NO: 15235179 NR Description: putative protein; protein id: At4g10630.1
  misc_feature (171)..(341): Homolog of NCBI NO: 34899868 NR Description: OJ1714_H10.16 [Oryza sativa (japonica
  misc_feature (5)..(156): Homolog of NCBI NO: 26451045 NR Description: unknown protein [Arabidopsis thaliana]
  misc_feature (5)..(156): Homolog of NCBI NO: 15240974 NR Description: putative protein; protein id: At5g01420.1
  misc_feature (163)..(342): Homolog of NCBI NO: 26451045 NR Description: unknown protein [Arabidopsis thaliana]
  misc_feature (163)..(342): Homolog of NCBI NO: 15240974 NR Description: putative protein; protein id: At5g01420.1
MGGLRSRILRTLQSFPTAAPAQSPNLILAPLPPGAGPSPQPPAAPCVRLQEPAPLGDEARAAPEVPGGGGDDDKENVSPGATPRKAKKMKLSSDHHDRSPGLGEEQRADGATRYRRPDLASATLFDPDLLAAFRRAVDAYAQALDAARRRDVDVDDGDGVPGGGGGPGVADPLDAFERRCPPGGERAVVLYTTSIRGVRRTFEDCARVRRLLGGLRVAFLERDVSMHAPYREELRALLLCERGEDGGGAFPVPPRLFVDGRYLGGADEVVALHERSQLRPVLRRAAWRGAGEGPCAVCGGAWFVVCGACGGSHWLHDASAGAGRVPCSACNENGLVPCPLCS

SEQ ID NO: 17114 - DNA, 1136 bp, Zea mays subsp. mays
  misc_feature (1)..(1136): Ceres Seq. ID no. 12383299
  misc_feature: MA Experiment ID: 108523 Result: Down-regulated in Transcription
  misc_feature: MA Experiment 108523 PARAMETER Experiment Name: Zm_42deg_Heat_P Parameter: Age (day) Value: 8
  misc_feature: MA Experiment 108523 PARAMETER Experiment Name: Zm_42deg_Heat_P Parameter: Organism Value: Zea mays
  misc_feature: MA Experiment 108523 PARAMETER Experiment Name: Zm_42deg_Heat_P Parameter: Plant Line Value: 35A19
  misc_feature: MA Experiment 108523 PARAMETER Experiment Name: Zm_42deg_Heat_P Parameter: Temperature (deg C) Value: 42 vs. 22
  misc_feature: MA Experiment 108523 PARAMETER Experiment Name: Zm_42deg_Heat_P Parameter: Timepoint (hr) Value: 6
  misc_feature: MA Experiment 108523 PARAMETER Experiment Name: Zm_42deg_Heat_P Parameter: Tissue Value: Aerial
  misc_feature: MA Experiment ID: 108527 Result: Down-regulated in Transcription
  misc_feature: MA Experiment 108527 PARAMETER Experiment Name: Zm_5mM_NO_P Parameter: Age (day) Value: 8
  misc_feature: MA Experiment 108527 PARAMETER Experiment Name: Zm_5mM_NO_P Parameter: Organism Value: Zea mays
  misc_feature: MA Experiment 108527 PARAMETER Experiment Name: Zm_5mM_NO_P Parameter: Plant Line Value: 35A19
  misc_feature: MA Experiment 108527 PARAMETER Experiment Name: Zm_5mM_NO_P Parameter: Timepoint (hr) Value: 6
  misc_feature: MA Experiment 108527 PARAMETER Experiment Name: Zm_5mM_NO_P Parameter: Tissue Value: Aerial
  misc_feature: MA Experiment 108527 PARAMETER Experiment Name: Zm_5mM_NO_P Parameter: Treatment Value: 5mM NO vs. No Treatment
  misc_feature: MA Experiment ID: 108529 Result: Up-regulated in Transcription
  misc_feature: MA Experiment 108529 PARAMETER Experiment Name: Zm_Imbibed_Seeds_P Parameter: Age (day) Value: 5 vs. 2
  misc_feature: MA Experiment 108529 PARAMETER Experiment Name: Zm_Imbibed_Seeds_P Parameter: Organism Value: Zea mays
  misc_feature: MA Experiment 108529 PARAMETER Experiment Name: Zm_Imbibed_Seeds_P Parameter: Plant Line Value: 35A19
  misc_feature: MA Experiment 108529 PARAMETER Experiment Name: Zm_Imbibed_Seeds_P Parameter: Tissue Value: Roots vs. Embryo
  misc_feature: MA Experiment ID: 108535 Result: Down-regulated in Transcription
  misc_feature: MA Experiment 108535 PARAMETER Experiment Name: Zm_Meristem_P Parameter: Age (day) Value: 8
  misc_feature: MA Experiment 108535 PARAMETER Experiment Name: Zm_Meristem_P Parameter: Organism Value: Zea mays
  misc_feature: MA Experiment 108535 PARAMETER Experiment Name: Zm_Meristem_P Parameter: Plant Line Value: 35A19
  misc_feature: MA Experiment 108535 PARAMETER Experiment Name: Zm_Meristem_P Parameter: Tissue Value: Root Meristem vs. Above Root Meristem
  misc_feature: MA Experiment ID: 108543 Result: Up-regulated in Transcription
  misc_feature: MA Experiment ID: 108545 Result: Down-regulated in Transcription
  misc_feature: MA Experiment 108545 PARAMETER Experiment Name: Zm_Imbibed_Seeds_P Parameter: Age (day) Value: 3 vs. 2
  misc_feature: MA Experiment 108545 PARAMETER Experiment Name: Zm_Imbibed_Seeds_P Parameter: Organism Value: Zea mays
  misc_feature: MA Experiment 108545 PARAMETER Experiment Name: Zm_Imbibed_Seeds_P Parameter: Plant Line Value: 35A19
  misc_feature: MA Experiment 108545 PARAMETER Experiment Name: Zm_Imbibed_Seeds_P Parameter: Tissue Value: Aerial vs. Embryo
  misc_feature: MA Experiment ID: 108546 Result: Up-regulated in Transcription
  misc_feature: MA Experiment 108546 PARAMETER Experiment Name: Zm_Imbibed_Seeds_P Parameter: Age (day) Value: 3 vs. 2
  misc_feature: MA Experiment 108546 PARAMETER Experiment Name: Zm_Imbibed_Seeds_P Parameter: Organism Value: Zea mays
  misc_feature: MA Experiment 108546 PARAMETER Experiment Name: Zm_Imbibed_Seeds_P Parameter: Plant Line Value: 35A19
  misc_feature: MA Experiment 108546 PARAMETER Experiment Name: Zm_Imbibed_Seeds_P Parameter: Tissue Value: Roots vs. Embryo
  misc_feature: MA Experiment ID: 108559 Result: Down-regulated in Transcription
  misc_feature: MA Experiment 108559 PARAMETER Experiment Name: Zm_5mM_NO_P Parameter: Age (day) Value: 8
  misc_feature: MA Experiment 108559 PARAMETER Experiment Name: Zm_5mM_NO_P Parameter: Organism Value: Zea mays
  misc_feature: MA Experiment 108559 PARAMETER Experiment Name: Zm_5mM_NO_P Parameter: Plant Line Value: 35A19
  misc_feature: MA Experiment 108559 PARAMETER Experiment Name: Zm_5mM_NO_P Parameter: Timepoint (hr) Value: 12
  misc_feature: MA Experiment 108559 PARAMETER Experiment Name: Zm_5mM_NO_P Parameter: Tissue Value: Aerial
  misc_feature: MA Experiment 108559 PARAMETER Experiment Name: Zm_5mM_NO_P Parameter: Treatment Value: 5mM NO vs. No Treatment
  misc_feature: MA Experiment ID: 108687 Result: Down-regulated in Transcription
  misc_feature: MA Experiment 108687 PARAMETER Experiment Name: Zm_Embryos-Flowers__P Parameter: Tissue Value: Embryo vs. Aerial+
  misc_feature: MA Experiment ID: 20000108 Result: Down-regulated in Transcription
  misc_feature: MA Experiment 20000108 PARAMETER Experiment Name: Zm_Root-Tips_P Parameter: Age (day) Value: 12
  misc_feature: MA Experiment 20000108 PARAMETER Experiment Name: Zm_Root-Tips_P Parameter: Organism Value: Zea mays
  misc_feature: MA Experiment 20000108 PARAMETER Experiment Name: Zm_Root-Tips_P Parameter: Tissue Value: Root tips vs. Root mid region    35
  misc_feature: MA Experiment 20000108 PARAMETER Experiment Name: Zm_Root-Tips_P Parameter: Tissue Value: Root tips vs. Root mid region   Sequence Listing-Misc Features (4)
  misc_feature: MA Experiment ID: 20000492 Result: Down-regulated in Transcription
  misc_feature: MA Experiment 20000492 PARAMETER Experiment Name: Zm_Hybrid_Seed_Dev_P Parameter: DAP Value: 12
  misc_feature: MA Experiment 20000492 PARAMETER Experiment Name: Zm_Hybrid_Seed_Dev_P Parameter: Organism Value: Zea mays
  misc_feature: MA Experiment 20000492 PARAMETER Experiment Name: Zm_Hybrid_Seed_Dev_P Parameter: Plant Line Value: 35A19
  misc_feature: MA Experiment 20000492 PARAMETER Experiment Name: Zm_Hybrid_Seed_Dev_P Parameter: Tissue Value: Fert Kernel vs. Unfert Floret
  misc_feature: MA Experiment ID: 20000535 Result: Down-regulated in Transcription
  misc_feature: MA Experiment 20000535 PARAMETER Experiment Name: Zm_Hybrid_Seed_Dev_P Parameter: DAP Value: 30 vs. 12
  misc_feature: MA Experiment 20000535 PARAMETER Experiment Name: Zm_Hybrid_Seed_Dev_P Parameter: Organism Value: Zea mays
  misc_feature: MA Experiment 20000535 PARAMETER Experiment Name: Zm_Hybrid_Seed_Dev_P Parameter: Plant Line Value: 35A19
  misc_feature: MA Experiment 20000535 PARAMETER Experiment Name: Zm_Hybrid_Seed_Dev_P Parameter: Tissue Value: Embryo vs. Unfert Floret
gcacgagaccattacctagaacatcctaatcgaaaagggaacagctatagccctgcagttagtagcatctcgtttcagagcccagaggagggaggaagaagaagaagaagcagcagcagcagacatggattgctgcatctgcagccccgtggcgtccgtgtacaggctgccaaggaacgccatctgcgctccctgccaccaaggcgccaaggccatcatcggtttcctcgacagggatggtgagcgggaagaggacgacggcggtggccgttctgtccagcctcctcgcggctcggccaaggggctgagagatgcgtgggagcaggtgaaggagatgagagccagggaggaggagaccaggcagagagctgccttcctccagcacggcttcgcgtcggcgtggaaggagggaatccacaccgacatcgtcgtcaaacctggcaccggtcccgcgattcgagcccacaaggccatcctggccgcgcggtcggaggtgttccggcacatgctgtccggcgacgaccgctgcaaggcccccgccggcgactccatctcgctcccggagctctcccacgacgacctgtccctcctgctcgccttcctctacacaggcgctctggaggcgccaggaggaggaggaggagaggccagccaggaccaggagcggcagctgcacgcgctcttcgtcgcggccgacaagtacgacgtgccgttcctgaggcgggcatgcgaggcgcggctggcggcgggcgtggcgccccggaacgcgctgcggacgcttgaggtcgccgagctgagctccagctccgcgctcatggagcgcgccatgggcgccgtcgtggagcacgccgaggaggtcgtgttctcggcggaatacgagcggttcgccgcacggaacgcggggctgtgcgtcgagatcacccgcgcgctgctggccaggatgccgacgccggcgaggagtgatggcccgtgcttagagcttggaagcagctagctgatgcatgcagttgtattgtatcagatgatgatggatcggaaagaatactactcttgttccagtttcgagtcacgacaatatgtaattgtaaacgcataagttcttctgaaacacgggcgagcacgatgagctagactgt

SEQ ID NO: 17115 - protein, 289 aa, Zea mays subsp. mays
  peptide (1)..(289): Ceres Seq. ID no. 12383300
  misc_feature (93)..(210): Pfam Name: BTB/POZ domain Pfam Description: BTB/POZ domain
  misc_feature (110)..(272): Homolog of NCBI NO: 15233388 NR Description: hypothetical protein; protein id: At4g04090.1
  misc_feature (93)..(269): Homolog of NCBI NO: 34858214 NR Description: similar to speckle-type POZ protein-like 1; POZ
  misc_feature (93)..(269): Homolog of NCBI NO: 27661061 NR Description: similar to speckle-type POZ protein
  misc_feature (63)..(277): Homolog of NCBI NO: 34900926 NR Description: Speckle-type POZ protein-like~contains ESTs
  misc_feature (63)..(277): Homolog of NCBI NO: 22328490 NR Description: hypothetical protein; protein id: At4g08455.1
  misc_feature (88)..(281): Homolog of NCBI NO: 15238994 NR Description: putative protein; protein id: At5g48510.1
  misc_feature (81)..(283): Homolog of NCBI NO: 15226686 NR Description: hypothetical protein; protein id: At2g40450.1
  misc_feature (77)..(281): Homolog of NCBI NO: 33589788 NR Description: At3g01790 [Arabidopsis thaliana]
  misc_feature (77)..(281): Homolog of NCBI NO: 15223447 NR Description: hypothetical protein; protein id: At1g01640.1
  misc_feature (1)..(270): Homolog of NCBI NO: 15228868 NR Description: putative protein; protein id: At3g56230.1
MDCCICSPVASVYRLPRNAICAPCHQGAKAIIGFLDRDGEREEDDGGGRSVQPPRGSAKGLRDAWEQVKEMRAREEETRQRAAFLQHGFASAWKEGIHTDIVVKPGTGPAIRAHKAILAARSEVFRHMLSGDDRCKAPAGDSISLPELSHDDLSLLLAFLYTGALEAPGGGGGEASQDQERQLHALFVAADKYDVPFLRRACEARLAAGVAPRNALRTLEVAELSSSSALMERAMGAVVEHAEEVVFSAEYERFAARNAGLCVEITRALLARMPTPARSDGPCLELGSS

SEQ ID NO: 17116 - protein, 219 aa, Zea mays subsp. mays
  peptide (1)..(219): Ceres Seq. ID no. 12383301
  misc_feature (23)..(140): Pfam Name: BTB/POZ domain Pfam Description: BTB/POZ domain
  misc_feature (40)..(202): Homolog of NCBI NO: 15233388 NR Description: hypothetical protein; protein id: At4g04090.1
  misc_feature (23)..(199): Homolog of NCBI NO: 34858214 NR Description: similar to speckle-type POZ protein-like 1; POZ
  misc_feature (23)..(199): Homolog of NCBI NO: 27661061 NR Description: similar to speckle-type POZ protein
  misc_feature (1)..(207): Homolog of NCBI NO: 34900926 NR Description: Speckle-type POZ protein-like~contains ESTs
  misc_feature (1)..(207): Homolog of NCBI NO: 22328490 NR Description: hypothetical protein; protein id: At4g08455.1
  misc_feature (18)..(211): Homolog of NCBI NO: 15238994 NR Description: putative protein; protein id: At5g48510.1
  misc_feature (11)..(213): Homolog of NCBI NO: 15226686 NR Description: hypothetical protein; protein id: At2g40450.1
  misc_feature (7)..(211): Homolog of NCBI NO: 33589788 NR Description: At3g01790 [Arabidopsis thaliana]
  misc_feature (7)..(211): Homolog of NCBI NO: 15223447 NR Description: hypothetical protein; protein id: At1g01640.1
  misc_feature (1)..(200): Homolog of NCBI NO: 15228868 NR Description: putative protein; protein id: At3g56230.1
MRAREEETRQRAAFLQHGFASAWKEGIHTDIVVKPGTGPAIRAHKAILAARSEVFRHMLSGDDRCKAPAGDSISLPELSHDDLSLLLAFLYTGALEAPGGGGGEASQDQERQLHALFVAADKYDVPFLRRACEARLAAGVAPRNALRTLEVAELSSSSALMERAMGAVVEHAEEVVFSAEYERFAARNAGLCVEITRALLARMPTPARSDGPCLELGSS

SEQ ID NO: 17117 - protein, 162 aa, Zea mays subsp. mays
  peptide (1)..(162): Ceres Seq. ID no. 12383302
  misc_feature (1)..(83): Pfam Name: BTB/POZ domain Pfam Description: BTB/POZ domain
  misc_feature (1)..(145): Homolog of NCBI NO: 15233388 NR Description: hypothetical protein; protein id: At4g04090.1
  misc_feature (1)..(142): Homolog of NCBI NO: 34858214 NR Description: similar to speckle-type POZ protein-like 1; POZ
  misc_feature (1)..(142): Homolog of NCBI NO: 27661061 NR Description: similar to speckle-type POZ protein
  misc_feature (1)..(150): Homolog of NCBI NO: 34900926 NR Description: Speckle-type POZ protein-like~contains ESTs
  misc_feature (1)..(150): Homolog of NCBI NO: 22328490 NR Description: hypothetical protein; protein id: At4g08455.1
  misc_feature (1)..(154): Homolog of NCBI NO: 15238994 NR Description: putative protein; protein id: At5g48510.1
  misc_feature (1)..(156): Homolog of NCBI NO: 15226686 NR Description: hypothetical protein; protein id: At2g40450.1
  misc_feature (1)..(154): Homolog of NCBI NO: 33589788 NR Description: At3g01790 [Arabidopsis thaliana]
  misc_feature (1)..(154): Homolog of NCBI NO: 15223447 NR Description: hypothetical protein; protein id: At1g01640.1
  misc_feature (1)..(143): Homolog of NCBI NO: 15228868 NR Description: putative protein; protein id: At3g56230.1
MLSGDDRCKAPAGDSISLPELSHDDLSLLLAFLYTGALEAPGGGGGEASQDQERQLHALFVAADKYDVPFLRRACEARLAAGVAPRNALRTLEVAELSSSSALMERAMGAVVEHAEEVVFSAEYERFAARNAGLCVEITRALLARMPTPARSDGPCLELGSS

SEQ ID NO: 17118 - DNA, 815 bp, Zea mays subsp. mays
  misc_feature (1)..(815): Ceres Seq. ID no. 12416420
  misc_feature: MA Experiment ID: 108530 Result: Down-regulated in Transcription
  misc_feature: MA Experiment 108530 PARAMETER Experiment Name: Zm_Imbibed_Seeds_P Parameter: Age (day) Value: 6 vs. 2
  misc_feature: MA Experiment 108530 PARAMETER Experiment Name: Zm_Imbibed_Seeds_P Parameter: Organism Value: Zea mays
  misc_feature: MA Experiment 108530 PARAMETER Experiment Name: Zm_Imbibed_Seeds_P Parameter: Plant Line Value: 35A19
  misc_feature: MA Experiment 108530 PARAMETER Experiment Name: Zm_Imbibed_Seeds_P Parameter: Tissue Value: Aerial vs. Embryo
  misc_feature: MA Experiment ID: 20000534 Result: Down-regulated in Transcription
  misc_feature: MA Experiment 20000534 PARAMETER Experiment Name: Zm_Hybrid_Pollen_P Parameter: Age (day) Value: 8
  misc_feature: MA Experiment 20000534 PARAMETER Experiment Name: Zm_Hybrid_Pollen_P Parameter: Organism Value: Zea mays
  misc_feature: MA Experiment 20000534 PARAMETER Experiment Name: Zm_Hybrid_Pollen_P Parameter: Plant Line Value: 35A19
  misc_feature: MA Experiment 20000534 PARAMETER Experiment Name: Zm_Hybrid_Pollen_P Parameter: Tissue Value: Pollen vs. Aerial
aaatacccagtaagtgagacttgtcgtccattctgaagtccggcggcggcgacagcggcgaggcgaggcctctgcgacttccagatctccccgacgaggaggaagtctctacagcggaggggagggagatgtcgtacatgcggggtgacctgctgacgagaatgcggaagctggtgaagggcctcgccaggcccgagccccggtggctcaaggccttggaacgggctccgccagtgacatttcctcgcccagaggggaagatcaagactctggtgcttcctgaggatgtgtatgtcacgaagttcaacagaatacatccagattcgctttaccatgatgcaatcaagataagtggatttgatccaccgccagctcgagtgtttgcttggcgtgtcctggagttgaaagagcaaggagtcgatgaagatgttgcaatgggctgtagcagataacgagtaccggacagagaagaaggcaaagaagaaagcgtacaaggagctgaaagaaatcgcccgcagtgaagggaggaagccacctccgaatccatacccgagtgccataaaggaaatacaagcggaggaaaagaagtatgtcatggaccgtttgcataacccgaaggtaatcgagattgcgaacaagatgaaggaggagcgagacaggatgttgagggatagagcagcaggtcagcggtagtcgtagcagcaggtaatgtttggactggccgactgggtgttgttgttcacgacatgggccaactggcgtcataaataatggttgttggagattgatatggcaaatatgaaactcttgtttct

SEQ ID NO: 17119 - protein, 107 aa, Zea mays subsp. mays
  peptide (1)..(107): Ceres Seq. ID no. 12416421
  misc_feature (1)..(107): Homolog of NCBI NO: 21555186 NR Description: unknown [Arabidopsis thaliana]
  misc_feature (1)..(107): Homolog of NCBI NO: 18396035 NR Description: expressed protein
MSYMRGDLLTRMRKLVKGLARPEPRWLKALERAPPVTFPRPEGKIKTLVLPEDVYVTKFNRIHPDSLYHDAIKISGFDPPPARVFAWRVLELKEQGVDEDVAMGCSR

SEQ ID NO: 17120 - protein, 104 aa, Zea mays subsp. mays
  peptide (1)..(104): Ceres Seq. ID no. 12416422
  misc_feature (1)..(104): Homolog of NCBI NO: 21555186 NR Description: unknown [Arabidopsis thaliana]
  misc_feature (1)..(104): Homolog of NCBI NO: 18396035 NR Description: expressed protein
MRGDLLTRMRKLVKGLARPEPRWLKALERAPPVTFPRPEGKIKTLVLPEDVYVTKFNRIHPDSLYHDAIKISGFDPPPARVFAWRVLELKEQGVDEDVAMGCSR

SEQ ID NO: 17121 - protein, 96 aa, Zea mays subsp. mays
  peptide (1)..(96): Ceres Seq. ID no. 12416423
  misc_feature (1)..(96): Homolog of NCBI NO: 21555186 NR Description: unknown [Arabidopsis thaliana]
  misc_feature (1)..(96): Homolog of NCBI NO: 18396035 NR Description: expressed protein
MRKLVKGLARPEPRWLKALERAPPVTFPRPEGKIKTLVLPEDVYVTKFNRIHPDSLYHDAIKISGFDPPPARVFAWRVLELKEQGVDEDVAMGCSR

SEQ ID NO: 17122 - DNA, 1952 bp, Zea mays subsp. mays
  misc_feature (1)..(1952): Ceres Seq. ID no. 12366144
  misc_feature: MA Experiment ID: 108556 Result: Up-regulated in Transcription
  misc_feature: MA Experiment 108556 PARAMETER Experiment Name: Zm_Drought_P Parameter: Age (day) Value: 9
  misc_feature: MA Experiment 108556 PARAMETER Experiment Name: Zm_Drought_P Parameter: Organism Value: Zea mays
  misc_feature: MA Experiment 108556 PARAMETER Experiment Name: Zm_Drought_P Parameter: Plant Line Value: 35A19
  misc_feature: MA Experiment 108556 PARAMETER Experiment Name: Zm_Drought_P Parameter: Timepoint (hr) Value: 24
  misc_feature: MA Experiment 108556 PARAMETER Experiment Name: Zm_Drought_P Parameter: Tissue Value: Aerial
  misc_feature: MA Experiment 108556 PARAMETER Experiment Name: Zm_Drought_P Parameter: Treatment Value: Drought vs. No Drought
  misc_feature: MA Experiment ID: 108689 Result: Up-regulated in Transcription
  misc_feature: MA Experiment 108689 PARAMETER Experiment Name: Zm_Drought_Roots_P Parameter: Age (day) Value: 9
  misc_feature: MA Experiment 108689 PARAMETER Experiment Name: Zm_Drought_Roots_P Parameter: Organism Value: Zea mays
  misc_feature: MA Experiment 108689 PARAMETER Experiment Name: Zm_Drought_Roots_P Parameter: Plant Line Value: 35A19
  misc_feature: MA Experiment 108689 PARAMETER Experiment Name: Zm_Drought_Roots_P Parameter: Timepoint (hr) Value: 24
  misc_feature: MA Experiment 108689 PARAMETER Experiment Name: Zm_Drought_Roots_P Parameter: Tissue Value: Roots
  misc_feature: MA Experiment 108689 PARAMETER Experiment Name: Zm_Drought_Roots_P Parameter: Treatment Value: Drought vs. No Drought
  misc_feature: MA Experiment ID: 20000479 Result: Up-regulated in Transcription
  misc_feature: MA Experiment 20000479 PARAMETER Experiment Name: Zm_Drought_P Parameter: Age (day) Value: 10
  misc_feature: MA Experiment 20000479 PARAMETER Experiment Name: Zm_Drought_P Parameter: Organism Value: Zea mays
  misc_feature: MA Experiment 20000479 PARAMETER Experiment Name: Zm_Drought_P Parameter: Plant Line Value: 35A19
  misc_feature: MA Experiment 20000479 PARAMETER Experiment Name: Zm_Drought_P Parameter: Timepoint (hr) Value: 48
  misc_feature: MA Experiment 20000479 PARAMETER Experiment Name: Zm_Drought_P Parameter: Tissue Value: Aerial
  misc_feature: MA Experiment 20000479 PARAMETER Experiment Name: Zm_Drought_P Parameter: Treatment Value: Drought vs. No Drought
gctctcctgcccgtgcccacctccacgactccacctccgcagcgcccgcagtaacctccccacgccacgccacatcgcgtgcgagccccaaccgtcgccggcctcccaattaagccgcccccgcggcgcgatccggtgtccaccgctgctccgccggaggagggggaaggggaagaaaagggagggggggagcacagggggatgctagaggcgaagccgccgtcgccgggctccggcgcggccggggcggcggcgcacatccacggtcaccggcggtgggcggcgccgctgctggcctcggttctgctctcgtcgctcctcatcaccgcgtcgctcttcttttcctcctcccgcgcgctgctactctccttctcgccgctcccctccgcggcctccgccgagcctctcttcgtcgaggccaagctccgccagcagatgcgggccgaggagcgccccacgcggggcgccgtgcccaggatcgcctacctcatctccggctccgcggggggacggagccgcgctgcgccggacgctcagggcgctctaccacccggtaaacacatacgtcgtgcacctcgacctcgaggcccccgccgccgagcgcgccgaactcgcctctgccatccacgcggaccccgtctacgctaggttccgcaacgtcaaggtcgtcacacgggccaacttggtcacctaccgtggcccgaccatggtggccaacacgctgcacgcggctgccatcctgctgcgcgagggcggtaattgggactggttcatcaacctctccgcctccgactatccgctcgtcacccaggacgatctattgcatgtgctttctgagttgcccaggcagcttaacttcattgagcataccagtgacatcggatggaaggagtaccagagggcgaagccagtgatcatcgaccctgggctatacagcctgcagaagtctgacgttttctggataacagagaaaaggagtgtcccaactgcattcaagctcttcaccggctcagcatggatgatgcttactcatcagttcattgaatattgtatatggggatgggacaatctcccaaggacagtcctgatgtattacgcaaattttctttcttcaccagagggttacttccacactgtcatctgcaatgtccccgagttccgcaacaccacagtcaaccatgatctacatttcatttcttgggacaacccaccaaagcaacaccctcattatctcacactcgctgacttcgatggtatggttaacagcaacgcaccctttgcaaggaagtttggaagagaggatcctgtgctggacaagattgaccaggaactgttggcccgccgacctgatggatttgtgcctggtggatggacagacctactgaacacaactgagaaagggaaacccttcacggttgagcgcgtgcaagatctccgcccaggtcctggtgtggacagattaaagaaactcgtcacaggattgctcacccaagaaggttttgatgacaagcattgcctgtgaaactcccagtaagatgattctggggcagtaggttacacgctcaaatttgaaggcatcgggccatttgctaggaatgcccctactagctgaggcagcagcacattagcgtcatgtacgcgaggatgcaacgataaggaaggtgctcttacagacaactgcttgagttgagttaccttacagcaggagaccacggatgtagcagtcggagatgattatacagaactagtagctcattagtttattagatgattataatcagccccccaaccatgaataatgttggaatttttgacatttctgcgcccgagggttgtgcaaggtagcccattctttgtttcgaagccatggcacctggtgcaccagctggtagcgtgagacttcgttgtattgactagtggatgtttctgagtaaactgatacatttgattgc

SEQ ID NO: 17123 - protein, 271 aa, Zea mays subsp. mays
  peptide (1)..(271): Ceres Seq. ID no. 12366145
  misc_feature (1)..(150): Pfam Name: Core-2/I-Branching enzyme Pfam Description: Core-2/I-Branching enzyme
  misc_feature (1)..(270): Homolog of NCBI NO: 34903664 NR Description: B1015E06.17 [Oryza sativa (japonica
  misc_feature (1)..(270): Homolog of NCBI NO: 15218824 NR Description: N-acetylglucosaminyltransferase family
  misc_feature (1)..(270): Homolog of NCBI NO: 30687610 NR Description: N-acetylglucosaminyltransferase family
  misc_feature (1)..(270): Homolog of NCBI NO: 7486258 NR Description: hypothetical protein F27G19.80 - Arabidopsis
  misc_feature (1)..(271): Homolog of NCBI NO: 15219202 NR Description: N-acetylglucosaminyltransferase family
  misc_feature (1)..(270): Homolog of NCBI NO: 15146308 NR Description: AT3g15350/K7L4_15 [Arabidopsis thaliana]
  misc_feature (1)..(270): Homolog of NCBI NO: 15236287 NR Description: N-acetylglucosaminyltransferase family
  misc_feature (1)..(270): Homolog of NCBI NO: 18400725 NR Description: N-acetylglucosaminyltransferase family
  misc_feature (1)..(270): Homolog of NCBI NO: 15242199 NR Description: N-acetylglucosaminyltransferase family
  misc_feature (1)..(270): Homolog of NCBI NO: 15242532 NR Description: N-acetylglucosaminyltransferase family
MVANTLHAAAILLREGGNWDWFINLSASDYPLVTQDDLLHVLSELPRQLNFIEHTSDIGWKEYQRAKPVIIDPGLYSLQKSDVFWITEKRSVPTAFKLFTGSAWMMLTHQFIEYCIWGWDNLPRTVLMYYANFLSSPEGYFHTVICNVPEFRNTTVNHDLHFISWDNPPKQHPHYLTLADFDGMVNSNAPFARKFGREDPVLDKIDQELLARRPDGFVPGGWTDLLNTTEKGKPFTVERVQDLRPGPGVDRLKKLVTGLLTQEGFDDKHCL

SEQ ID NO: 17124 - protein, 167 aa, Zea mays subsp. mays
  peptide (1)..(167): Ceres Seq. ID no. 12366146
  misc_feature (1)..(166): Homolog of NCBI NO: 34903664 NR Description: B1015E06.17 [Oryza sativa (japonica
  misc_feature (1)..(166): Homolog of NCBI NO: 15218824 NR Description: N-acetylglucosaminyltransferase family
  misc_feature (1)..(166): Homolog of NCBI NO: 30687610 NR Description: N-acetylglucosaminyltransferase family
  misc_feature (1)..(166): Homolog of NCBI NO: 7486258 NR Description: hypothetical protein F27G19.80 - Arabidopsis
  misc_feature (1)..(167): Homolog of NCBI NO: 15219202 NR Description: N-acetylglucosaminyltransferase family
  misc_feature (1)..(166): Homolog of NCBI NO: 15146308 NR Description: AT3g15350/K7L4_15 [Arabidopsis thaliana]
  misc_feature (1)..(166): Homolog of NCBI NO: 15236287 NR Description: N-acetylglucosaminyltransferase family
  misc_feature (1)..(166): Homolog of NCBI NO: 18400725 NR Description: N-acetylglucosaminyltransferase family
  misc_feature (1)..(166): Homolog of NCBI NO: 15242199 NR Description: N-acetylglucosaminyltransferase family
  misc_feature (1)..(166): Homolog of NCBI NO: 15242532 NR Description: N-acetylglucosaminyltransferase family
MMLTHQFIEYCIWGWDNLPRTVLMYYANFLSSPEGYFHTVICNVPEFRNTTVNHDLHFISWDNPPKQHPHYLTLADFDGMVNSNAPFARKFGREDPVLDKIDQELLARRPDGFVPGGWTDLLNTTEKGKPFTVERVQDLRPGPGVDRLKKLVTGLLTQEGFDDKHCL

SEQ ID NO: 17125 - protein, 166 aa, Zea mays subsp. mays
  peptide (1)..(166): Ceres Seq. ID no. 12366147
  misc_feature (1)..(165): Homolog of NCBI NO: 15146308 NR Description: AT3g15350/K7L4_15 [Arabidopsis thaliana]
  misc_feature (1)..(165): Homolog of NCBI NO: 15236287 NR Description: N-acetylglucosaminyltransferase family
  misc_feature (1)..(165): Homolog of NCBI NO: 18400725 NR Description: N-acetylglucosaminyltransferase family
  misc_feature (1)..(165): Homolog of NCBI NO: 15242199 NR Description: N-acetylglucosaminyltransferase family
  misc_feature (1)..(165): Homolog of NCBI NO: 15242532 NR Description: N-acetylglucosaminyltransferase family
  misc_feature (1)..(165): Homolog of NCBI NO: 34903664 NR Description: B1015E06.17 [Oryza sativa (japonica
  misc_feature (1)..(165): Homolog of NCBI NO: 15218824 NR Description: N-acetylglucosaminyltransferase family
  misc_feature (1)..(165): Homolog of NCBI NO: 30687610 NR Description: N-acetylglucosaminyltransferase family
  misc_feature (1)..(165): Homolog of NCBI NO: 7486258 NR Description: hypothetical protein F27G19.80 - Arabidopsis
  misc_feature (1)..(166): Homolog of NCBI NO: 15219202 NR Description: N-acetylglucosaminyltransferase family
MLTHQFIEYCIWGWDNLPRTVLMYYANFLSSPEGYFHTVICNVPEFRNTTVNHDLHFISWDNPPKQHPHYLTLADFDGMVNSNAPFARKFGREDPVLDKIDQELLARRPDGFVPGGWTDLLNTTEKGKPFTVERVQDLRPGPGVDRLKKLVTGLLTQEGFDDKHCL

SEQ ID NO: 17126 - DNA, 1287 bp, Zea mays subsp. mays
  misc_feature (1)..(1287): Ceres Seq. ID no. 12364248
  misc_feature: MA Experiment ID: 108535 Result: Down-regulated in Transcription
  misc_feature: MA Experiment 108535 PARAMETER Experiment Name: Zm_Meristem_P Parameter: Age (day) Value: 8
  misc_feature: MA Experiment 108535 PARAMETER Experiment Name: Zm_Meristem_P Parameter: Organism Value: Zea mays
  misc_feature: MA Experiment 108535 PARAMETER Experiment Name: Zm_Meristem_P Parameter: Plant Line Value: 35A19
  misc_feature: MA Experiment 108535 PARAMETER Experiment Name: Zm_Meristem_P Parameter: Tissue Value: Root Meristem vs. Above Root Meristem
gcacgagaccattacctagaacatcctaatcgaaaaagcgatcccaatccccgactcctccggcagcccgcaacgactcgcgccgcctccggtcgcgccgggtccaggtaaagcggcttccatctcctcggtctcagcgcgtcatcccctcctccttcctcttccgtttcccttagggttggagtagacacgtcggctcaaggatccttcgagggtcaggacacttattgattttcaacaaagatctagcatggaaccatcctcacagcctcaaccaatgatgggtgttgggtcacaaccttatcctgctgctgctccctatgtgccagtacctggatctcttgctgttcctcctggctcacagccagcagcagcattccccaatccaactcaactcagtgctcagcaccagatggtgtaccagcaggctcagcaatttcatcaacaacttcagcaacagcaggaacaacagctcagggagttctggactacccagatggatgagatcaagcaagcaaatgacttcaagatccacaccttgccacttgcaaggataaagaagataatgaaggctgatgaggatgtgcggatgatctctgcagaagctcctgttgtgtttgcgaaggcatgcgaggtattcatattagagctgacattgaggtcatggatgcacacagaggagaacaagcgccggaccttgcagaagaacgacattgcagctgccatcaccaggactgatatatatgacttcctggtggacataatcccgagggatgaaatgaaagaggaggggctcggacataatcccatagttggcctgccgcctgctatgggggctccagctgatcatggttctcatccatattactatgtgccagctcagcaggtgcaaggagcaggtatgatgtatggtggccagcagggtcacccagtgacttatatgtggcagacgccgcaagggcaagcggcagagccccccgaagaggagcagcagcagtctgcctgaatgtagcaaatagacgataacagcgaagcaattacatcttatctgaagttctgaacttagttctctaaacaaacaaatatgatttggttatgttaattgtgcagatgattgcaggctgaaacaattgtcgctaattaggtgtcatagcctcatagggtttcctaatggtagtttcgactcccgacgctgccacggcagcagtagaaaatgattgtaatttgcagactaatgtagtaagattagccttttctgtctaatccaatatacgattgaggccctcg

SEQ ID NO: 17127 - protein, 251 aa, Zea mays subsp. mays
  peptide (1)..(251): Ceres Seq. ID no. 12364249
  misc_feature (83)..(227): Homolog of NCBI NO: 25404100 NR Description: transcription factor [imported] - Arabidopsis
  misc_feature (1)..(211): Homolog of NCBI NO: 5257260 NR Description: Similar to sequence of BAC F7G19 from Arabidopsis
  misc_feature (30)..(242): Homolog of NCBI NO: 15221912 NR Description: heme activated protein, putative; protein id:
  misc_feature (34)..(248): Homolog of NCBI NO: 15228405 NR Description: transcription factor Hap5a
  misc_feature (62)..(246): Homolog of NCBI NO: 25372763 NR Description: hypothetical protein [imported] - Arabidopsis
  misc_feature (62)..(246): Homolog of NCBI NO: 15223986 NR Description: putative transcription factor
  misc_feature (62)..(246): Homolog of NCBI NO: 6289057 NR Description: heme activated protein [Arabidopsis thaliana]
  misc_feature (39)..(227): Homolog of NCBI NO: 21554704 NR Description: transcription factor, putative [Arabidopsis
  misc_feature (26)..(248): Homolog of NCBI NO: 15242784 NR Description: transcription factor Hap5a-like protein
  misc_feature (39)..(227): Homolog of NCBI NO: 15223482 NR Description: transcription factor, putative
MEPSSQPQPMMGVGSQPYPAAAPYVPVPGSLAVPPGSQPAAAFPNPTQLSAQHQMVYQQAQQFHQQLQQQQEQQLREFWTTQMDEIKQANDFKIHTLPLARIKKIMKADEDVRMISAEAPVVFAKACEVFILELTLRSWMHTEENKRRTLQKNDIAAAITRTDIYDFLVDIIPRDEMKEEGLGHNPIVGLPPAMGAPADHGSHPYYYVPAQQVQGAGMMYGGQQGHPVTYMWQTPQGQAAEPPEEEQQQSA

SEQ ID NO: 17128 - protein, 242 aa, Zea mays subsp. mays
  peptide (1)..(242): Ceres Seq. ID no. 12364250
  misc_feature (74)..(218): Homolog of NCBI NO: 25404100 NR Description: transcription factor [imported] - Arabidopsis
  misc_feature (1)..(202): Homolog of NCBI NO: 5257260 NR Description: Similar to sequence of BAC F7G19 from Arabidopsis
  misc_feature (21)..(233): Homolog of NCBI NO: 15221912 NR Description: heme activated protein, putative; protein id:
  misc_feature (25)..(239): Homolog of NCBI NO: 15228405 NR Description: transcription factor Hap5a
  misc_feature (53)..(237): Homolog of NCBI NO: 25372763 NR Description: hypothetical protein [imported] - Arabidopsis
  misc_feature (53)..(237): Homolog of NCBI NO: 15223986 NR Description: putative transcription factor
  misc_feature (53)..(237): Homolog of NCBI NO: 6289057 NR Description: heme activated protein [Arabidopsis thaliana]
  misc_feature (30)..(218): Homolog of NCBI NO: 21554704 NR Description: transcription factor, putative [Arabidopsis
  misc_feature (17)..(239): Homolog of NCBI NO: 15242784 NR Description: transcription factor Hap5a-like protein
  misc_feature (30)..(218): Homolog of NCBI NO: 15223482 NR Description: transcription factor, putative
MMGVGSQPYPAAAPYVPVPGSLAVPPGSQPAAAFPNPTQLSAQHQMVYQQAQQFHQQLQQQQEQQLREFWTTQMDEIKQANDFKIHTLPLARIKKIMKADEDVRMISAEAPVVFAKACEVFILELTLRSWMHTEENKRRTLQKNDIAAAITRTDIYDFLVDIIPRDEMKEEGLGHNPIVGLPPAMGAPADHGSHPYYYVPAQQVQGAGMMYGGQQGHPVTYMWQTPQGQAAEPPEEEQQQSA

SEQ ID NO: 17129 - protein, 241 aa, Zea mays subsp. mays
  peptide (1)..(241): Ceres Seq. ID no. 12364251
  misc_feature (73)..(217): Homolog of NCBI NO: 25404100 NR Description: transcription factor [imported] - Arabidopsis
  misc_feature (1)..(201): Homolog of NCBI NO: 5257260 NR Description: Similar to sequence of BAC F7G19 from Arabidopsis
  misc_feature (20)..(232): Homolog of NCBI NO: 15221912 NR Description: heme activated protein, putative; protein id:
  misc_feature (24)..(238): Homolog of NCBI NO: 15228405 NR Description: transcription factor Hap5a
  misc_feature (52)..(236): Homolog of NCBI NO: 25372763 NR Description: hypothetical protein [imported] - Arabidopsis
  misc_feature (52)..(236): Homolog of NCBI NO: 15223986 NR Description: putative transcription factor
  misc_feature (52)..(236): Homolog of NCBI NO: 6289057 NR Description: heme activated protein [Arabidopsis thaliana]
  misc_feature (29)..(217): Homolog of NCBI NO: 21554704 NR Description: transcription factor, putative [Arabidopsis
  misc_feature (16)..(238): Homolog of NCBI NO: 15242784 NR Description: transcription factor Hap5a-like protein
  misc_feature (29)..(217): Homolog of NCBI NO: 15223482 NR Description: transcription factor, putative
MGVGSQPYPAAAPYVPVPGSLAVPPGSQPAAAFPNPTQLSAQHQMVYQQAQQFHQQLQQQQEQQLREFWTTQMDEIKQANDFKIHTLPLARIKKIMKADEDVRMISAEAPVVFAKACEVFILELTLRSWMHTEENKRRTLQKNDIAAAITRTDIYDFLVDIIPRDEMKEEGLGHNPIVGLPPAMGAPADHGSHPYYYVPAQQVQGAGMMYGGQQGHPVTYMWQTPQGQAAEPPEEEQQQSA

SEQ ID NO: 17130 - DNA, 1461 bp, Zea mays subsp. mays
  misc_feature (1)..(1461): Ceres Seq. ID no. 12424045
  misc_feature: MA Experiment ID: 108522 Result: Down-regulated in Transcription
  misc_feature: MA Experiment 108522 PARAMETER Experiment Name: Zm_42deg_Heat_P Parameter: Age (day) Value: 8
  misc_feature: MA Experiment 108522 PARAMETER Experiment Name: Zm_42deg_Heat_P Parameter: Organism Value: Zea mays
  misc_feature: MA Experiment 108522 PARAMETER Experiment Name: Zm_42deg_Heat_P Parameter: Plant Line Value: 35A19
  misc_feature: MA Experiment 108522 PARAMETER Experiment Name: Zm_42deg_Heat_P Parameter: Temperature (deg C) Value: 42 vs. 22
  misc_feature: MA Experiment 108522 PARAMETER Experiment Name: Zm_42deg_Heat_P Parameter: Timepoint (hr) Value: 1
  misc_feature: MA Experiment 108522 PARAMETER Experiment Name: Zm_42deg_Heat_P Parameter: Tissue Value: Aerial
  misc_feature: MA Experiment ID: 108534 Result: Up-regulated in Transcription
  misc_feature: MA Experiment 108534 PARAMETER Experiment Name: Zm_4deg_Cold_P Parameter: Age (hr) Value: 8
  misc_feature: MA Experiment 108534 PARAMETER Experiment Name: Zm_4deg_Cold_P Parameter: Organism Value: Zea mays
  misc_feature: MA Experiment 108534 PARAMETER Experiment Name: Zm_4deg_Cold_P Parameter: Plant Line Value: 35A19
  misc_feature: MA Experiment 108534 PARAMETER Experiment Name: Zm_4deg_Cold_P Parameter: Temperature (deg C) Value: 4 vs. 22
  misc_feature: MA Experiment 108534 PARAMETER Experiment Name: Zm_4deg_Cold_P Parameter: Timepoint (hr) Value: 6
  misc_feature: MA Experiment 108534 PARAMETER Experiment Name: Zm_4deg_Cold_P Parameter: Tissue Value: Aerial
  misc_feature: MA Experiment ID: 108544 Result: Down-regulated in Transcription
gcacgagaccattacctagaacatcctaatcaaaaaaccaagtcctaggaataacaccacggcgcaaaaactcgcaccaccaccgccactaccgccgcgctgtagctagctaccataccagctgcacgcctcagtgctagcttcgccgggcgggggcggctgggacaccagcagggcgtgctgcgctgcgcctctccctgccactcactcgaggagcaaccgtctcagctgcaagggcgacaagaggatcgaccagctgctagtagctagctcgcacatgttcccggtcgaagtgtcggcgctcgcggcgggcggtgcgggagcggggcgtcaggctgccggcgacgccgccgggacgatgctaccgccctttttcatgggctccatctggcccgcggccgctggcgccgctggctccgaggaggacgaggcggccgccgccgccgccgcccacgaccgcgcgctcgccgcgtcgcgcaaccaccgcgaggccgagaagcgccggcgcgagcgcattaagtcgcacctcgaccgcctccgcaacgtcctcgcctgcgaccccaagatagacaaggcttcgctgctggcgaaggcggtggagagggtgcgggacctgaagcagcgggcggcgggcgtcggggaggcggcgccggcgcacctgttcccgacggagcacgacgagatcgtggtgctcgcgtcgggcagcggcgccgtcttcgaggcctccgtctgctgcgacgaccgctccgacctcctcccggacctcatcgagacgctgcgcgcgctccgcctccgcacgctccgctccgagatggccaccctcggcggccgcgtccgcaacgtgctcgtcctggcgcgcgacgtcgtcgacggcggcggcggtgccgtcgcgggaggtgatgacggatacggtggacgcgctgctgactcggcgggcggtgccacagacggcggcggcggtgacttcctcaaggaagccctgcgggctctggtagagaggccaggcgctgccggagaccggcccaagaggcgacgggtctcggacatgaacatgcaagcggcagcatagctagcacgccgccgcaggaggcgggcagatcatctcgctcgattggtcgtcgtagctcaaatacctaattgcatgcatgctcatgtcgaatatataaaaatggtactacctccatcatctccatgtttagttagatgtcttcatgatgctagctagatatctcttcatctcccattctctcatgcatggctttcttcttgagatgccataccattattagggatagtatggtattgctattagggtttgcttgagcttgaaccaaatgttgttccaaagccaatgcaaatctacctttgagctataataacaaaaaagagtcaggcaaaggttgcggacttgttacccaactagttaataagcaatatatattctaagcaatatatatttgg

SEQ ID NO: 17131 - protein, 263 aa, Zea mays subsp. mays
  peptide (1)..(263): Ceres Seq. ID no. 12424046
  misc_feature (65)..(114): Pfam Name: Helix-loop-helix DNA-binding domain Pfam Description: Helix-loop-helix DNA-binding domain
  misc_feature (199)..(228): Homolog of NCBI NO: 2388805 NR Description: attachment region binding protein [Gallus gallus]
  misc_feature (60)..(192): Homolog of NCBI NO: 15225658 NR Description: hypothetical protein
  misc_feature (26)..(201): Homolog of NCBI NO: 34896028 NR Description: ESTs C26093(C11622),AU090634(C12429) correspond a region of the predicted gene.~Similar to Arabidopsis thaliana
  misc_feature (11)..(205): Homolog of NCBI NO: 34904034 NR Description: P0665D10.15 [Oryza sativa (japonica
  misc_feature (43)..(198): Homolog of NCBI NO: 15230869 NR Description: bHLH protein
  misc_feature (55)..(238): Homolog of NCBI NO: 15229004 NR Description: bHLH protein; protein id: At3g56770.1
  misc_feature (34)..(199): Homolog of NCBI NO: 18409132 NR Description: bHLH protein
  misc_feature (58)..(238): Homolog of NCBI NO: 18491261 NR Description: At2g41130/T3K9.10 [Arabidopsis thaliana]
  misc_feature (58)..(238): Homolog of NCBI NO: 15226839 NR Description: bHLH protein; protein id: At2g41130.1
MFPVEVSALAAGGAGAGRQAAGDAAGTMLPPFFMGSIWPAAAGAAGSEEDEAAAAAAAHDRALAASRNHREAEKRRRERIKSHLDRLRNVLACDPKIDKASLLAKAVERVRDLKQRAAGVGEAAPAHLFPTEHDEIVVLASGSGAVFEASVCCDDRSDLLPDLIETLRALRLRTLRSEMATLGGRVRNVLVLARDVVDGGGGAVAGGDDGYGGRAADSAGGATDGGGGDFLKEALRALVERPGAAGDRPKRRRVSDMNMQAAA

SEQ ID NO: 17132 - protein, 236 aa, Zea mays subsp. mays
  peptide (1)..(236): Ceres Seq. ID no. 12424047
  misc_feature (38)..(87): Pfam Name: Helix-loop-helix DNA-binding domain Pfam Description: Helix-loop-helix DNA-binding domain
  misc_feature (172)..(201): Homolog of NCBI NO: 2388805 NR Description: attachment region binding protein [Gallus gallus]
  misc_feature (33)..(165): Homolog of NCBI NO: 15225658 NR Description: hypothetical protein
  misc_feature (1)..(174): Homolog of NCBI NO: 34896028 NR Description: ESTs C26093(C11622),AU090634(C12429) correspond a region of the predicted gene.~Similar to Arabidopsis thaliana
  misc_feature (1)..(178): Homolog of NCBI NO: 34904034 NR Description: P0665D10.15 [Oryza sativa (japonica
  misc_feature (16)..(171): Homolog of NCBI NO: 15230869 NR Description: bHLH protein
  misc_feature (28)..(211): Homolog of NCBI NO: 15229004 NR Description: bHLH protein; protein id: At3g56770.1
  misc_feature (7)..(172): Homolog of NCBI NO: 18409132 NR Description: bHLH protein
  misc_feature (31)..(211): Homolog of NCBI NO: 18491261 NR Description: At2g41130/T3K9.10 [Arabidopsis thaliana]
  misc_feature (31)..(211): Homolog of NCBI NO: 15226839 NR Description: bHLH protein; protein id: At2g41130.1
MLPPFFMGSIWPAAAGAAGSEEDEAAAAAAAHDRALAASRNHREAEKRRRERIKSHLDRLRNVLACDPKIDKASLLAKAVERVRDLKQRAAGVGEAAPAHLFPTEHDEIVVLASGSGAVFEASVCCDDRSDLLPDLIETLRALRLRTLRSEMATLGGRVRNVLVLARDVVDGGGGAVAGGDDGYGGRAADSAGGATDGGGGDFLKEALRALVERPGAAGDRPKRRRVSDMNMQAAA

SEQ ID NO: 17133 - protein, 230 aa, Zea mays subsp. mays
  peptide (1)..(230): Ceres Seq. ID no. 12424048
  misc_feature (32)..(81): Pfam Name: Helix-loop-helix DNA-binding domain Pfam Description: Helix-loop-helix DNA-binding domain
  misc_feature (166)..(195): Homolog of NCBI NO: 2388805 NR Description: attachment region binding protein [Gallus gallus]
  misc_feature (27)..(159): Homolog of NCBI NO: 15225658 NR Description: hypothetical protein
  misc_feature (1)..(168): Homolog of NCBI NO: 34896028 NR Description: ESTs C26093(C11622),AU090634(C12429) correspond a region of the predicted gene.~Similar to Arabidopsis thaliana
  misc_feature (1)..(172): Homolog of NCBI NO: 34904034 NR Description: P0665D10.15 [Oryza sativa (japonica
  misc_feature (10)..(165): Homolog of NCBI NO: 15230869 NR Description: bHLH protein
  misc_feature (22)..(205): Homolog of NCBI NO: 15229004 NR Description: bHLH protein; protein id: At3g56770.1
  misc_feature (1)..(166): Homolog of NCBI NO: 18409132 NR Description: bHLH protein
  misc_feature (25)..(205): Homolog of NCBI NO: 18491261 NR Description: At2g41130/T3K9.10 [Arabidopsis thaliana]
  misc_feature (25)..(205): Homolog of NCBI NO: 15226839 NR Description: bHLH protein; protein id: At2g41130.1
MGSIWPAAAGAAGSEEDEAAAAAAAHDRALAASRNHREAEKRRRERIKSHLDRLRNVLACDPKIDKASLLAKAVERVRDLKQRAAGVGEAAPAHLFPTEHDEIVVLASGSGAVFEASVCCDDRSDLLPDLIETLRALRLRTLRSEMATLGGRVRNVLVLARDVVDGGGGAVAGGDDGYGGRAADSAGGATDGGGGDFLKEALRALVERPGAAGDRPKRRRVSDMNMQAAA

SEQ ID NO: 17134 - DNA, 893 bp, Zea mays subsp. mays
  misc_feature (1)..(893): Ceres Seq. ID no. 12355035
  misc_feature: MA Experiment ID: 108535 Result: Up-regulated in Transcription
  misc_feature: MA Experiment 108535 PARAMETER Experiment Name: Zm_Meristem_P Parameter: Age (day) Value: 8
  misc_feature: MA Experiment 108535 PARAMETER Experiment Name: Zm_Meristem_P Parameter: Organism Value: Zea mays
  misc_feature: MA Experiment 108535 PARAMETER Experiment Name: Zm_Meristem_P Parameter: Plant Line Value: 35A19
  misc_feature: MA Experiment 108535 PARAMETER Experiment Name: Zm_Meristem_P Parameter: Tissue Value: Root Meristem vs. Above Root Meristem
acgttctcgcgcgggatctaattccaaacagcactgcccttgcttctaccgttccccaagtgcgctccctctctcgccatccatctcgtgcacgactgggcaacctttgccgctgtcgaggtgcccaggtcttcatcggtccctcgtcagttcttctccggcccttcgccgccgacaagctcccccagctactgaagagacaggagcaaagagttaacaggagatgaatgcccctgaccgttatgagcgtttcgtcgtgccagagggcaccaagaaagtgtcctatgagagggatacaaagattgtgaatgctgcatcattcactgtcgaacgcgaggatcacactgtaggcaatatcctccgcatgtaagtacaatttaatttcttttctttaacgcttcccatcttatggtttgtttggttgacatgatacaggcagttgcacagagacccaaatgttctctttgccgggtataagctccctcacccactccagtacaagatcattgttaggatccacacaacgagccagtcctccccgacgcaggcctacacccaggctatcaatgatctagacaaagagcttgagtaccttaagcaagcttttgaggatgagaagaacaggtacgaggacaggatgaagcaggggttctagatgaatggaatagtgtgggagataaacttcctgtgttagttttatcctaggcgagtcaacaatgaaacgaacgcccaaggatcgtgaatgtctgatccctgaactaaggttgcttgctgtcgttttactgtcatgcttgtgtcaatattcgtattattgcaaacacaccaatggagttttacattgacatcctcagattgttcgcaactagataattacatgcatgcctgtcttcaac

SEQ ID NO: 17135 - protein, 74 aa, Zea mays subsp. mays
  peptide (1)..(74): Ceres Seq. ID no. 12355036
VLARDLIPNSTALASTVPQVRSLSRHPSRARLGNLCRCRGAQVFIGPSSVLLRPFAADKLPQLLKRQEQRVNRR

SEQ ID NO: 17136 - protein, 71 aa, Zea mays subsp. mays
  peptide (1)..(71): Ceres Seq. ID no. 12355037
RSRAGSNSKQHCPCFYRSPSALPLSPSISCTTGQPLPLSRCPGLHRSLVSSSPALRRRQAPPATEETGAKS

SEQ ID NO: 17137 - protein, 48 aa, Zea mays subsp. mays
  peptide (1)..(48): Ceres Seq. ID no. 12355038
  misc_feature (1)..(47): Homolog of NCBI NO: 6755362 NR Description: polymerase (RNA) II (DNA directed) polypeptide J
  misc_feature (1)..(47): Homolog of NCBI NO: 19921456 NR Description: CG6840-PA [Drosophila melanogaster]
  misc_feature (1)..(48): Homolog of NCBI NO: 15231127 NR Description: DNA-directed RNA polymerase II 13.6K chain
  misc_feature (1)..(48): Homolog of NCBI NO: 34394446 NR Description: putative DNA-directed RNA polymerase II 13.6K
  misc_feature (1)..(47): Homolog of NCBI NO: 21704272 NR Description: DNA directed RNA polymerase II polypeptide
  misc_feature (1)..(47): Homolog of NCBI NO: 40226460 NR Description: MGC13098 protein [Homo sapiens]
  misc_feature (1)..(47): Homolog of NCBI NO: 33878913 NR Description: Unknown (protein for IMAGE:5017025) [Homo sapiens]
  misc_feature (1)..(48): Homolog of NCBI NO: 25012186 NR Description: GM15177p [Drosophila melanogaster]
  misc_feature (1)..(47): Homolog of NCBI NO: 11595485 NR Description: RPB11a protein [Homo sapiens]
  misc_feature (1)..(47): Homolog of NCBI NO: 5453932 NR Description: DNA directed RNA polymerase II polypeptide J
MNAPDRYERFVVPEGTKKVSYERDTKIVNAASFTVEREDHTVGNILRM

SEQ ID NO: 17138 - DNA, 832 bp, Zea mays subsp. mays
  misc_feature (1)..(832): Ceres Seq. ID no. 12415059
  misc_feature: MA Experiment ID: 108544 Result: Up-regulated in Transcription
actcatcaattctttgctggcggcctaagaagaaggatgtgctccgccatattctcgatccaacaaccaggtcgttcagccgcagattagcaggccgcctgcgctcctcctttcccctcagcctcccctcctctccggtgtacgtctccgccgagatggccgccccgctccggcggagcctcccctcccttggtcgcgcgcttctcacgccggcgccggcgcggatgctctccgcggaggcctctgatgccctcgttgagatcaagcccggggagatcgggatggtctccggcatccctgaggagcatctccgccgtaaggttctaatttattcaccagctaggactgcatcccagcaaggttcaggcaaagtcgggaggtggaaaattaatttttttgtcaacccaaaagtgggagaacccgttgatgggatggacatctactggggatccatatgctaatgtcggtgaagcaggacttacgtttgacagtgcagagtcagcaaaggcgtttgccgaaaaacatggatggaattatgtggttcggaaacgccatgcacctcttctgaggcctaaggcctacgctgagaacttcaagtggagaggccctccgaaagcggagcaagcatgagctcgagacatctgtgatgctgacattggcacgatgtcgttttcctcctggctcgattttattttgctttcaaccgtgcccattgttaaagtacgaactagagtatgcatctatcaaacttgtaataagcatgatgtgcaatcaaacaaaatggtgtacttgtacttccannangttaattcgtggatgacattgcttttgc

SEQ ID NO: 17139 - protein, 152 aa, Zea mays subsp. mays
  peptide (1)..(152): Ceres Seq. ID no. 12415060
  misc_feature (80)..(143): Homolog of NCBI NO: 21555571 NR Description: unknown [Arabidopsis thaliana]
  misc_feature (80)..(143): Homolog of NCBI NO: 15240784 NR Description: putative protein
  misc_feature (52)..(143): Homolog of NCBI NO: 34901114 NR Description: NADH-ubiquinone oxidoreductase 18 kDa subunit, precursor-like protein~contains ESTs
SSILCWRPKKKDVLRHILDPTTRSFSRRLAGRLRSSFPLSLPSSPVYVSAEMAAPLRRSLPSLGRALLTPAPARMLSAEASDALVEIKPGEIGMVSGIPEEHLRRKVLIYSPARTASQQGSGKVGRWKINFFVNPKVGEPVDGMDIYWGSIC

SEQ ID NO: 17140 - protein, 101 aa, Zea mays subsp. mays
  peptide (1)..(101): Ceres Seq. ID no. 12415061
  misc_feature (29)..(92): Homolog of NCBI NO: 21555571 NR Description: unknown [Arabidopsis thaliana]
  misc_feature (29)..(92): Homolog of NCBI NO: 15240784 NR Description: putative protein
  misc_feature (1)..(92): Homolog of NCBI NO: 34901114 NR Description: NADH-ubiquinone oxidoreductase 18 kDa subunit, precursor-like protein~contains ESTs
MAAPLRRSLPSLGRALLTPAPARMLSAEASDALVEIKPGEIGMVSGIPEEHLRRKVLIYSPARTASQQGSGKVGRWKINFFVNPKVGEPVDGMDIYWGSIC

SEQ ID NO: 17141 - protein, 78 aa, Zea mays subsp. mays
  peptide (1)..(78): Ceres Seq. ID no. 12415062
  misc_feature (6)..(69): Homolog of NCBI NO: 21555571 NR Description: unknown [Arabidopsis thaliana]
  misc_feature (6)..(69): Homolog of NCBI NO: 15240784 NR Description: putative protein
  misc_feature (1)..(69): Homolog of NCBI NO: 34901114 NR Description: NADH-ubiquinone oxidoreductase 18 kDa subunit, precursor-like protein~contains ESTs
MLSAEASDALVEIKPGEIGMVSGIPEEHLRRKVLIYSPARTASQQGSGKVGRWKINFFVNPKVGEPVDGMDIYWGSIC

SEQ ID NO: 17142 - DNA, 1155 bp, Zea mays subsp. mays
  misc_feature (1)..(1155): Ceres Seq. ID no. 12369606
  misc_feature: MA Experiment ID: 108535 Result: Up-regulated in Transcription
  misc_feature: MA Experiment 108535 PARAMETER Experiment Name: Zm_Meristem_P Parameter: Age (day) Value: 8
  misc_feature: MA Experiment 108535 PARAMETER Experiment Name: Zm_Meristem_P Parameter: Organism Value: Zea mays
  misc_feature: MA Experiment 108535 PARAMETER Experiment Name: Zm_Meristem_P Parameter: Plant Line Value: 35A19
  misc_feature: MA Experiment 108535 PARAMETER Experiment Name: Zm_Meristem_P Parameter: Tissue Value: Root Meristem vs. Above Root Meristem
  misc_feature: MA Experiment ID: 108544 Result: Down-regulated in Transcription
  misc_feature: MA Experiment ID: 20000626 Result: Up-regulated in Transcription
  misc_feature: MA Experiment 20000626 PARAMETER Experiment Name: Zm_Herbicide-Treatments_P Parameter: Timepoint (hr) Value: 12
  misc_feature: MA Experiment 20000626 PARAMETER Experiment Name: Zm_Herbicide-Treatments_P Parameter: Tissue Value: Aerial
  misc_feature: MA Experiment 20000626 PARAMETER Experiment Name: Zm_Herbicide-Treatments_P Parameter: Treatment Value: Roundup vs. No Treatment
gcacgagaccattacctagaacatcctaatcgaaaaaaaccatagcttcgtaaaccctcgccgccgccgccgccgccgccgccgatgacatcggaggagcacccctcgtctgcgtcctcggacggcagcaccaccatcggctccgacgaacatcttgacccctcgccatcaccttcgacgtccttcgactctcctcctgaatccgacgactccgccgcctcctcgctgctctcagacggctcttcagagtccgagcccatcattttcaagaaaccccgcccacccgtgcgctcgtggccggcctccgacgagatcgcgatcctcgagaccgtcgcgtcgcaccggcagaagcacgggcgacttcccctggcagacgacctcgccgccgcggtgcggggccgcctcagcgtgggggaccgcctcagcgccgcgcagatcaccaggcggctgtgcgcgctccgcaaccggtacgacaacaccgttatccgcctcaaacgcggcacgatcccggcgaaggacagcgacgtcaccatctacaggctctccaagctcatctgggagggcacgcgcagggggaggatagagaagaagacccgtgtgcccgacgcgcgcaatgacccaagagggttcgacgatctggccgagctgtacccttgcctctccgcggaggtggaggcgattggtgcgaggtgcggctacggggcgctgaagagggcattcgggcgcatcggtgacgacacggcggcgcggctggaggcgaagctgaagaggcagcggatggcggagaccagggcgagcggaaagcttgaccggctgaggtcgagagtcgccaatgcgcttcagggatttaacaagtgaaatgaagtggcggactttgttgaaggagctgaacgtggacgtctggaggattattagacaatagacacgccaagtgaaagtggctttaagattttgtcaaggagaggaagctacataacatggaggacttgctttgatgttctgcttaggttctatttgggactgatctaactttaaaaaattaattttggagctggcatagcaggttattaggtttattaggtgatccagaaaatcctagacctgcagaacctttagaaaatatcttgataagtcattttatttatattttagatt

SEQ ID NO: 17143 - protein, 257 aa, Zea mays subsp. mays
  peptide (1)..(257): Ceres Seq. ID no. 12369607
  misc_feature (67)..(161): Pfam Name: Protein of unknown function, DUF573 Pfam Description: Protein of unknown function, DUF573
MTSEEHPSSASSDGSTTIGSDEHLDPSPSPSTSFDSPPESDDSAASSLLSDGSSESEPIIFKKPRPPVRSWPASDEIAILETVASHRQKHGRLPLADDLAAAVRGRLSVGDRLSAAQITRRLCALRNRYDNTVIRLKRGTIPAKDSDVTIYRLSKLIWEGTRRGRIEKKTRVPDARNDPRGFDDLAELYPCLSAEVEAIGARCGYGALKRAFGRIGDDTAARLEAKLKRQRMAETRASGKLDRLRSRVANALQGFNK

SEQ ID NO: 17144 - DNA, 1406 bp, Zea mays subsp. mays
  misc_feature (1)..(1406): Ceres Seq. ID no. 12415054
  misc_feature: MA Experiment ID: 108559 Result: Down-regulated in Transcription
  misc_feature: MA Experiment 108559 PARAMETER Experiment Name: Zm_5mM_NO_P Parameter: Age (day) Value: 8
  misc_feature: MA Experiment 108559 PARAMETER Experiment Name: Zm_5mM_NO_P Parameter: Organism Value: Zea mays
  misc_feature: MA Experiment 108559 PARAMETER Experiment Name: Zm_5mM_NO_P Parameter: Plant Line Value: 35A19
  misc_feature: MA Experiment 108559 PARAMETER Experiment Name: Zm_5mM_NO_P Parameter: Timepoint (hr) Value: 12
  misc_feature: MA Experiment 108559 PARAMETER Experiment Name: Zm_5mM_NO_P Parameter: Tissue Value: Aerial
  misc_feature: MA Experiment 108559 PARAMETER Experiment Name: Zm_5mM_NO_P Parameter: Treatment Value: 5mM NO vs. No Treatment
gcacgagaccattacctagaacatcctaatcgaaaagcgcgcgcgcttgcgcttccttccttgcttcccctgccctcttctttttattccccgtctcctttgttcgcttgcgggctgcgggaagggggagggagaggacgtgacgaggggaggggaggggaggggaggagggagggcaggcgggccgacgaatgcacagtcccggagaatattggtgaagcaataacttgatatagggttctagaccaaagaagcaatggaaaaggaatcatctgccacatacgagccaaaaaggaacagtgaaataagggtttttgagagttcagatgagatttcaacggatcttgctgagtatatctcacaagtttcagaaatttctgtcaaagaaaggggatactttgccatcgccttatctggaggtcccctagtcagttttttggggaaactttgtgaagctccatacaacaagacactggattggtccaaatggtacatcttctggtctgatgaacgtgctgtggcaaaaaaccatgcagagagtaactataggttaacaaaagaaggattcctcgccaaggtacctattctgaatggccatgtctactccataaatgacaatgccacagtggaggatgcagcaacagactatgaattcatgatcaggcagctggttaaggtccgcacaataggagtctcagagagaaacgactgtcccaagttcgatctcatccttctcaccatgggctccgatgggcatgtggcctcgcttttcccgaaccaccctgccatggagctgaaagacgactgggtcacctacatcaccgactctccgcagcctcctcctgagaggatcaccttcactctcccagtgatcaactcagcatccaacatcgcaatagtgtccaccggtgatgacaaagcaaaggctgttcacatagcagtttctgacatggccgaaggtcttgatgctcctacatcgctgcctgctagaatggtccagccaacggacgggaagctggtatggtttctggacaaggcggcggcatcattccttgactccaagaacgacgatgacgacgcttgctacgagcgtcatgagtgactaactccgaggatccttggtcgttttgaagcgaatgaacggaggtgtgtgtaagtaggtggttgcgtatgatggaagacgcgctgttccccttttagctcgatgcatgggttaattttgttctgagggtttttagctccggaaatctgaaattgctcttggtccttttgcagtgaggtgatttaaagcgatgaaatgtgtatgcgatgttgagtcgtcaaagaacaccggaatttaactgtggtcgtataatattatgtgctacattctatgctatggcagtttgtttttttttttgttttgt

SEQ ID NO: 17145 - protein, 281 aa, Zea mays subsp. mays
  peptide (1)..(281): Ceres Seq. ID no. 12415055
  misc_feature (33)..(267): Pfam Name: Glucosamine-6-phosphate Pfam Description: Glucosamine-6-phosphate
  misc_feature (18)..(266): Homolog of NCBI NO: 15229127 NR Description: 6-phosphogluconolactonase - like protein
  misc_feature (13)..(266): Homolog of NCBI NO: 14009294 NR Description: putative 6-phosphogluconolactonase [Brassica
  misc_feature (19)..(266): Homolog of NCBI NO: 15238526 NR Description: 6-phosphogluconolactonase-like protein
  misc_feature (19)..(266): Homolog of NCBI NO: 21537412 NR Description: 6-phosphogluconolactonase-like protein
  misc_feature (12)..(266): Homolog of NCBI NO: 10177901 NR Description: 6-phosphogluconolactonase-like protein
  misc_feature (1)..(266): Homolog of NCBI NO: 18420789 NR Description: 6-phosphogluconolactonase-like protein
  misc_feature (1)..(266): Homolog of NCBI NO: 21554291 NR Description: 6-phosphogluconolactonase-like protein
  misc_feature (16)..(269): Homolog of NCBI NO: 28140256 NR Description: putative 6-phosphogluconolactonase [Elaeis
  misc_feature (8)..(267): Homolog of NCBI NO: 15222922 NR Description: unknown protein; protein id: At1g13700.1
  misc_feature (1)..(280): Homolog of NCBI NO: 34394567 NR Description: putative 6-phosphogluconolactonase
MEKESSATYEPKRNSEIRVFESSDEISTDLAEYISQVSEISVKERGYFAIALSGGPLVSFLGKLCEAPYNKTLDWSKWYIFWSDERAVAKNHAESNYRLTKEGFLAKVPILNGHVYSINDNATVEDAATDYEFMIRQLVKVRTIGVSERNDCPKFDLILLTMGSDGHVASLFPNHPAMELKDDWVTYITDSPQPPPERITFTLPVINSASNIAIVSTGDDKAKAVHIAVSDMAEGLDAPTSLPARMVQPTDGKLVWFLDKAAASFLDSKNDDDDACYERHE

SEQ ID NO: 17146 - protein, 148 aa, Zea mays subsp. mays
  peptide (1)..(148): Ceres Seq. ID no. 12415056
  misc_feature (1)..(134): Pfam Name: Glucosamine-6-phosphate Pfam Description: Glucosamine-6-phosphate
  misc_feature (1)..(133): Homolog of NCBI NO: 15229127 NR Description: 6-phosphogluconolactonase - like protein
  misc_feature (1)..(133): Homolog of NCBI NO: 14009294 NR Description: putative 6-phosphogluconolactonase [Brassica
  misc_feature (1)..(133): Homolog of NCBI NO: 15238526 NR Description: 6-phosphogluconolactonase-like protein
  misc_feature (1)..(133): Homolog of NCBI NO: 21537412 NR Description: 6-phosphogluconolactonase-like protein
  misc_feature (1)..(133): Homolog of NCBI NO: 10177901 NR Description: 6-phosphogluconolactonase-like protein
  misc_feature (1)..(133): Homolog of NCBI NO: 18420789 NR Description: 6-phosphogluconolactonase-like protein
  misc_feature (1)..(133): Homolog of NCBI NO: 21554291 NR Description: 6-phosphogluconolactonase-like protein
  misc_feature (1)..(136): Homolog of NCBI NO: 28140256 NR Description: putative 6-phosphogluconolactonase [Elaeis
  misc_feature (1)..(134): Homolog of NCBI NO: 15222922 NR Description: unknown protein; protein id: At1g13700.1
  misc_feature (1)..(147): Homolog of NCBI NO: 34394567 NR Description: putative 6-phosphogluconolactonase
MIRQLVKVRTIGVSERNDCPKFDLILLTMGSDGHVASLFPNHPAMELKDDWVTYITDSPQPPPERITFTLPVINSASNIAIVSTGDDKAKAVHIAVSDMAEGLDAPTSLPARMVQPTDGKLVWFLDKAAASFLDSKNDDDDACYERHE

SEQ ID NO: 17147 - DNA, 994 bp, Zea mays subsp. mays
  misc_feature (1)..(994): Ceres Seq. ID no. 12377725
  misc_feature: MA Experiment ID: 108523 Result: Up-regulated in Transcription
  misc_feature: MA Experiment 108523 PARAMETER Experiment Name: Zm_42deg_Heat_P Parameter: Age (day) Value: 8
  misc_feature: MA Experiment 108523 PARAMETER Experiment Name: Zm_42deg_Heat_P Parameter: Organism Value: Zea mays
  misc_feature: MA Experiment 108523 PARAMETER Experiment Name: Zm_42deg_Heat_P Parameter: Plant Line Value: 35A19
  misc_feature: MA Experiment 108523 PARAMETER Experiment Name: Zm_42deg_Heat_P Parameter: Temperature (deg C) Value: 42 vs. 22
  misc_feature: MA Experiment 108523 PARAMETER Experiment Name: Zm_42deg_Heat_P Parameter: Timepoint (hr) Value: 6
  misc_feature: MA Experiment 108523 PARAMETER Experiment Name: Zm_42deg_Heat_P Parameter: Tissue Value: Aerial
  misc_feature: MA Experiment ID: 108535 Result: Up-regulated in Transcription
  misc_feature: MA Experiment 108535 PARAMETER Experiment Name: Zm_Meristem_P Parameter: Age (day) Value: 8
  misc_feature: MA Experiment 108535 PARAMETER Experiment Name: Zm_Meristem_P Parameter: Organism Value: Zea mays
  misc_feature: MA Experiment 108535 PARAMETER Experiment Name: Zm_Meristem_P Parameter: Plant Line Value: 35A19
  misc_feature: MA Experiment 108535 PARAMETER Experiment Name: Zm_Meristem_P Parameter: Tissue Value: Root Meristem vs. Above Root Meristem
  misc_feature: MA Experiment ID: 108544 Result: Down-regulated in Transcription
  misc_feature: MA Experiment ID: 20000108 Result: Up-regulated in Transcription
  misc_feature: MA Experiment 20000108 PARAMETER Experiment Name: Zm_Root-Tips_P Parameter: Age (day) Value: 12
  misc_feature: MA Experiment 20000108 PARAMETER Experiment Name: Zm_Root-Tips_P Parameter: Organism Value: Zea mays
  misc_feature: MA Experiment 20000108 PARAMETER Experiment Name: Zm_Root-Tips_P Parameter: Tissue Value: Root tips vs. Root mid region    35
  misc_feature: MA Experiment 20000108 PARAMETER Experiment Name: Zm_Root-Tips_P Parameter: Tissue Value: Root tips vs. Root mid region   Sequence Listing-Misc Features (4)
gcacgagaccattacctagaacatcctaatcgaaaaaccatcctgcacacactgcaatctccgtccatccctccgtttccttttttcctctgttgccatcagttcagtagtagcctgcagctctcccaccttctcgctgcgctgtactgtgctggcaggggaggggccatggacgaccccgtcgagcgcttgaaggacgggttccacaagttcaagaccgaggtctatgacaagaagccggagctgttcgagcctctcaaggccggccaggcccccaagtacgtggtgttcgcctgctccgactcccgcgtgtgcccgtcggtgaccctgggcctgcagcccggcgaggccttcaccgtccgcaacatcgccgccatggtcccagcctacgacaagaccaagtacaccggcatcgggtccgccatcgagtacgccgtgtgcgcgctcaaggtggaggtcctcgtggtcattggccacagctgctgcggtggcatcagggcgctcctctccctccaggacggcgcacctgacaacttccacttcgttgagaactgggttaagatcggcttccctgccaagattaaggtgaagaaagaccacgcatcggtgccgttcgatgaccagtgctctattctagagaaggaggccgtgaacctgtccctggagaacctcaagacctaccccttcgtcaaggaagggctggccaacgggacgctcaagctggtcggcggccactacaacttcgtgtcaggggagttccacccttggcactgaagtgattttttttgtaattcctcggcactgaagtgaagttttgtctgaatattgcctcgtaacataattgcccggtccctgttctagttgtggcgcagtctggtttgttttgacatttgttttcaaggttcatccttatttgcattgcatttgtttatggcttgacgttaacatttggaacaagtatttgtcaccgctcatgtcgatggtgtaaaacatg

SEQ ID NO: 17148 - protein, 257 aa, Zea mays subsp. mays
  peptide (1)..(257): Ceres Seq. ID no. 12377726
  misc_feature (59)..(256): Homolog of NCBI NO: 882248 NR Description: carbonic anhydrase 1
  misc_feature (59)..(256): Homolog of NCBI NO: 882246 NR Description: carbonic anhydrase 2
  misc_feature (59)..(256): Homolog of NCBI NO: 7489810 NR Description: probable carbonate dehydratase (EC 4.2.1.1) -
  misc_feature (57)..(256): Homolog of NCBI NO: 729003 NR Description: CARBONIC ANHYDRASE, CHLOROPLAST PRECURSOR
  misc_feature (56)..(256): Homolog of NCBI NO: 34911604 NR Description: carbonic anhydrase [Oryza sativa (japonica
  misc_feature (56)..(256): Homolog of NCBI NO: 7436816 NR Description: probable carbonate dehydratase (EC 4.2.1.1),
  misc_feature (57)..(256): Homolog of NCBI NO: 7489809 NR Description: probable carbonate dehydratase (EC 4.2.1.1) -
  misc_feature (57)..(256): Homolog of NCBI NO: 7489810 NR Description: probable carbonate dehydratase (EC 4.2.1.1) -
  misc_feature (59)..(256): Homolog of NCBI NO: 7489810 NR Description: probable carbonate dehydratase (EC 4.2.1.1) -
  misc_feature (59)..(256): Homolog of NCBI NO: 7489809 NR Description: probable carbonate dehydratase (EC 4.2.1.1) -
ARDHYLEHPNRKTILHTLQSPSIPPFPFFLCCHQFSSSLQLSHLLAALYCAGRGGAMDDPVERLKDGFHKFKTEVYDKKPELFEPLKAGQAPKYVVFACSDSRVCPSVTLGLQPGEAFTVRNIAAMVPAYDKTKYTGIGSAIEYAVCALKVEVLVVIGHSCCGGIRALLSLQDGAPDNFHFVENWVKIGFPAKIKVKKDHASVPFDDQCSILEKEAVNLSLENLKTYPFVKEGLANGTLKLVGGHYNFVSGEFHPWH

SEQ ID NO: 17149 - protein, 201 aa, Zea mays subsp. mays
  peptide (1)..(201): Ceres Seq. ID no. 12377727
  misc_feature (3)..(200): Homolog of NCBI NO: 882248 NR Description: carbonic anhydrase 1
  misc_feature (3)..(200): Homolog of NCBI NO: 882246 NR Description: carbonic anhydrase 2
  misc_feature (3)..(200): Homolog of NCBI NO: 7489810 NR Description: probable carbonate dehydratase (EC 4.2.1.1) -
  misc_feature (1)..(200): Homolog of NCBI NO: 729003 NR Description: CARBONIC ANHYDRASE, CHLOROPLAST PRECURSOR
  misc_feature (1)..(200): Homolog of NCBI NO: 34911604 NR Description: carbonic anhydrase [Oryza sativa (japonica
  misc_feature (1)..(200): Homolog of NCBI NO: 7436816 NR Description: probable carbonate dehydratase (EC 4.2.1.1),
  misc_feature (1)..(200): Homolog of NCBI NO: 7489809 NR Description: probable carbonate dehydratase (EC 4.2.1.1) -
  misc_feature (1)..(200): Homolog of NCBI NO: 7489810 NR Description: probable carbonate dehydratase (EC 4.2.1.1) -
  misc_feature (3)..(200): Homolog of NCBI NO: 7489810 NR Description: probable carbonate dehydratase (EC 4.2.1.1) -
  misc_feature (3)..(200): Homolog of NCBI NO: 7489809 NR Description: probable carbonate dehydratase (EC 4.2.1.1) -
MDDPVERLKDGFHKFKTEVYDKKPELFEPLKAGQAPKYVVFACSDSRVCPSVTLGLQPGEAFTVRNIAAMVPAYDKTKYTGIGSAIEYAVCALKVEVLVVIGHSCCGGIRALLSLQDGAPDNFHFVENWVKIGFPAKIKVKKDHASVPFDDQCSILEKEAVNLSLENLKTYPFVKEGLANGTLKLVGGHYNFVSGEFHPWH

SEQ ID NO: 17150 - protein, 132 aa, Zea mays subsp. mays
  peptide (1)..(132): Ceres Seq. ID no. 12377728
  misc_feature (1)..(131): Homolog of NCBI NO: 882248 NR Description: carbonic anhydrase 1
  misc_feature (1)..(131): Homolog of NCBI NO: 882246 NR Description: carbonic anhydrase 2
  misc_feature (1)..(131): Homolog of NCBI NO: 7489810 NR Description: probable carbonate dehydratase (EC 4.2.1.1) -
  misc_feature (1)..(131): Homolog of NCBI NO: 729003 NR Description: CARBONIC ANHYDRASE, CHLOROPLAST PRECURSOR
  misc_feature (1)..(131): Homolog of NCBI NO: 34911604 NR Description: carbonic anhydrase [Oryza sativa (japonica
  misc_feature (1)..(131): Homolog of NCBI NO: 7436816 NR Description: probable carbonate dehydratase (EC 4.2.1.1),
  misc_feature (1)..(131): Homolog of NCBI NO: 7489809 NR Description: probable carbonate dehydratase (EC 4.2.1.1) -
  misc_feature (1)..(131): Homolog of NCBI NO: 7489810 NR Description: probable carbonate dehydratase (EC 4.2.1.1) -
  misc_feature (1)..(131): Homolog of NCBI NO: 7489810 NR Description: probable carbonate dehydratase (EC 4.2.1.1) -
  misc_feature (1)..(131): Homolog of NCBI NO: 7489809 NR Description: probable carbonate dehydratase (EC 4.2.1.1) -
MVPAYDKTKYTGIGSAIEYAVCALKVEVLVVIGHSCCGGIRALLSLQDGAPDNFHFVENWVKIGFPAKIKVKKDHASVPFDDQCSILEKEAVNLSLENLKTYPFVKEGLANGTLKLVGGHYNFVSGEFHPWH

SEQ ID NO: 17151 - DNA, 2485 bp, Zea mays subsp. mays
  misc_feature (1)..(2485): Ceres Seq. ID no. 12366523
  misc_feature: MA Experiment ID: 108535 Result: Down-regulated in Transcription
  misc_feature: MA Experiment 108535 PARAMETER Experiment Name: Zm_Meristem_P Parameter: Age (day) Value: 8
  misc_feature: MA Experiment 108535 PARAMETER Experiment Name: Zm_Meristem_P Parameter: Organism Value: Zea mays
  misc_feature: MA Experiment 108535 PARAMETER Experiment Name: Zm_Meristem_P Parameter: Plant Line Value: 35A19
  misc_feature: MA Experiment 108535 PARAMETER Experiment Name: Zm_Meristem_P Parameter: Tissue Value: Root Meristem vs. Above Root Meristem
  misc_feature: MA Experiment ID: 20000477 Result: Up-regulated in Transcription
  misc_feature: MA Experiment 20000477 PARAMETER Experiment Name: Zm_5mM_SA_P Parameter: Age (day) Value: 10
  misc_feature: MA Experiment 20000477 PARAMETER Experiment Name: Zm_5mM_SA_P Parameter: Organism Value: Zea mays
  misc_feature: MA Experiment 20000477 PARAMETER Experiment Name: Zm_5mM_SA_P Parameter: Plant Line Value: 35A19
  misc_feature: MA Experiment 20000477 PARAMETER Experiment Name: Zm_5mM_SA_P Parameter: Timepoint (hr) Value: 48
  misc_feature: MA Experiment 20000477 PARAMETER Experiment Name: Zm_5mM_SA_P Parameter: Tissue Value: Aerial
  misc_feature: MA Experiment 20000477 PARAMETER Experiment Name: Zm_5mM_SA_P Parameter: Treatment Value: 5mM SA vs. No Treatment
  misc_feature: MA Experiment ID: 20000478 Result: Up-regulated in Transcription
  misc_feature: MA Experiment 20000478 PARAMETER Experiment Name: Zm_5mM_SA_P Parameter: Age (day) Value: 11
  misc_feature: MA Experiment 20000478 PARAMETER Experiment Name: Zm_5mM_SA_P Parameter: Organism Value: Zea mays
  misc_feature: MA Experiment 20000478 PARAMETER Experiment Name: Zm_5mM_SA_P Parameter: Plant Line Value: 35A19
  misc_feature: MA Experiment 20000478 PARAMETER Experiment Name: Zm_5mM_SA_P Parameter: Timepoint (hr) Value: 72
  misc_feature: MA Experiment 20000478 PARAMETER Experiment Name: Zm_5mM_SA_P Parameter: Tissue Value: Aerial
  misc_feature: MA Experiment 20000478 PARAMETER Experiment Name: Zm_5mM_SA_P Parameter: Treatment Value: 5mM SA vs. No Treatment
  misc_feature: MA Experiment ID: 20000479 Result: Up-regulated in Transcription
  misc_feature: MA Experiment 20000479 PARAMETER Experiment Name: Zm_Drought_P Parameter: Age (day) Value: 10
  misc_feature: MA Experiment 20000479 PARAMETER Experiment Name: Zm_Drought_P Parameter: Organism Value: Zea mays
  misc_feature: MA Experiment 20000479 PARAMETER Experiment Name: Zm_Drought_P Parameter: Plant Line Value: 35A19
  misc_feature: MA Experiment 20000479 PARAMETER Experiment Name: Zm_Drought_P Parameter: Timepoint (hr) Value: 48
  misc_feature: MA Experiment 20000479 PARAMETER Experiment Name: Zm_Drought_P Parameter: Tissue Value: Aerial
  misc_feature: MA Experiment 20000479 PARAMETER Experiment Name: Zm_Drought_P Parameter: Treatment Value: Drought vs. No Drought
  misc_feature: MA Experiment ID: 20000480 Result: Up-regulated in Transcription
  misc_feature: MA Experiment 20000480 PARAMETER Experiment Name: Zm_Drought_P Parameter: Age (day) Value: 11
  misc_feature: MA Experiment 20000480 PARAMETER Experiment Name: Zm_Drought_P Parameter: Organism Value: Zea mays
  misc_feature: MA Experiment 20000480 PARAMETER Experiment Name: Zm_Drought_P Parameter: Plant Line Value: 35A19
  misc_feature: MA Experiment 20000480 PARAMETER Experiment Name: Zm_Drought_P Parameter: Timepoint (hr) Value: 72
  misc_feature: MA Experiment 20000480 PARAMETER Experiment Name: Zm_Drought_P Parameter: Tissue Value: Aerial
  misc_feature: MA Experiment 20000480 PARAMETER Experiment Name: Zm_Drought_P Parameter: Treatment Value: Drought vs. No Drought
  misc_feature: MA Experiment ID: 20000492 Result: Down-regulated in Transcription
  misc_feature: MA Experiment 20000492 PARAMETER Experiment Name: Zm_Hybrid_Seed_Dev_P Parameter: DAP Value: 12
  misc_feature: MA Experiment 20000492 PARAMETER Experiment Name: Zm_Hybrid_Seed_Dev_P Parameter: Organism Value: Zea mays
  misc_feature: MA Experiment 20000492 PARAMETER Experiment Name: Zm_Hybrid_Seed_Dev_P Parameter: Plant Line Value: 35A19
  misc_feature: MA Experiment 20000492 PARAMETER Experiment Name: Zm_Hybrid_Seed_Dev_P Parameter: Tissue Value: Fert Kernel vs. Unfert Floret
  misc_feature: MA Experiment ID: 20000535 Result: Down-regulated in Transcription
  misc_feature: MA Experiment 20000535 PARAMETER Experiment Name: Zm_Hybrid_Seed_Dev_P Parameter: DAP Value: 30 vs. 12
  misc_feature: MA Experiment 20000535 PARAMETER Experiment Name: Zm_Hybrid_Seed_Dev_P Parameter: Organism Value: Zea mays
  misc_feature: MA Experiment 20000535 PARAMETER Experiment Name: Zm_Hybrid_Seed_Dev_P Parameter: Plant Line Value: 35A19
  misc_feature: MA Experiment 20000535 PARAMETER Experiment Name: Zm_Hybrid_Seed_Dev_P Parameter: Tissue Value: Embryo vs. Unfert Floret
  misc_feature: MA Experiment ID: 20000626 Result: Up-regulated in Transcription
  misc_feature: MA Experiment 20000626 PARAMETER Experiment Name: Zm_Herbicide-Treatments_P Parameter: Timepoint (hr) Value: 12
  misc_feature: MA Experiment 20000626 PARAMETER Experiment Name: Zm_Herbicide-Treatments_P Parameter: Tissue Value: Aerial
  misc_feature: MA Experiment 20000626 PARAMETER Experiment Name: Zm_Herbicide-Treatments_P Parameter: Treatment Value: Roundup vs. No Treatment
  misc_feature: MA Experiment ID: 20001608 Result: Down-regulated in Transcription
  misc_feature: MA Experiment 20001608 PARAMETER Experiment Name: Zm_50ppm_KNO3_L-to-H_P Parameter: Age (day) Value: 21
  misc_feature: MA Experiment 20001608 PARAMETER Experiment Name: Zm_50ppm_KNO3_L-to-H_P Parameter: Organism Value: Zea mays
  misc_feature: MA Experiment 20001608 PARAMETER Experiment Name: Zm_50ppm_KNO3_L-to-H_P Parameter: Plant Line Value: 35A19
  misc_feature: MA Experiment 20001608 PARAMETER Experiment Name: Zm_50ppm_KNO3_L-to-H_P Parameter: Timepoint (hr) Value: 48
  misc_feature: MA Experiment 20001608 PARAMETER Experiment Name: Zm_50ppm_KNO3_L-to-H_P Parameter: Tissue Value: Shoots
  misc_feature: MA Experiment 20001608 PARAMETER Experiment Name: Zm_50ppm_KNO3_L-to-H_P Parameter: Treatment Value: 50ppm KNO3 vs. 50ppm KCl
gcacgagaccattacctagaacatcctaatcgaaaaaataagtgagcttccaggccggggagagggactggccggcggaccgccgatggaaaactttggaggctcctaacttccaagataccaactagctcccagcctcccaccgtcttctttccacccttggctgatgctagggagatgggatttttggagctctaagacaaatagttctgctccttgcgccctgcgtgttcttgatctggcctctaagtttgttggctgttttctcgtgtttgaggtgatatctcgattctaaaaagctaccagatttcttctccctgtttgtatggacaaatttgggaatgaaccctagtctgtgtgcaaagcagccaaattggtgttcttgcggatcaaagctaaagctgcagcagttggtgaggatacaagagatgcagggagaaacaagagaagggcttgttagattctgcagagacactcttattggttgatattttttccatcaactccggccagatttgcggaacctcgcaattttaggagccatttgatcttggacatggagaagcaacccagcgtgcgacatggtgccctagagaaactgaagagcttccgggggatggagaagcagagaagcttcaagttcttgtccatggagaagcagcagagcttcaaaaggaacaaggacagccctgggaagcggggtgacaccgcgctccacctcgcggcgagagctggcagtgtcgcacatgttcagaagatccttgcggagtgtgatccagaactggtggtggagttagctggccgcacgaatcaagacggcgagactgcgttgtatgtgtctgctgagaaagggcatgttgaggttgtgtgtgagattttgaaggcttcggatgtgcagtcagccgggatcaaggccagtaacagcttcgatgcattccatattgcggcaaagcagggccatttggatgtcttgaaggagctgttacaggcctttccctcattagcaatgacaacaaattctgtaaatgccacagctttggacactgctgcaactcagggccacgttgacattgttaatcttctgctagaaacagatgcaagccttgctaggattgcaagaaataatggcaagacagttttgcattcagcagcaagaatgggccatgtggaggtggtcactgcactgttaaataaggacccggggattgggtttagaacagataagaagggacaaacagctctacacatggcttcgaaaggccaaaatgcagaaattctgcttgagttgttgaagcctgatatctcagttatccatgtggaggacagcaaggggaatagaccattgcatgttgcaactcggaagggaaacaccattatggttcagaccctaatatcagttgaggggattgaaatcaatgcggttaatagagctggagagactgcttttgctattgcagataaacaaggtaatgaagagctcgtcaacatcctgagagaggtcggtggaggaactgcaaaagagcaagtaaatcctcctaatccagcaaagcagcttaagcagacagtcagcgatatcaggcatgatgttcaatcacagatgaagcaaacacgccagaccaagatgcaattccaaaaaatcaagaagaggattcagaagctccacattggtgggctaaacaatgccatcaactccaacactgttgttgcggtgcttattgccaccgttgcctttgctgccatattccaactccccggtaattttctggaggacatgactcaagcacctgacccagacatgaccttggggcaagcattgatagccagtgatccagcctttataatcttcttggttttcgatgctttggctctctttatctcgcttgctgtcgtagtagtccagacatctctaattgttgttgaacagaaggccaagaagaagatggtctttgtgataaacaagttgatgtggctcgcatgcctctgcatctcggcagccttcatagcgctaacctacgttgtcgtgggtcgagacgacgagtggctggcctggtgtactatggcaattggcactgttaccatggtggccactgtcggttccatgtgctactgcgttgtcgctcacaggatggaagagaagagcttgaggaagatcaggaggacctccatgagccagtcatggtccatatcaattgactcggaagcagagctgatgaacagtgagtacaagaagatgtatgccctttaggatgatgtctgttcttgtcggctgagtcttgtatatattggtacccatttgcctgagaccagtccatggcattgagtgggattgactcaatcagaactatatttagtcctagaacatggcacctgtatgtaactgtagtcttgcagcctccagacatgaacataggggtgaagtctaggtgataggtgtagtcactttttttgttggcaaaatacaaatattgccaagcatgatgtcccg

SEQ ID NO: 17152 - protein, 562 aa, Zea mays subsp. mays
  peptide (1)..(562): Ceres Seq. ID no. 12366524
  misc_feature (190)..(222): Pfam Name: Ankyrin repeat Pfam Description: Ankyrin repeat
  misc_feature (46)..(562): Homolog of NCBI NO: 34908074 NR Description: P0506B12.26 [Oryza sativa (japonica
  misc_feature (32)..(562): Homolog of NCBI NO: 21553618 NR Description: ankyrin-like protein [Arabidopsis thaliana]
  misc_feature (32)..(562): Homolog of NCBI NO: 15230470 NR Description: ankyrin-like protein; protein id: At3g12360.1
  misc_feature (42)..(562): Homolog of NCBI NO: 30679697 NR Description: ankyrin repeat protein family [Arabidopsis
  misc_feature (42)..(562): Homolog of NCBI NO: 11357168 NR Description: ankyrin-like protein - Arabidopsis thaliana
  misc_feature (42)..(562): Homolog of NCBI NO: 15238604 NR Description: ankyrin-like protein; protein id: At5g60070.1
  misc_feature (39)..(562): Homolog of NCBI NO: 24796797 NR Description: putative ankyrin repeat containing protein
  misc_feature (39)..(562): Homolog of NCBI NO: 15222993 NR Description: hypothetical protein; protein id: At1g07710.1
  misc_feature (1)..(562): Homolog of NCBI NO: 15220595 NR Description: unknown protein; protein id: At1g05640.1
  misc_feature (1)..(562): Homolog of NCBI NO: 15225141 NR Description: ankyrin-like protein; protein id: At2g31820.1
MEKQPSVRHGALEKLKSFRGMEKQRSFKFLSMEKQQSFKRNKDSPGKRGDTALHLAARAGSVAHVQKILAECDPELVVELAGRTNQDGETALYVSAEKGHVEVVCEILKASDVQSAGIKASNSFDAFHIAAKQGHLDVLKELLQAFPSLAMTTNSVNATALDTAATQGHVDIVNLLLETDASLARIARNNGKTVLHSAARMGHVEVVTALLNKDPGIGFRTDKKGQTALHMASKGQNAEILLELLKPDISVIHVEDSKGNRPLHVATRKGNTIMVQTLISVEGIEINAVNRAGETAFAIADKQGNEELVNILREVGGGTAKEQVNPPNPAKQLKQTVSDIRHDVQSQMKQTRQTKMQFQKIKKRIQKLHIGGLNNAINSNTVVAVLIATVAFAAIFQLPGNFLEDMTQAPDPDMTLGQALIASDPAFIIFLVFDALALFISLAVVVVQTSLIVVEQKAKKKMVFVINKLMWLACLCISAAFIALTYVVVGRDDEWLAWCTMAIGTVTMVATVGSMCYCVVAHRMEEKSLRKIRRTSMSQSWSISIDSEAELMNSEYKKMYAL

SEQ ID NO: 17153 - protein, 542 aa, Zea mays subsp. mays
  peptide (1)..(542): Ceres Seq. ID no. 12366525
  misc_feature (170)..(202): Pfam Name: Ankyrin repeat Pfam Description: Ankyrin repeat
  misc_feature (26)..(542): Homolog of NCBI NO: 34908074 NR Description: P0506B12.26 [Oryza sativa (japonica
  misc_feature (12)..(542): Homolog of NCBI NO: 21553618 NR Description: ankyrin-like protein [Arabidopsis thaliana]
  misc_feature (12)..(542): Homolog of NCBI NO: 15230470 NR Description: ankyrin-like protein; protein id: At3g12360.1
  misc_feature (22)..(542): Homolog of NCBI NO: 30679697 NR Description: ankyrin repeat protein family [Arabidopsis
  misc_feature (22)..(542): Homolog of NCBI NO: 11357168 NR Description: ankyrin-like protein - Arabidopsis thaliana
  misc_feature (22)..(542): Homolog of NCBI NO: 15238604 NR Description: ankyrin-like protein; protein id: At5g60070.1
  misc_feature (19)..(542): Homolog of NCBI NO: 24796797 NR Description: putative ankyrin repeat containing protein
  misc_feature (19)..(542): Homolog of NCBI NO: 15222993 NR Description: hypothetical protein; protein id: At1g07710.1
  misc_feature (1)..(542): Homolog of NCBI NO: 15220595 NR Description: unknown protein; protein id: At1g05640.1
  misc_feature (1)..(542): Homolog of NCBI NO: 15225141 NR Description: ankyrin-like protein; protein id: At2g31820.1
MEKQRSFKFLSMEKQQSFKRNKDSPGKRGDTALHLAARAGSVAHVQKILAECDPELVVELAGRTNQDGETALYVSAEKGHVEVVCEILKASDVQSAGIKASNSFDAFHIAAKQGHLDVLKELLQAFPSLAMTTNSVNATALDTAATQGHVDIVNLLLETDASLARIARNNGKTVLHSAARMGHVEVVTALLNKDPGIGFRTDKKGQTALHMASKGQNAEILLELLKPDISVIHVEDSKGNRPLHVATRKGNTIMVQTLISVEGIEINAVNRAGETAFAIADKQGNEELVNILREVGGGTAKEQVNPPNPAKQLKQTVSDIRHDVQSQMKQTRQTKMQFQKIKKRIQKLHIGGLNNAINSNTVVAVLIATVAFAAIFQLPGNFLEDMTQAPDPDMTLGQALIASDPAFIIFLVFDALALFISLAVVVVQTSLIVVEQKAKKKMVFVINKLMWLACLCISAAFIALTYVVVGRDDEWLAWCTMAIGTVTMVATVGSMCYCVVAHRMEEKSLRKIRRTSMSQSWSISIDSEAELMNSEYKKMYAL

SEQ ID NO: 17154 - protein, 531 aa, Zea mays subsp. mays
  peptide (1)..(531): Ceres Seq. ID no. 12366526
  misc_feature (159)..(191): Pfam Name: Ankyrin repeat Pfam Description: Ankyrin repeat
  misc_feature (15)..(531): Homolog of NCBI NO: 34908074 NR Description: P0506B12.26 [Oryza sativa (japonica
  misc_feature (1)..(531): Homolog of NCBI NO: 21553618 NR Description: ankyrin-like protein [Arabidopsis thaliana]
  misc_feature (1)..(531): Homolog of NCBI NO: 15230470 NR Description: ankyrin-like protein; protein id: At3g12360.1
  misc_feature (11)..(531): Homolog of NCBI NO: 30679697 NR Description: ankyrin repeat protein family [Arabidopsis
  misc_feature (11)..(531): Homolog of NCBI NO: 11357168 NR Description: ankyrin-like protein - Arabidopsis thaliana
  misc_feature (11)..(531): Homolog of NCBI NO: 15238604 NR Description: ankyrin-like protein; protein id: At5g60070.1
  misc_feature (8)..(531): Homolog of NCBI NO: 24796797 NR Description: putative ankyrin repeat containing protein
  misc_feature (8)..(531): Homolog of NCBI NO: 15222993 NR Description: hypothetical protein; protein id: At1g07710.1
  misc_feature (1)..(531): Homolog of NCBI NO: 15220595 NR Description: unknown protein; protein id: At1g05640.1
  misc_feature (1)..(531): Homolog of NCBI NO: 15225141 NR Description: ankyrin-like protein; protein id: At2g31820.1
MEKQQSFKRNKDSPGKRGDTALHLAARAGSVAHVQKILAECDPELVVELAGRTNQDGETALYVSAEKGHVEVVCEILKASDVQSAGIKASNSFDAFHIAAKQGHLDVLKELLQAFPSLAMTTNSVNATALDTAATQGHVDIVNLLLETDASLARIARNNGKTVLHSAARMGHVEVVTALLNKDPGIGFRTDKKGQTALHMASKGQNAEILLELLKPDISVIHVEDSKGNRPLHVATRKGNTIMVQTLISVEGIEINAVNRAGETAFAIADKQGNEELVNILREVGGGTAKEQVNPPNPAKQLKQTVSDIRHDVQSQMKQTRQTKMQFQKIKKRIQKLHIGGLNNAINSNTVVAVLIATVAFAAIFQLPGNFLEDMTQAPDPDMTLGQALIASDPAFIIFLVFDALALFISLAVVVVQTSLIVVEQKAKKKMVFVINKLMWLACLCISAAFIALTYVVVGRDDEWLAWCTMAIGTVTMVATVGSMCYCVVAHRMEEKSLRKIRRTSMSQSWSISIDSEAELMNSEYKKMYAL

SEQ ID NO: 17155 - DNA, 1753 bp, Zea mays subsp. mays
  misc_feature (1)..(1753): Ceres Seq. ID no. 12417068
  misc_feature: MA Experiment ID: 108529 Result: Down-regulated in Transcription
  misc_feature: MA Experiment 108529 PARAMETER Experiment Name: Zm_Imbibed_Seeds_P Parameter: Age (day) Value: 5 vs. 2
  misc_feature: MA Experiment 108529 PARAMETER Experiment Name: Zm_Imbibed_Seeds_P Parameter: Organism Value: Zea mays
  misc_feature: MA Experiment 108529 PARAMETER Experiment Name: Zm_Imbibed_Seeds_P Parameter: Plant Line Value: 35A19
  misc_feature: MA Experiment 108529 PARAMETER Experiment Name: Zm_Imbibed_Seeds_P Parameter: Tissue Value: Roots vs. Embryo
  misc_feature: MA Experiment ID: 108536 Result: Up-regulated in Transcription
  misc_feature: MA Experiment 108536 PARAMETER Experiment Name: Zm_Meristem_P Parameter: Age (day) Value: 8
  misc_feature: MA Experiment 108536 PARAMETER Experiment Name: Zm_Meristem_P Parameter: Organism Value: Zea mays
  misc_feature: MA Experiment 108536 PARAMETER Experiment Name: Zm_Meristem_P Parameter: Plant Line Value: 35A19
  misc_feature: MA Experiment 108536 PARAMETER Experiment Name: Zm_Meristem_P Parameter: Tissue Value: Shoot Meristem vs. Above Shoot Meristem
  misc_feature: MA Experiment ID: 108543 Result: Down-regulated in Transcription
  misc_feature: MA Experiment ID: 108546 Result: Down-regulated in Transcription
  misc_feature: MA Experiment 108546 PARAMETER Experiment Name: Zm_Imbibed_Seeds_P Parameter: Age (day) Value: 3 vs. 2
  misc_feature: MA Experiment 108546 PARAMETER Experiment Name: Zm_Imbibed_Seeds_P Parameter: Organism Value: Zea mays
  misc_feature: MA Experiment 108546 PARAMETER Experiment Name: Zm_Imbibed_Seeds_P Parameter: Plant Line Value: 35A19
  misc_feature: MA Experiment 108546 PARAMETER Experiment Name: Zm_Imbibed_Seeds_P Parameter: Tissue Value: Roots vs. Embryo
  misc_feature: MA Experiment ID: 108689 Result: Down-regulated in Transcription
  misc_feature: MA Experiment 108689 PARAMETER Experiment Name: Zm_Drought_Roots_P Parameter: Age (day) Value: 9
  misc_feature: MA Experiment 108689 PARAMETER Experiment Name: Zm_Drought_Roots_P Parameter: Organism Value: Zea mays
  misc_feature: MA Experiment 108689 PARAMETER Experiment Name: Zm_Drought_Roots_P Parameter: Plant Line Value: 35A19
  misc_feature: MA Experiment 108689 PARAMETER Experiment Name: Zm_Drought_Roots_P Parameter: Timepoint (hr) Value: 24
  misc_feature: MA Experiment 108689 PARAMETER Experiment Name: Zm_Drought_Roots_P Parameter: Tissue Value: Roots
  misc_feature: MA Experiment 108689 PARAMETER Experiment Name: Zm_Drought_Roots_P Parameter: Treatment Value: Drought vs. No Drought
  misc_feature: MA Experiment ID: 20000632 Result: Down-regulated in Transcription
  misc_feature: MA Experiment 20000632 PARAMETER Experiment Name: Zm_Herbicide-Treatments_P Parameter: Timepoint (hr) Value: 4
  misc_feature: MA Experiment 20000632 PARAMETER Experiment Name: Zm_Herbicide-Treatments_P Parameter: Tissue Value: Aerial
  misc_feature: MA Experiment 20000632 PARAMETER Experiment Name: Zm_Herbicide-Treatments_P Parameter: Treatment Value: Glean vs. No Treatment
gcacgagaccattacctagaacatcctaatcgaaaaacagcgacagcaacacagcctcgcaagagaaagcaaagcaaagccaggagggaaagaaagaaatccttttcctacacctaaagagaccaccaaaccctgcgagcccaaaaaaaagccatggagtacaagagatcatcgcatgcggaagaggaagaagaggatgaggaggaagaagaagacgacgagaacgaggaagaagaggaggatgaggatgaggccagaggccttcgctacaccacggcggcggtggcacccgtaggcgctccgcagcagcagcggcagcaggtgcacgcccaagctcttggcctcggctcacacccctcccagctgatggattctgccgccttctcgaggccgctcttgcctcccaactcatctctggtgatgcagccaccgctgcctccaccaggcttcccgccggctcaccgccaacaaccgccgcatgcgcagctccatccgaggaaagcggagagggagagggacagagccgcgggagcgcagccccatgtccggcgccaccaccaagaaccagccaagaatggcgttctcggcggtggcgccgcgccaacgtcggcaccctctacgctcggcctcgtgcccgtggtggaagcggcccagctgtggaggtaccgggagtgcctgcggaaccacgcggcgcggcttggcgcgcacgtgctcgacggctgctgcgagttcatgccgtccgggggcgaaggggccgccgcgctggcctgcgccgcctgcggctgccaccgcagcttccaccggcgcgaggcggtccccggcggcggcgtggcggtgtcgccctcggcggcagtaacccccaccgccggcgccggcgccaactcctcccgcgccattccgctgctgctggccccgccgcacatgcacacgcgcccgccgcaccacgtgccggcgtccccggcgtccgcgcccgccgcgctggccgagtcgtccagcgaggagctgcgcggccccgcgcccccgacgcacgcgcacgcgcacccgccccacgcgcaggtggccgtagtaggagggtcggcctccgctccccccgcgccgagcaagaagcgtttccggaccaagttcacggcggagcagaaggacctcatgcgcgagttcgcgcaccgcgtcgggtggcgcgtccacaagcccgacgccgacgccgtggacgccttctgcgcccaggtcggcgtctcccggcgcgtcctcaaggtgtggatgcacaacaacaagcacctcgccaaggtcccgccctcgcccccatcctcctcctacccacagccactgcctcgccaccacccgcctccacctccgctccacatccaccatcacccgccgccgccgccgcagcagcagccgcagcagcagcagcatgatgcatgagtaccgagtagccgcagagcaacgcgagaggatcagacgatgccattagcttattagctcctttatttatccttcttcttcttcttcccttgtaatttcagtgacatcccagttgttaaggagttgactcatcatgcagcagttaggagggattaatatgattgtgtgacctaatctcatctcagccatactcctactacaagtcatcccctcgtcctcgttgctttcttggacgacctacctccattattaggttattagcatcagtggcgcttgcattggtatcttgcttatggtaatgacctaataatgatcactgtgttttagagct

SEQ ID NO: 17156 - protein, 422 aa, Zea mays subsp. mays
  peptide (1)..(422): Ceres Seq. ID no. 12417069
  misc_feature (166)..(219): Pfam Name: ZF-HD protein dimerisation region Pfam Description: ZF-HD protein dimerisation region
  misc_feature (161)..(254): Homolog of NCBI NO: 15230335 NR Description: putative protein
  misc_feature (169)..(219): Homolog of NCBI NO: 13374061 NR Description: ZF-HD homeobox protein [Flaveria bidentis]
  misc_feature (256)..(379): Homolog of NCBI NO: 13374061 NR Description: ZF-HD homeobox protein [Flaveria bidentis]
  misc_feature (119)..(373): Homolog of NCBI NO: 13277220 NR Description: ZF-HD homeobox protein [Flaveria bidentis]
  misc_feature (164)..(236): Homolog of NCBI NO: 15242243 NR Description: putative protein; protein id: At5g15210.1
  misc_feature (245)..(373): Homolog of NCBI NO: 15242243 NR Description: putative protein; protein id: At5g15210.1
  misc_feature (171)..(377): Homolog of NCBI NO: 15228530 NR Description: unknown protein
  misc_feature (170)..(219): Homolog of NCBI NO: 18410804 NR Description: expressed protein
  misc_feature (249)..(385): Homolog of NCBI NO: 18410804 NR Description: expressed protein
  misc_feature (1)..(422): Homolog of NCBI NO: 19387257 NR Description: hypothetical protein [Oryza sativa (japonica
MEYKRSSHAEEEEEDEEEEEDDENEEEEEDEDEARGLRYTTAAVAPVGAPQQQRQQVHAQALGLGSHPSQLMDSAAFSRPLLPPNSSLVMQPPLPPPGFPPAHRQQPPHAQLHPRKAERERDRAAGAQPHVRRHHQEPAKNGVLGGGAAPTSAPSTLGLVPVVEAAQLWRYRECLRNHAARLGAHVLDGCCEFMPSGGEGAAALACAACGCHRSFHRREAVPGGGVAVSPSAAVTPTAGAGANSSRAIPLLLAPPHMHTRPPHHVPASPASAPAALAESSSEELRGPAPPTHAHAHPPHAQVAVVGGSASAPPAPSKKRFRTKFTAEQKDLMREFAHRVGWRVHKPDADAVDAFCAQVGVSRRVLKVWMHNNKHLAKVPPSPPSSSYPQPLPRHHPPPPPLHIHHHPPPPPQQQPQQQQHDA

SEQ ID NO: 17157 - protein, 351 aa, Zea mays subsp. mays
  peptide (1)..(351): Ceres Seq. ID no. 12417070
  misc_feature (95)..(148): Pfam Name: ZF-HD protein dimerisation region Pfam Description: ZF-HD protein dimerisation region
  misc_feature (90)..(183): Homolog of NCBI NO: 15230335 NR Description: putative protein
  misc_feature (98)..(148): Homolog of NCBI NO: 13374061 NR Description: ZF-HD homeobox protein [Flaveria bidentis]
  misc_feature (185)..(308): Homolog of NCBI NO: 13374061 NR Description: ZF-HD homeobox protein [Flaveria bidentis]
  misc_feature (48)..(302): Homolog of NCBI NO: 13277220 NR Description: ZF-HD homeobox protein [Flaveria bidentis]
  misc_feature (93)..(165): Homolog of NCBI NO: 15242243 NR Description: putative protein; protein id: At5g15210.1
  misc_feature (174)..(302): Homolog of NCBI NO: 15242243 NR Description: putative protein; protein id: At5g15210.1
  misc_feature (100)..(306): Homolog of NCBI NO: 15228530 NR Description: unknown protein
  misc_feature (99)..(148): Homolog of NCBI NO: 18410804 NR Description: expressed protein
  misc_feature (178)..(314): Homolog of NCBI NO: 18410804 NR Description: expressed protein
  misc_feature (1)..(351): Homolog of NCBI NO: 19387257 NR Description: hypothetical protein [Oryza sativa (japonica
MDSAAFSRPLLPPNSSLVMQPPLPPPGFPPAHRQQPPHAQLHPRKAERERDRAAGAQPHVRRHHQEPAKNGVLGGGAAPTSAPSTLGLVPVVEAAQLWRYRECLRNHAARLGAHVLDGCCEFMPSGGEGAAALACAACGCHRSFHRREAVPGGGVAVSPSAAVTPTAGAGANSSRAIPLLLAPPHMHTRPPHHVPASPASAPAALAESSSEELRGPAPPTHAHAHPPHAQVAVVGGSASAPPAPSKKRFRTKFTAEQKDLMREFAHRVGWRVHKPDADAVDAFCAQVGVSRRVLKVWMHNNKHLAKVPPSPPSSSYPQPLPRHHPPPPPLHIHHHPPPPPQQQPQQQQHDA

SEQ ID NO: 17158 - protein, 333 aa, Zea mays subsp. mays
  peptide (1)..(333): Ceres Seq. ID no. 12417071
  misc_feature (77)..(130): Pfam Name: ZF-HD protein dimerisation region Pfam Description: ZF-HD protein dimerisation region
  misc_feature (72)..(165): Homolog of NCBI NO: 15230335 NR Description: putative protein
  misc_feature (80)..(130): Homolog of NCBI NO: 13374061 NR Description: ZF-HD homeobox protein [Flaveria bidentis]
  misc_feature (167)..(290): Homolog of NCBI NO: 13374061 NR Description: ZF-HD homeobox protein [Flaveria bidentis]
  misc_feature (30)..(284): Homolog of NCBI NO: 13277220 NR Description: ZF-HD homeobox protein [Flaveria bidentis]
  misc_feature (75)..(147): Homolog of NCBI NO: 15242243 NR Description: putative protein; protein id: At5g15210.1
  misc_feature (156)..(284): Homolog of NCBI NO: 15242243 NR Description: putative protein; protein id: At5g15210.1
  misc_feature (82)..(288): Homolog of NCBI NO: 15228530 NR Description: unknown protein
  misc_feature (81)..(130): Homolog of NCBI NO: 18410804 NR Description: expressed protein
  misc_feature (160)..(296): Homolog of NCBI NO: 18410804 NR Description: expressed protein
  misc_feature (1)..(333): Homolog of NCBI NO: 19387257 NR Description: hypothetical protein [Oryza sativa (japonica
MQPPLPPPGFPPAHRQQPPHAQLHPRKAERERDRAAGAQPHVRRHHQEPAKNGVLGGGAAPTSAPSTLGLVPVVEAAQLWRYRECLRNHAARLGAHVLDGCCEFMPSGGEGAAALACAACGCHRSFHRREAVPGGGVAVSPSAAVTPTAGAGANSSRAIPLLLAPPHMHTRPPHHVPASPASAPAALAESSSEELRGPAPPTHAHAHPPHAQVAVVGGSASAPPAPSKKRFRTKFTAEQKDLMREFAHRVGWRVHKPDADAVDAFCAQVGVSRRVLKVWMHNNKHLAKVPPSPPSSSYPQPLPRHHPPPPPLHIHHHPPPPPQQQPQQQQHDA

SEQ ID NO: 17159 - DNA, 2248 bp, Zea mays subsp. mays
  misc_feature (1)..(2248): Ceres Seq. ID no. 12368259
  misc_feature: MA Experiment ID: 108504 Result: Down-regulated in Transcription
  misc_feature: MA Experiment 108504 PARAMETER Experiment Name: Zm_Drought_P Parameter: Age (day) Value: 8
  misc_feature: MA Experiment 108504 PARAMETER Experiment Name: Zm_Drought_P Parameter: Organism Value: Zea mays
  misc_feature: MA Experiment 108504 PARAMETER Experiment Name: Zm_Drought_P Parameter: Plant Line Value: 35A19
  misc_feature: MA Experiment 108504 PARAMETER Experiment Name: Zm_Drought_P Parameter: Timepoint (hr) Value: 12
  misc_feature: MA Experiment 108504 PARAMETER Experiment Name: Zm_Drought_P Parameter: Tissue Value: Aerial
  misc_feature: MA Experiment 108504 PARAMETER Experiment Name: Zm_Drought_P Parameter: Treatment Value: Drought vs. No Drought
  misc_feature: MA Experiment ID: 108527 Result: Up-regulated in Transcription
  misc_feature: MA Experiment 108527 PARAMETER Experiment Name: Zm_5mM_NO_P Parameter: Age (day) Value: 8
  misc_feature: MA Experiment 108527 PARAMETER Experiment Name: Zm_5mM_NO_P Parameter: Organism Value: Zea mays
  misc_feature: MA Experiment 108527 PARAMETER Experiment Name: Zm_5mM_NO_P Parameter: Plant Line Value: 35A19
  misc_feature: MA Experiment 108527 PARAMETER Experiment Name: Zm_5mM_NO_P Parameter: Timepoint (hr) Value: 6
  misc_feature: MA Experiment 108527 PARAMETER Experiment Name: Zm_5mM_NO_P Parameter: Tissue Value: Aerial
  misc_feature: MA Experiment 108527 PARAMETER Experiment Name: Zm_5mM_NO_P Parameter: Treatment Value: 5mM NO vs. No Treatment
  misc_feature: MA Experiment ID: 108534 Result: Up-regulated in Transcription
  misc_feature: MA Experiment 108534 PARAMETER Experiment Name: Zm_4deg_Cold_P Parameter: Age (hr) Value: 8
  misc_feature: MA Experiment 108534 PARAMETER Experiment Name: Zm_4deg_Cold_P Parameter: Organism Value: Zea mays
  misc_feature: MA Experiment 108534 PARAMETER Experiment Name: Zm_4deg_Cold_P Parameter: Plant Line Value: 35A19
  misc_feature: MA Experiment 108534 PARAMETER Experiment Name: Zm_4deg_Cold_P Parameter: Temperature (deg C) Value: 4 vs. 22
  misc_feature: MA Experiment 108534 PARAMETER Experiment Name: Zm_4deg_Cold_P Parameter: Timepoint (hr) Value: 6
  misc_feature: MA Experiment 108534 PARAMETER Experiment Name: Zm_4deg_Cold_P Parameter: Tissue Value: Aerial
  misc_feature: MA Experiment ID: 108543 Result: Down-regulated in Transcription
  misc_feature: MA Experiment ID: 108556 Result: Down-regulated in Transcription
  misc_feature: MA Experiment 108556 PARAMETER Experiment Name: Zm_Drought_P Parameter: Age (day) Value: 9
  misc_feature: MA Experiment 108556 PARAMETER Experiment Name: Zm_Drought_P Parameter: Organism Value: Zea mays
  misc_feature: MA Experiment 108556 PARAMETER Experiment Name: Zm_Drought_P Parameter: Plant Line Value: 35A19
  misc_feature: MA Experiment 108556 PARAMETER Experiment Name: Zm_Drought_P Parameter: Timepoint (hr) Value: 24
  misc_feature: MA Experiment 108556 PARAMETER Experiment Name: Zm_Drought_P Parameter: Tissue Value: Aerial
  misc_feature: MA Experiment 108556 PARAMETER Experiment Name: Zm_Drought_P Parameter: Treatment Value: Drought vs. No Drought
  misc_feature: MA Experiment ID: 20001612 Result: Up-regulated in Transcription
  misc_feature: MA Experiment 20001612 PARAMETER Experiment Name: Zm_50ppm_KNO3_L-to-H_P Parameter: Age (day) Value: 19
  misc_feature: MA Experiment 20001612 PARAMETER Experiment Name: Zm_50ppm_KNO3_L-to-H_P Parameter: Organism Value: Zea mays
  misc_feature: MA Experiment 20001612 PARAMETER Experiment Name: Zm_50ppm_KNO3_L-to-H_P Parameter: Plant Line Value: 35A19
  misc_feature: MA Experiment 20001612 PARAMETER Experiment Name: Zm_50ppm_KNO3_L-to-H_P Parameter: Timepoint (hr) Value: 8
  misc_feature: MA Experiment 20001612 PARAMETER Experiment Name: Zm_50ppm_KNO3_L-to-H_P Parameter: Tissue Value: Roots
  misc_feature: MA Experiment 20001612 PARAMETER Experiment Name: Zm_50ppm_KNO3_L-to-H_P Parameter: Treatment Value: 50ppm KNO3 vs. 50ppm KCl
gcacgagaccattacctagaacatcctaatcgaaaagagctagcgtctcttgcacagagacaggcccagggaggccgcgatggcgaacctgacgaacggctttgcgagcctccattgcgcaggggcgatgcatgtggacaaagggcacatgcaagcatcgggactgccttttctctctttcagaagatgcgcccagcttgatatctccagactaggtagcgtgcctcgtttcatgggcgcaacatctgctactgtctcccaacatcatgtgaggcagaggatcagcgccatcagagcctctactctttcctgcctgcaagacgatgccacaaaattctttgattttgtggttattggcagcggtgttgctggcctaaggtatgctctggaagtttcaaagcacggctctgttgctattatcaccaaggcagagcctcatgagagcaacacaaactatgcacaaggcggtgttagtgccgttctatgcccctcggattctgtagaaagtcacatgaaagacacaattgttgcaggggcttatttgtgcgatgaagagattgtcagggtagtttgcacagaaggtccagagcgtgtcaaggaactaattgccatgggtgcctcattcgaccatggtgaagatggtaggctgcaccttgcaagggaaggtggtcattctcacaacagaattgtccattctgccgatatgactggaagagagattgaaagagcactgcttcaagcagttcacaatgatgataacatatctttgtttggtcatcactttgctattgatctattgacatgtcagaaaaatggtgaaatctattgctatggagtggattcaatagacattgaaacccagaaggtagtccgcttcatctcgaaagtgacattgcttgcatcaggaggagctggccatatatatcccacaaccaccaatccaccggtagctactggggacggaatcgcaatgtgtcatcgtgctcaggctgtaatatccaatatggagtttgtgcagttccatccaactgcactttcagatgagggcctgccaataaagccaaagacaagaagagagaatgcatttctcataacggaagcggtgagaggagacggaggaattctttacaaccagtccatggagagattcatgccgatgtacgatgaccgctcggagctggcgccgagagacgtggttgcgaggagcatagacgaccagctgaagaaacgaggcgaaaagtatgtcctcctggacatcagccacagaccaagagacaaggttcttgcccacttccccaacatcgccgccgagtgcctgcggtacggcctggacatcacccggcagcccatcccggtggtcccggcggcgcactacatgtgcggcggcgtccgggcagggctgcagggggagaccaacgtgaagggcctctacgtggccggcgaggtcgcgtgcacggggctgcacggtgccaaccggctagcaagcaactcgctgctggaagcgctggtgttcgccaggagggcggtgcagccgtccatcgacctcatggtggatgccgacggagatgccagaccgtcgctggtggcgaggtgggcacggccgacgctgccgcggtcggtgctgggcgacagcgtgctgtcggacatcgtggggcggacgaggcaggccaggatggagctgcaatcagtgatgtgggagtatgtcggcatcgtgcgctcgacggggcggctgaagcaggccgagtggaggatcggtgacctggagtcggagtgggaggagttcctgttccggcgggggtggaagccgaccacggtgggcgtcgaggtctgcgagatgcgcaacctcttctgctgcgccaagctcgtcgtcaggagcgcgctggccaggcgcgagagccgcggcctgcacttcaccgaggacttcccgtacctggaggagagcaggaggaagcctacggtcatcttcccggccgccgtgcaggagctcacgtggagctccaagccgttgcagaggcagctgcaagcagatgacaatgcatgcagttcatccggctgggccttggggattcgttaattcattcattaatttttaagaactctcagtcgacagcatacacaaaatccagacagttaggctgtagtagcctgcgtatctttgcaattcttgccagttccagctgttgcaacttgtaaacggtgttgttggagctgcattatggtttatgaaccttgatccgtagtatatgtt

SEQ ID NO: 17160 - protein, 664 aa, Zea mays subsp. mays
  peptide (1)..(664): Ceres Seq. ID no. 12368260
  misc_feature (184)..(482): Pfam Name: FAD binding domain Pfam Description: FAD binding domain
  misc_feature (88)..(628): Homolog of NCBI NO: 22998899 NR Description: hypothetical protein [Magnetococcus sp. MC-1]
  misc_feature (87)..(616): Homolog of NCBI NO: 22983294 NR Description: hypothetical protein [Burkholderia fungorum]
  misc_feature (87)..(620): Homolog of NCBI NO: 29348593 NR Description: L-aspartate oxidase [Bacteroides thetaiotaomicron
  misc_feature (88)..(628): Homolog of NCBI NO: 24214211 NR Description: L-aspartate oxidase
  misc_feature (88)..(616): Homolog of NCBI NO: 39996926 NR Description: L-aspartate oxidase [Geobacter sulfurreducens
  misc_feature (88)..(620): Homolog of NCBI NO: 21673396 NR Description: L-aspartate oxidase [Chlorobium tepidum TLS]
  misc_feature (533)..(616): Homolog of NCBI NO: 30249844 NR Description: nadB1
  misc_feature (87)..(568): Homolog of NCBI NO: 30249844 NR Description: nadB1
  misc_feature (71)..(644): Homolog of NCBI NO: 11252514 NR Description: L-aspartate oxidase-like protein - Arabidopsis
  misc_feature (71)..(644): Homolog of NCBI NO: 18417469 NR Description: L-aspartate oxidase -like protein
MANLTNGFASLHCAGAMHVDKGHMQASGLPFLSFRRCAQLDISRLGSVPRFMGATSATVSQHHVRQRISAIRASTLSCLQDDATKFFDFVVIGSGVAGLRYALEVSKHGSVAIITKAEPHESNTNYAQGGVSAVLCPSDSVESHMKDTIVAGAYLCDEEIVRVVCTEGPERVKELIAMGASFDHGEDGRLHLAREGGHSHNRIVHSADMTGREIERALLQAVHNDDNISLFGHHFAIDLLTCQKNGEIYCYGVDSIDIETQKVVRFISKVTLLASGGAGHIYPTTTNPPVATGDGIAMCHRAQAVISNMEFVQFHPTALSDEGLPIKPKTRRENAFLITEAVRGDGGILYNQSMERFMPMYDDRSELAPRDVVARSIDDQLKKRGEKYVLLDISHRPRDKVLAHFPNIAAECLRYGLDITRQPIPVVPAAHYMCGGVRAGLQGETNVKGLYVAGEVACTGLHGANRLASNSLLEALVFARRAVQPSIDLMVDADGDARPSLVARWARPTLPRSVLGDSVLSDIVGRTRQARMELQSVMWEYVGIVRSTGRLKQAEWRIGDLESEWEEFLFRRGWKPTTVGVEVCEMRNLFCCAKLVVRSALARRESRGLHFTEDFPYLEESRRKPTVIFPAAVQELTWSSKPLQRQLQADDNACSSSGWALGIR

SEQ ID NO: 17161 - protein, 648 aa, Zea mays subsp. mays
  peptide (1)..(648): Ceres Seq. ID no. 12368261
  misc_feature (168)..(466): Pfam Name: FAD binding domain Pfam Description: FAD binding domain
  misc_feature (72)..(612): Homolog of NCBI NO: 22998899 NR Description: hypothetical protein [Magnetococcus sp. MC-1]
  misc_feature (71)..(600): Homolog of NCBI NO: 22983294 NR Description: hypothetical protein [Burkholderia fungorum]
  misc_feature (71)..(604): Homolog of NCBI NO: 29348593 NR Description: L-aspartate oxidase [Bacteroides thetaiotaomicron
  misc_feature (72)..(612): Homolog of NCBI NO: 24214211 NR Description: L-aspartate oxidase
  misc_feature (72)..(600): Homolog of NCBI NO: 39996926 NR Description: L-aspartate oxidase [Geobacter sulfurreducens
  misc_feature (72)..(604): Homolog of NCBI NO: 21673396 NR Description: L-aspartate oxidase [Chlorobium tepidum TLS]
  misc_feature (517)..(600): Homolog of NCBI NO: 30249844 NR Description: nadB1
  misc_feature (71)..(552): Homolog of NCBI NO: 30249844 NR Description: nadB1
  misc_feature (55)..(628): Homolog of NCBI NO: 11252514 NR Description: L-aspartate oxidase-like protein - Arabidopsis
  misc_feature (55)..(628): Homolog of NCBI NO: 18417469 NR Description: L-aspartate oxidase -like protein
MHVDKGHMQASGLPFLSFRRCAQLDISRLGSVPRFMGATSATVSQHHVRQRISAIRASTLSCLQDDATKFFDFVVIGSGVAGLRYALEVSKHGSVAIITKAEPHESNTNYAQGGVSAVLCPSDSVESHMKDTIVAGAYLCDEEIVRVVCTEGPERVKELIAMGASFDHGEDGRLHLAREGGHSHNRIVHSADMTGREIERALLQAVHNDDNISLFGHHFAIDLLTCQKNGEIYCYGVDSIDIETQKVVRFISKVTLLASGGAGHIYPTTTNPPVATGDGIAMCHRAQAVISNMEFVQFHPTALSDEGLPIKPKTRRENAFLITEAVRGDGGILYNQSMERFMPMYDDRSELAPRDVVARSIDDQLKKRGEKYVLLDISHRPRDKVLAHFPNIAAECLRYGLDITRQPIPVVPAAHYMCGGVRAGLQGETNVKGLYVAGEVACTGLHGANRLASNSLLEALVFARRAVQPSIDLMVDADGDARPSLVARWARPTLPRSVLGDSVLSDIVGRTRQARMELQSVMWEYVGIVRSTGRLKQAEWRIGDLESEWEEFLFRRGWKPTTVGVEVCEMRNLFCCAKLVVRSALARRESRGLHFTEDFPYLEESRRKPTVIFPAAVQELTWSSKPLQRQLQADDNACSSSGWALGIR

SEQ ID NO: 17162 - protein, 641 aa, Zea mays subsp. mays
  peptide (1)..(641): Ceres Seq. ID no. 12368262
  misc_feature (161)..(459): Pfam Name: FAD binding domain Pfam Description: FAD binding domain
  misc_feature (65)..(605): Homolog of NCBI NO: 22998899 NR Description: hypothetical protein [Magnetococcus sp. MC-1]
  misc_feature (64)..(593): Homolog of NCBI NO: 22983294 NR Description: hypothetical protein [Burkholderia fungorum]
  misc_feature (64)..(597): Homolog of NCBI NO: 29348593 NR Description: L-aspartate oxidase [Bacteroides thetaiotaomicron
  misc_feature (65)..(605): Homolog of NCBI NO: 24214211 NR Description: L-aspartate oxidase
  misc_feature (65)..(593): Homolog of NCBI NO: 39996926 NR Description: L-aspartate oxidase [Geobacter sulfurreducens
  misc_feature (65)..(597): Homolog of NCBI NO: 21673396 NR Description: L-aspartate oxidase [Chlorobium tepidum TLS]
  misc_feature (510)..(593): Homolog of NCBI NO: 30249844 NR Description: nadB1
  misc_feature (64)..(545): Homolog of NCBI NO: 30249844 NR Description: nadB1
  misc_feature (48)..(621): Homolog of NCBI NO: 11252514 NR Description: L-aspartate oxidase-like protein - Arabidopsis
  misc_feature (48)..(621): Homolog of NCBI NO: 18417469 NR Description: L-aspartate oxidase -like protein
MQASGLPFLSFRRCAQLDISRLGSVPRFMGATSATVSQHHVRQRISAIRASTLSCLQDDATKFFDFVVIGSGVAGLRYALEVSKHGSVAIITKAEPHESNTNYAQGGVSAVLCPSDSVESHMKDTIVAGAYLCDEEIVRVVCTEGPERVKELIAMGASFDHGEDGRLHLAREGGHSHNRIVHSADMTGREIERALLQAVHNDDNISLFGHHFAIDLLTCQKNGEIYCYGVDSIDIETQKVVRFISKVTLLASGGAGHIYPTTTNPPVATGDGIAMCHRAQAVISNMEFVQFHPTALSDEGLPIKPKTRRENAFLITEAVRGDGGILYNQSMERFMPMYDDRSELAPRDVVARSIDDQLKKRGEKYVLLDISHRPRDKVLAHFPNIAAECLRYGLDITRQPIPVVPAAHYMCGGVRAGLQGETNVKGLYVAGEVACTGLHGANRLASNSLLEALVFARRAVQPSIDLMVDADGDARPSLVARWARPTLPRSVLGDSVLSDIVGRTRQARMELQSVMWEYVGIVRSTGRLKQAEWRIGDLESEWEEFLFRRGWKPTTVGVEVCEMRNLFCCAKLVVRSALARRESRGLHFTEDFPYLEESRRKPTVIFPAAVQELTWSSKPLQRQLQADDNACSSSGWALGIR

SEQ ID NO: 17163 - DNA, 705 bp, Zea mays subsp. mays
  misc_feature (1)..(705): Ceres Seq. ID no. 12354738
  misc_feature: MA Experiment ID: 108504 Result: Up-regulated in Transcription
  misc_feature: MA Experiment 108504 PARAMETER Experiment Name: Zm_Drought_P Parameter: Age (day) Value: 8
  misc_feature: MA Experiment 108504 PARAMETER Experiment Name: Zm_Drought_P Parameter: Organism Value: Zea mays
  misc_feature: MA Experiment 108504 PARAMETER Experiment Name: Zm_Drought_P Parameter: Plant Line Value: 35A19
  misc_feature: MA Experiment 108504 PARAMETER Experiment Name: Zm_Drought_P Parameter: Timepoint (hr) Value: 12
  misc_feature: MA Experiment 108504 PARAMETER Experiment Name: Zm_Drought_P Parameter: Tissue Value: Aerial
  misc_feature: MA Experiment 108504 PARAMETER Experiment Name: Zm_Drought_P Parameter: Treatment Value: Drought vs. No Drought
  misc_feature: MA Experiment ID: 108522 Result: Down-regulated in Transcription
  misc_feature: MA Experiment 108522 PARAMETER Experiment Name: Zm_42deg_Heat_P Parameter: Age (day) Value: 8
  misc_feature: MA Experiment 108522 PARAMETER Experiment Name: Zm_42deg_Heat_P Parameter: Organism Value: Zea mays
  misc_feature: MA Experiment 108522 PARAMETER Experiment Name: Zm_42deg_Heat_P Parameter: Plant Line Value: 35A19
  misc_feature: MA Experiment 108522 PARAMETER Experiment Name: Zm_42deg_Heat_P Parameter: Temperature (deg C) Value: 42 vs. 22
  misc_feature: MA Experiment 108522 PARAMETER Experiment Name: Zm_42deg_Heat_P Parameter: Timepoint (hr) Value: 1
  misc_feature: MA Experiment 108522 PARAMETER Experiment Name: Zm_42deg_Heat_P Parameter: Tissue Value: Aerial
  misc_feature: MA Experiment ID: 108535 Result: Up-regulated in Transcription
  misc_feature: MA Experiment 108535 PARAMETER Experiment Name: Zm_Meristem_P Parameter: Age (day) Value: 8
  misc_feature: MA Experiment 108535 PARAMETER Experiment Name: Zm_Meristem_P Parameter: Organism Value: Zea mays
  misc_feature: MA Experiment 108535 PARAMETER Experiment Name: Zm_Meristem_P Parameter: Plant Line Value: 35A19
  misc_feature: MA Experiment 108535 PARAMETER Experiment Name: Zm_Meristem_P Parameter: Tissue Value: Root Meristem vs. Above Root Meristem
  misc_feature: MA Experiment ID: 108539 Result: Up-regulated in Transcription
  misc_feature: MA Experiment 108539 PARAMETER Experiment Name: Zm_20percent_PEG_P Parameter: Age (day) Value: 8
  misc_feature: MA Experiment 108539 PARAMETER Experiment Name: Zm_20percent_PEG_P Parameter: Organism Value: Zea mays
  misc_feature: MA Experiment 108539 PARAMETER Experiment Name: Zm_20percent_PEG_P Parameter: Plant Line Value: 35A19
  misc_feature: MA Experiment 108539 PARAMETER Experiment Name: Zm_20percent_PEG_P Parameter: Timepoint (hr) Value: 1
  misc_feature: MA Experiment 108539 PARAMETER Experiment Name: Zm_20percent_PEG_P Parameter: Tissue Value: Aerial
  misc_feature: MA Experiment 108539 PARAMETER Experiment Name: Zm_20percent_PEG_P Parameter: Treatment Value: 20percent PEG vs. No Treatment
  misc_feature: MA Experiment ID: 108544 Result: Up-regulated in Transcription
  misc_feature: MA Experiment ID: 108548 Result: Up-regulated in Transcription
  misc_feature: MA Experiment 108548 PARAMETER Experiment Name: Zm_20uM_KNO3_H-to-L_P Parameter: Age (day) Value: 11
  misc_feature: MA Experiment 108548 PARAMETER Experiment Name: Zm_20uM_KNO3_H-to-L_P Parameter: Organism Value: Zea mays
  misc_feature: MA Experiment 108548 PARAMETER Experiment Name: Zm_20uM_KNO3_H-to-L_P Parameter: Plant Line Value: 35A19
  misc_feature: MA Experiment 108548 PARAMETER Experiment Name: Zm_20uM_KNO3_H-to-L_P Parameter: Timepoint (hr) Value: 4
  misc_feature: MA Experiment 108548 PARAMETER Experiment Name: Zm_20uM_KNO3_H-to-L_P Parameter: Tissue Value: Roots
  misc_feature: MA Experiment 108548 PARAMETER Experiment Name: Zm_20uM_KNO3_H-to-L_P Parameter: Treatment Value: 20uM KNO3 vs. 60mM KNO3
  misc_feature: MA Experiment ID: 108559 Result: Up-regulated in Transcription
  misc_feature: MA Experiment 108559 PARAMETER Experiment Name: Zm_5mM_NO_P Parameter: Age (day) Value: 8
  misc_feature: MA Experiment 108559 PARAMETER Experiment Name: Zm_5mM_NO_P Parameter: Organism Value: Zea mays
  misc_feature: MA Experiment 108559 PARAMETER Experiment Name: Zm_5mM_NO_P Parameter: Plant Line Value: 35A19
  misc_feature: MA Experiment 108559 PARAMETER Experiment Name: Zm_5mM_NO_P Parameter: Timepoint (hr) Value: 12
  misc_feature: MA Experiment 108559 PARAMETER Experiment Name: Zm_5mM_NO_P Parameter: Tissue Value: Aerial
  misc_feature: MA Experiment 108559 PARAMETER Experiment Name: Zm_5mM_NO_P Parameter: Treatment Value: 5mM NO vs. No Treatment
  misc_feature: MA Experiment ID: 108597 Result: Up-regulated in Transcription
  misc_feature: MA Experiment 108597 PARAMETER Experiment Name: Zm_100uM_ABA_P Parameter: Age (day) Value: 9
  misc_feature: MA Experiment 108597 PARAMETER Experiment Name: Zm_100uM_ABA_P Parameter: Organism Value: Zea mays
  misc_feature: MA Experiment 108597 PARAMETER Experiment Name: Zm_100uM_ABA_P Parameter: Plant Line Value: 35A19
  misc_feature: MA Experiment 108597 PARAMETER Experiment Name: Zm_100uM_ABA_P Parameter: Timepoint (hr) Value: 24
  misc_feature: MA Experiment 108597 PARAMETER Experiment Name: Zm_100uM_ABA_P Parameter: Tissue Value: Aerial
  misc_feature: MA Experiment 108597 PARAMETER Experiment Name: Zm_100uM_ABA_P Parameter: Treatment Value: 100uM ABA vs. No Treatment
  misc_feature: MA Experiment ID: 20000535 Result: Up-regulated in Transcription
  misc_feature: MA Experiment 20000535 PARAMETER Experiment Name: Zm_Hybrid_Seed_Dev_P Parameter: DAP Value: 30 vs. 12
  misc_feature: MA Experiment 20000535 PARAMETER Experiment Name: Zm_Hybrid_Seed_Dev_P Parameter: Organism Value: Zea mays
  misc_feature: MA Experiment 20000535 PARAMETER Experiment Name: Zm_Hybrid_Seed_Dev_P Parameter: Plant Line Value: 35A19
  misc_feature: MA Experiment 20000535 PARAMETER Experiment Name: Zm_Hybrid_Seed_Dev_P Parameter: Tissue Value: Embryo vs. Unfert Floret
atccgcacactgaatcacgaatctctcgagccgcagtccagtccatccggctgcaggctctctgctgattctgagtacgttggcgttccaggcgatagctagcttagcttggcttggcacagtcgatcgtctccgatggcggcggacatgcagattgtcctggccgcggggaggaagatcgaggcgcagtatgtgagatgaaggtgccgctctactcctacggctgcgagaagaagatcaagaaggcactgtcacatctcaaaggtatacattcggttcaggcagactaccacgagcagaaggtgaccgtgtgggggatctgcgaccgcgacgacgtgctcgctgccgtccggaagaagcgccgagccgcgcggttctgggatgatgatggcggcgaactgggtccacgcgagcgtgcgccgacgcccggccgagaagctcccaagcagtacctggcagccttcgccgcgtacaggtggaggaagtcgtggaagaagcttttcccgctgatccgcctctgaagctcaccgtgtgtgcttaagcttattggcttctagcttctccacaagtgagcagtgtgtgtgcctgcgtcttgacgacgtctcaggaaccggaaaaaggggttggaacatggaacttaagttctaacagtagcccgtgcttcttggtagcaaataaacatgcttcgttaccgaagccttttgg

SEQ ID NO: 17164 - protein, 107 aa, Zea mays subsp. mays
  peptide (1)..(107): Ceres Seq. ID no. 12354739
  misc_feature (1)..(61): Homolog of NCBI NO: 25406916 NR Description: hypothetical protein [imported] - Arabidopsis
  misc_feature (1)..(61): Homolog of NCBI NO: 15221451 NR Description: hypothetical protein; protein id: At1g06330.1
  misc_feature (1)..(62): Homolog of NCBI NO: 21536757 NR Description: unknown [Arabidopsis thaliana]
  misc_feature (1)..(62): Homolog of NCBI NO: 18417024 NR Description: Expressed protein
  misc_feature (1)..(62): Homolog of NCBI NO: 7487518 NR Description: hypothetical protein T29A15.80 - Arabidopsis
  misc_feature (1)..(107): Homolog of NCBI NO: 38346796 NR Description: OSJNBa0088A01.3 [Oryza sativa (japonica
  misc_feature (1)..(86): Homolog of NCBI NO: 21397273 NR Description: Putative atfp6-like protein
  misc_feature (1)..(93): Homolog of NCBI NO: 37536458 NR Description: hypothetical protein [Oryza sativa (japonica
MKVPLYSYGCEKKIKKALSHLKGIHSVQADYHEQKVTVWGICDRDDVLAAVRKKRRAARFWDDDGGELGPRERAPTPGREAPKQYLAAFAAYRWRKSWKKLFPLIRL

SEQ ID NO: 17165 - DNA, 2501 bp, Zea mays subsp. mays
  misc_feature (1)..(2501): Ceres Seq. ID no. 12363395
  misc_feature: MA Experiment ID: 108534 Result: Up-regulated in Transcription
  misc_feature: MA Experiment 108534 PARAMETER Experiment Name: Zm_4deg_Cold_P Parameter: Age (hr) Value: 8
  misc_feature: MA Experiment 108534 PARAMETER Experiment Name: Zm_4deg_Cold_P Parameter: Organism Value: Zea mays
  misc_feature: MA Experiment 108534 PARAMETER Experiment Name: Zm_4deg_Cold_P Parameter: Plant Line Value: 35A19
  misc_feature: MA Experiment 108534 PARAMETER Experiment Name: Zm_4deg_Cold_P Parameter: Temperature (deg C) Value: 4 vs. 22
  misc_feature: MA Experiment 108534 PARAMETER Experiment Name: Zm_4deg_Cold_P Parameter: Timepoint (hr) Value: 6
  misc_feature: MA Experiment 108534 PARAMETER Experiment Name: Zm_4deg_Cold_P Parameter: Tissue Value: Aerial
  misc_feature: MA Experiment ID: 108544 Result: Down-regulated in Transcription
  misc_feature: MA Experiment ID: 108546 Result: Up-regulated in Transcription
  misc_feature: MA Experiment 108546 PARAMETER Experiment Name: Zm_Imbibed_Seeds_P Parameter: Age (day) Value: 3 vs. 2
  misc_feature: MA Experiment 108546 PARAMETER Experiment Name: Zm_Imbibed_Seeds_P Parameter: Organism Value: Zea mays
  misc_feature: MA Experiment 108546 PARAMETER Experiment Name: Zm_Imbibed_Seeds_P Parameter: Plant Line Value: 35A19
  misc_feature: MA Experiment 108546 PARAMETER Experiment Name: Zm_Imbibed_Seeds_P Parameter: Tissue Value: Roots vs. Embryo
  misc_feature: MA Experiment ID: 108559 Result: Down-regulated in Transcription
  misc_feature: MA Experiment 108559 PARAMETER Experiment Name: Zm_5mM_NO_P Parameter: Age (day) Value: 8
  misc_feature: MA Experiment 108559 PARAMETER Experiment Name: Zm_5mM_NO_P Parameter: Organism Value: Zea mays
  misc_feature: MA Experiment 108559 PARAMETER Experiment Name: Zm_5mM_NO_P Parameter: Plant Line Value: 35A19
  misc_feature: MA Experiment 108559 PARAMETER Experiment Name: Zm_5mM_NO_P Parameter: Timepoint (hr) Value: 12
  misc_feature: MA Experiment 108559 PARAMETER Experiment Name: Zm_5mM_NO_P Parameter: Tissue Value: Aerial
  misc_feature: MA Experiment 108559 PARAMETER Experiment Name: Zm_5mM_NO_P Parameter: Treatment Value: 5mM NO vs. No Treatment
  misc_feature: MA Experiment ID: 20000478 Result: Down-regulated in Transcription
  misc_feature: MA Experiment 20000478 PARAMETER Experiment Name: Zm_5mM_SA_P Parameter: Age (day) Value: 11
  misc_feature: MA Experiment 20000478 PARAMETER Experiment Name: Zm_5mM_SA_P Parameter: Organism Value: Zea mays
  misc_feature: MA Experiment 20000478 PARAMETER Experiment Name: Zm_5mM_SA_P Parameter: Plant Line Value: 35A19
  misc_feature: MA Experiment 20000478 PARAMETER Experiment Name: Zm_5mM_SA_P Parameter: Timepoint (hr) Value: 72
  misc_feature: MA Experiment 20000478 PARAMETER Experiment Name: Zm_5mM_SA_P Parameter: Tissue Value: Aerial
  misc_feature: MA Experiment 20000478 PARAMETER Experiment Name: Zm_5mM_SA_P Parameter: Treatment Value: 5mM SA vs. No Treatment
  misc_feature: MA Experiment ID: 20000488 Result: Down-regulated in Transcription
  misc_feature: MA Experiment 20000488 PARAMETER Experiment Name: Zm_50mM_NH4NO3_L_to_H_P Parameter: Organism Value: Zea mays
  misc_feature: MA Experiment 20000488 PARAMETER Experiment Name: Zm_50mM_NH4NO3_L_to_H_P Parameter: Timepoint (hr) Value: 8
  misc_feature: MA Experiment 20000488 PARAMETER Experiment Name: Zm_50mM_NH4NO3_L_to_H_P Parameter: Tissue Value: Leaves
  misc_feature: MA Experiment 20000488 PARAMETER Experiment Name: Zm_50mM_NH4NO3_L_to_H_P Parameter: Treatment Value: 50mM NH4NO3 vs. 100mM Mannitol
  misc_feature: MA Experiment ID: 20000492 Result: Down-regulated in Transcription
  misc_feature: MA Experiment 20000492 PARAMETER Experiment Name: Zm_Hybrid_Seed_Dev_P Parameter: DAP Value: 12
  misc_feature: MA Experiment 20000492 PARAMETER Experiment Name: Zm_Hybrid_Seed_Dev_P Parameter: Organism Value: Zea mays
  misc_feature: MA Experiment 20000492 PARAMETER Experiment Name: Zm_Hybrid_Seed_Dev_P Parameter: Plant Line Value: 35A19
  misc_feature: MA Experiment 20000492 PARAMETER Experiment Name: Zm_Hybrid_Seed_Dev_P Parameter: Tissue Value: Fert Kernel vs. Unfert Floret
  misc_feature: MA Experiment ID: 20000535 Result: Down-regulated in Transcription
  misc_feature: MA Experiment 20000535 PARAMETER Experiment Name: Zm_Hybrid_Seed_Dev_P Parameter: DAP Value: 30 vs. 12
  misc_feature: MA Experiment 20000535 PARAMETER Experiment Name: Zm_Hybrid_Seed_Dev_P Parameter: Organism Value: Zea mays
  misc_feature: MA Experiment 20000535 PARAMETER Experiment Name: Zm_Hybrid_Seed_Dev_P Parameter: Plant Line Value: 35A19
  misc_feature: MA Experiment 20000535 PARAMETER Experiment Name: Zm_Hybrid_Seed_Dev_P Parameter: Tissue Value: Embryo vs. Unfert Floret
  misc_feature: MA Experiment ID: 20000630 Result: Down-regulated in Transcription
  misc_feature: MA Experiment 20000630 PARAMETER Experiment Name: Zm_Herbicide-Treatments_P Parameter: Timepoint (hr) Value: 4
  misc_feature: MA Experiment 20000630 PARAMETER Experiment Name: Zm_Herbicide-Treatments_P Parameter: Tissue Value: Aerial
  misc_feature: MA Experiment 20000630 PARAMETER Experiment Name: Zm_Herbicide-Treatments_P Parameter: Treatment Value: Roundup vs. No Treatment
  misc_feature: MA Experiment ID: 20001608 Result: Down-regulated in Transcription
  misc_feature: MA Experiment 20001608 PARAMETER Experiment Name: Zm_50ppm_KNO3_L-to-H_P Parameter: Age (day) Value: 21
  misc_feature: MA Experiment 20001608 PARAMETER Experiment Name: Zm_50ppm_KNO3_L-to-H_P Parameter: Organism Value: Zea mays
  misc_feature: MA Experiment 20001608 PARAMETER Experiment Name: Zm_50ppm_KNO3_L-to-H_P Parameter: Plant Line Value: 35A19
  misc_feature: MA Experiment 20001608 PARAMETER Experiment Name: Zm_50ppm_KNO3_L-to-H_P Parameter: Timepoint (hr) Value: 48
  misc_feature: MA Experiment 20001608 PARAMETER Experiment Name: Zm_50ppm_KNO3_L-to-H_P Parameter: Tissue Value: Shoots
  misc_feature: MA Experiment 20001608 PARAMETER Experiment Name: Zm_50ppm_KNO3_L-to-H_P Parameter: Treatment Value: 50ppm KNO3 vs. 50ppm KCl
  misc_feature: MA Experiment ID: 20001610 Result: Up-regulated in Transcription
  misc_feature: MA Experiment 20001610 PARAMETER Experiment Name: Zm_50ppm_KNO3_L-to-H_P Parameter: Age (day) Value: 19
  misc_feature: MA Experiment 20001610 PARAMETER Experiment Name: Zm_50ppm_KNO3_L-to-H_P Parameter: Organism Value: Zea mays
  misc_feature: MA Experiment 20001610 PARAMETER Experiment Name: Zm_50ppm_KNO3_L-to-H_P Parameter: Plant Line Value: 35A19
  misc_feature: MA Experiment 20001610 PARAMETER Experiment Name: Zm_50ppm_KNO3_L-to-H_P Parameter: Timepoint (hr) Value: 2
  misc_feature: MA Experiment 20001610 PARAMETER Experiment Name: Zm_50ppm_KNO3_L-to-H_P Parameter: Tissue Value: Roots
  misc_feature: MA Experiment 20001610 PARAMETER Experiment Name: Zm_50ppm_KNO3_L-to-H_P Parameter: Treatment Value: 50ppm KNO3 vs. 50ppm KCl
gcacgagaccattacctagaacatcctaatcgaaaaatcggagctctataaatcgccccaaccccctccctcgttctgccaccattgccatatcctcgatcacaagagcagctactagctgcctctagctcgatcggttagtttgtcgtgttgcttacgtacgtcagcagaggccatcgtcgagtgtatccagtggtcgagaagagggaagaaatgtctgcgaacgacggcgccggcgacacgaagatgagggcgatcgtcgtcgtagaggaaggggagatgagcgcgccggcggcgacgccgaagcagggcaagtgctgcgagtacacgctggacggctccgtcgacatgaagggccggccggcggtcaaggggaaatcaggagggtggcttgccggtgctctaatcctcgtgaaccagggcctggcgacgctggctttcttcggcgtgaacgtgaacctggtgctgttccctgacccgggtgctggggcagagcaatggcgacgccgccaacaacgtcagcaagtggacgggcaccgtgtacatgttctccctcatcggcgccttcctcagcgactcctattggggacgctacaagacctgcgccatcttccaggccatctttgtcctcggcctcgcgctgctgtcggtgtcgtcgcacctctacctaatcaggccggacgggtgcggcatggagcacgcgccctgcggcccgcactccggcaaggagctggggatcttctacatcgcgctgtacatgatcgccttcggcaacggcgggtaccagcccaacatcgccaccctgggcgccgaccagttcgacgaggaggaccccgccgaggcgcactccaaggtctccttcttcagctacttctacctcgccctcaacctcggctcgctcttctccaacaccttcctcagctacctcgaggacaagggcagctgggcgctcggcttctgggcctccaccgccgccgccgccacagcgctcctgcttttcctcagcggcacgctccggtaccgctatttccagcccggagggaacccgatcggaaggattggccaggtcgccatcgccgcgtgcaggaactggaaggcgggcgtgtcgaccgaagtggtaagcctgtacgagggcgacgagaaggcggatgccggtggcaggaagcttctgcacacgcaagggttcagtttcttggaccgcgcggcgcacgcggacactgactccaagctcggcgcgcgcgatccctggaagctgtgctcggtgacgcaggtggaggaggtcaagagcatcctgaggctcctccccatctggctctgcaccatcctctactccgttgtcttcacccagatggcctcgctctttgtcgtgcagggcgccgcgatgcgccgcaccaccccgttctccggcttctccgtcccgccctccagcatgtcggccttcgacattctcacagtcgccgccacgattttcctgtaccgccgcactatctgcccgttcctagcgcggctcagcggccgcccggctggccccaccgagctgcagaggatgggcctcggcctggtcgtgggtgccctggccatgaccacggccgggacggtcgagcacttccggaaggccagggccaccgcagcgatgagcagcgacctgcatatcatgtggcaggtgccgcagtatgcgctgatcggcgtgtcggaggtgatgatgtacgtcgggcagctcgagttcttcaacggccagatgcccgacgggctcaaaagcttcggagcgcgctgtgcatgatgtccatgtcgctcggcaactacttcagtgacatcatcgtgagcgcggtgaccaggctcaccacgacgcgagggcggtccgggtggatcccggctgacctcaacgaggggcacctcgacaagttctacttcctgctcgccgtgctggccgtcgcggacttcgcggtgtacctcgtatgcgcgagccgctacgggagcggcaaagtggacgggaggagcagcgacgacgaggaggagggagcggccggtcaggtgacatccccggcttacgcatgaccatcaccggccgcccggccggcgggcatcgtacgtatgttgttcttgtcttcttgaggtggaggctggcaggctgcaaatctcgagggccattggttatttggttgacggagttcttccattgacgacgatagcacaagcatggggcgagcatggacatagtgatatgactaattaaagaataagcacttaagcaggactagctaaacactacatgctgcagcatcatgctcgcggtttttggccagtgtaacaacagacgacgattgttactgaccacgactgttctttgcgtggtctacagagttcgcttctgcaaaattcaataatgggcgagtgctgtatcatataaagtcgcaggttgcgccacgtagctacgatgtgactaacaaacaaatatgtattcaagttatgtattaaacggttaaccgtgtctttttaccgtt

SEQ ID NO: 17166 - protein, 411 aa, Zea mays subsp. mays
  peptide (1)..(411): Ceres Seq. ID no. 12363396
  misc_feature (17)..(410): Pfam Name: POT family Pfam Description: POT family
  misc_feature (1)..(405): Homolog of NCBI NO: 30696666 NR Description: oligopeptide transporter -related [Arabidopsis
  misc_feature (1)..(405): Homolog of NCBI NO: 34895718 NR Description: putative peptide transport protein
  misc_feature (1)..(405): Homolog of NCBI NO: 7489404 NR Description: peptide transport protein - barley
  misc_feature (1)..(405): Homolog of NCBI NO: 15076661 NR Description: peptide transporter [Oryza sativa (japonica
  misc_feature (1)..(411): Homolog of NCBI NO: 15241147 NR Description: peptide transport protein-like; protein id:
  misc_feature (1)..(410): Homolog of NCBI NO: 7488004 NR Description: peptide transport protein homolog F17L22.140 -
  misc_feature (1)..(410): Homolog of NCBI NO: 26451333 NR Description: putative peptide transporter [Arabidopsis
  misc_feature (1)..(410): Homolog of NCBI NO: 30685529 NR Description: peptide transporter - like protein [Arabidopsis
  misc_feature (1)..(410): Homolog of NCBI NO: 30692706 NR Description: peptide transporter PTR2-B -related [Arabidopsis
  misc_feature (1)..(410): Homolog of NCBI NO: 25513683 NR Description: F5D14.23 protein - Arabidopsis thaliana
MFSLIGAFLSDSYWGRYKTCAIFQAIFVLGLALLSVSSHLYLIRPDGCGMEHAPCGPHSGKELGIFYIALYMIAFGNGGYQPNIATLGADQFDEEDPAEAHSKVSFFSYFYLALNLGSLFSNTFLSYLEDKGSWALGFWASTAAAATALLLFLSGTLRYRYFQPGGNPIGRIGQVAIAACRNWKAGVSTEVVSLYEGDEKADAGGRKLLHTQGFSFLDRAAHADTDSKLGARDPWKLCSVTQVEEVKSILRLLPIWLCTILYSVVFTQMASLFVVQGAAMRRTTPFSGFSVPPSSMSAFDILTVAATIFLYRRTICPFLARLSGRPAGPTELQRMGLGLVVGALAMTTAGTVEHFRKARATAAMSSDLHIMWQVPQYALIGVSEVMMYVGQLEFFNGQMPDGLKSFGARCA

SEQ ID NO: 17167 - protein, 362 aa, Zea mays subsp. mays
  peptide (1)..(362): Ceres Seq. ID no. 12363397
  misc_feature (1)..(361): Pfam Name: POT family Pfam Description: POT family
  misc_feature (1)..(356): Homolog of NCBI NO: 30696666 NR Description: oligopeptide transporter -related [Arabidopsis
  misc_feature (1)..(356): Homolog of NCBI NO: 34895718 NR Description: putative peptide transport protein
  misc_feature (1)..(356): Homolog of NCBI NO: 7489404 NR Description: peptide transport protein - barley
  misc_feature (1)..(356): Homolog of NCBI NO: 15076661 NR Description: peptide transporter [Oryza sativa (japonica
  misc_feature (1)..(362): Homolog of NCBI NO: 15241147 NR Description: peptide transport protein-like; protein id:
  misc_feature (1)..(361): Homolog of NCBI NO: 7488004 NR Description: peptide transport protein homolog F17L22.140 -
  misc_feature (1)..(361): Homolog of NCBI NO: 26451333 NR Description: putative peptide transporter [Arabidopsis
  misc_feature (1)..(361): Homolog of NCBI NO: 30685529 NR Description: peptide transporter - like protein [Arabidopsis
  misc_feature (1)..(361): Homolog of NCBI NO: 30692706 NR Description: peptide transporter PTR2-B -related [Arabidopsis
  misc_feature (1)..(361): Homolog of NCBI NO: 25513683 NR Description: F5D14.23 protein - Arabidopsis thaliana
MEHAPCGPHSGKELGIFYIALYMIAFGNGGYQPNIATLGADQFDEEDPAEAHSKVSFFSYFYLALNLGSLFSNTFLSYLEDKGSWALGFWASTAAAATALLLFLSGTLRYRYFQPGGNPIGRIGQVAIAACRNWKAGVSTEVVSLYEGDEKADAGGRKLLHTQGFSFLDRAAHADTDSKLGARDPWKLCSVTQVEEVKSILRLLPIWLCTILYSVVFTQMASLFVVQGAAMRRTTPFSGFSVPPSSMSAFDILTVAATIFLYRRTICPFLARLSGRPAGPTELQRMGLGLVVGALAMTTAGTVEHFRKARATAAMSSDLHIMWQVPQYALIGVSEVMMYVGQLEFFNGQMPDGLKSFGARCA

SEQ ID NO: 17168 - protein, 340 aa, Zea mays subsp. mays
  peptide (1)..(340): Ceres Seq. ID no. 12363398
  misc_feature (1)..(339): Pfam Name: POT family Pfam Description: POT family
  misc_feature (1)..(334): Homolog of NCBI NO: 30696666 NR Description: oligopeptide transporter -related [Arabidopsis
  misc_feature (1)..(334): Homolog of NCBI NO: 34895718 NR Description: putative peptide transport protein
  misc_feature (1)..(334): Homolog of NCBI NO: 7489404 NR Description: peptide transport protein - barley
  misc_feature (1)..(334): Homolog of NCBI NO: 15076661 NR Description: peptide transporter [Oryza sativa (japonica
  misc_feature (1)..(340): Homolog of NCBI NO: 15241147 NR Description: peptide transport protein-like; protein id:
  misc_feature (1)..(339): Homolog of NCBI NO: 7488004 NR Description: peptide transport protein homolog F17L22.140 -
  misc_feature (1)..(339): Homolog of NCBI NO: 26451333 NR Description: putative peptide transporter [Arabidopsis
  misc_feature (1)..(339): Homolog of NCBI NO: 30685529 NR Description: peptide transporter - like protein [Arabidopsis
  misc_feature (1)..(339): Homolog of NCBI NO: 30692706 NR Description: peptide transporter PTR2-B -related [Arabidopsis
  misc_feature (1)..(339): Homolog of NCBI NO: 25513683 NR Description: F5D14.23 protein - Arabidopsis thaliana
MIAFGNGGYQPNIATLGADQFDEEDPAEAHSKVSFFSYFYLALNLGSLFSNTFLSYLEDKGSWALGFWASTAAAATALLLFLSGTLRYRYFQPGGNPIGRIGQVAIAACRNWKAGVSTEVVSLYEGDEKADAGGRKLLHTQGFSFLDRAAHADTDSKLGARDPWKLCSVTQVEEVKSILRLLPIWLCTILYSVVFTQMASLFVVQGAAMRRTTPFSGFSVPPSSMSAFDILTVAATIFLYRRTICPFLARLSGRPAGPTELQRMGLGLVVGALAMTTAGTVEHFRKARATAAMSSDLHIMWQVPQYALIGVSEVMMYVGQLEFFNGQMPDGLKSFGARCA

SEQ ID NO: 17169 - DNA, 903 bp, Zea mays subsp. mays
  misc_feature (1)..(903): Ceres Seq. ID no. 12354714
  misc_feature: MA Experiment ID: 108527 Result: Up-regulated in Transcription
  misc_feature: MA Experiment 108527 PARAMETER Experiment Name: Zm_5mM_NO_P Parameter: Age (day) Value: 8
  misc_feature: MA Experiment 108527 PARAMETER Experiment Name: Zm_5mM_NO_P Parameter: Organism Value: Zea mays
  misc_feature: MA Experiment 108527 PARAMETER Experiment Name: Zm_5mM_NO_P Parameter: Plant Line Value: 35A19
  misc_feature: MA Experiment 108527 PARAMETER Experiment Name: Zm_5mM_NO_P Parameter: Timepoint (hr) Value: 6
  misc_feature: MA Experiment 108527 PARAMETER Experiment Name: Zm_5mM_NO_P Parameter: Tissue Value: Aerial
  misc_feature: MA Experiment 108527 PARAMETER Experiment Name: Zm_5mM_NO_P Parameter: Treatment Value: 5mM NO vs. No Treatment
  misc_feature: MA Experiment ID: 108528 Result: Down-regulated in Transcription
  misc_feature: MA Experiment 108528 PARAMETER Experiment Name: Zm_Imbibed_Seeds_P Parameter: Age (day) Value: 5 vs. 2
  misc_feature: MA Experiment 108528 PARAMETER Experiment Name: Zm_Imbibed_Seeds_P Parameter: Organism Value: Zea mays
  misc_feature: MA Experiment 108528 PARAMETER Experiment Name: Zm_Imbibed_Seeds_P Parameter: Plant Line Value: 35A19
  misc_feature: MA Experiment 108528 PARAMETER Experiment Name: Zm_Imbibed_Seeds_P Parameter: Tissue Value: Aerial vs. Embryo
  misc_feature: MA Experiment ID: 108535 Result: Down-regulated in Transcription
  misc_feature: MA Experiment 108535 PARAMETER Experiment Name: Zm_Meristem_P Parameter: Age (day) Value: 8
  misc_feature: MA Experiment 108535 PARAMETER Experiment Name: Zm_Meristem_P Parameter: Organism Value: Zea mays
  misc_feature: MA Experiment 108535 PARAMETER Experiment Name: Zm_Meristem_P Parameter: Plant Line Value: 35A19
  misc_feature: MA Experiment 108535 PARAMETER Experiment Name: Zm_Meristem_P Parameter: Tissue Value: Root Meristem vs. Above Root Meristem
  misc_feature: MA Experiment ID: 108543 Result: Down-regulated in Transcription
  misc_feature: MA Experiment ID: 108545 Result: Down-regulated in Transcription
  misc_feature: MA Experiment 108545 PARAMETER Experiment Name: Zm_Imbibed_Seeds_P Parameter: Age (day) Value: 3 vs. 2
  misc_feature: MA Experiment 108545 PARAMETER Experiment Name: Zm_Imbibed_Seeds_P Parameter: Organism Value: Zea mays
  misc_feature: MA Experiment 108545 PARAMETER Experiment Name: Zm_Imbibed_Seeds_P Parameter: Plant Line Value: 35A19
  misc_feature: MA Experiment 108545 PARAMETER Experiment Name: Zm_Imbibed_Seeds_P Parameter: Tissue Value: Aerial vs. Embryo
  misc_feature: MA Experiment ID: 108559 Result: Up-regulated in Transcription
  misc_feature: MA Experiment 108559 PARAMETER Experiment Name: Zm_5mM_NO_P Parameter: Age (day) Value: 8
  misc_feature: MA Experiment 108559 PARAMETER Experiment Name: Zm_5mM_NO_P Parameter: Organism Value: Zea mays
  misc_feature: MA Experiment 108559 PARAMETER Experiment Name: Zm_5mM_NO_P Parameter: Plant Line Value: 35A19
  misc_feature: MA Experiment 108559 PARAMETER Experiment Name: Zm_5mM_NO_P Parameter: Timepoint (hr) Value: 12
  misc_feature: MA Experiment 108559 PARAMETER Experiment Name: Zm_5mM_NO_P Parameter: Tissue Value: Aerial
  misc_feature: MA Experiment 108559 PARAMETER Experiment Name: Zm_5mM_NO_P Parameter: Treatment Value: 5mM NO vs. No Treatment
  misc_feature: MA Experiment ID: 108688 Result: Down-regulated in Transcription
  misc_feature: MA Experiment 108688 PARAMETER Experiment Name: Zm_Embryos-Flowers__P Parameter: Tissue Value: Immature Flowers vs. Aerial+
  misc_feature: MA Experiment ID: 20000477 Result: Up-regulated in Transcription
  misc_feature: MA Experiment 20000477 PARAMETER Experiment Name: Zm_5mM_SA_P Parameter: Age (day) Value: 10
  misc_feature: MA Experiment 20000477 PARAMETER Experiment Name: Zm_5mM_SA_P Parameter: Organism Value: Zea mays
  misc_feature: MA Experiment 20000477 PARAMETER Experiment Name: Zm_5mM_SA_P Parameter: Plant Line Value: 35A19
  misc_feature: MA Experiment 20000477 PARAMETER Experiment Name: Zm_5mM_SA_P Parameter: Timepoint (hr) Value: 48
  misc_feature: MA Experiment 20000477 PARAMETER Experiment Name: Zm_5mM_SA_P Parameter: Tissue Value: Aerial
  misc_feature: MA Experiment 20000477 PARAMETER Experiment Name: Zm_5mM_SA_P Parameter: Treatment Value: 5mM SA vs. No Treatment
  misc_feature: MA Experiment ID: 20000478 Result: Up-regulated in Transcription
  misc_feature: MA Experiment 20000478 PARAMETER Experiment Name: Zm_5mM_SA_P Parameter: Age (day) Value: 11
  misc_feature: MA Experiment 20000478 PARAMETER Experiment Name: Zm_5mM_SA_P Parameter: Organism Value: Zea mays
  misc_feature: MA Experiment 20000478 PARAMETER Experiment Name: Zm_5mM_SA_P Parameter: Plant Line Value: 35A19
  misc_feature: MA Experiment 20000478 PARAMETER Experiment Name: Zm_5mM_SA_P Parameter: Timepoint (hr) Value: 72
  misc_feature: MA Experiment 20000478 PARAMETER Experiment Name: Zm_5mM_SA_P Parameter: Tissue Value: Aerial
  misc_feature: MA Experiment 20000478 PARAMETER Experiment Name: Zm_5mM_SA_P Parameter: Treatment Value: 5mM SA vs. No Treatment
  misc_feature: MA Experiment ID: 20000479 Result: Up-regulated in Transcription
  misc_feature: MA Experiment 20000479 PARAMETER Experiment Name: Zm_Drought_P Parameter: Age (day) Value: 10
  misc_feature: MA Experiment 20000479 PARAMETER Experiment Name: Zm_Drought_P Parameter: Organism Value: Zea mays
  misc_feature: MA Experiment 20000479 PARAMETER Experiment Name: Zm_Drought_P Parameter: Plant Line Value: 35A19
  misc_feature: MA Experiment 20000479 PARAMETER Experiment Name: Zm_Drought_P Parameter: Timepoint (hr) Value: 48
  misc_feature: MA Experiment 20000479 PARAMETER Experiment Name: Zm_Drought_P Parameter: Tissue Value: Aerial
  misc_feature: MA Experiment 20000479 PARAMETER Experiment Name: Zm_Drought_P Parameter: Treatment Value: Drought vs. No Drought
  misc_feature: MA Experiment ID: 20000480 Result: Up-regulated in Transcription
  misc_feature: MA Experiment 20000480 PARAMETER Experiment Name: Zm_Drought_P Parameter: Age (day) Value: 11
  misc_feature: MA Experiment 20000480 PARAMETER Experiment Name: Zm_Drought_P Parameter: Organism Value: Zea mays
  misc_feature: MA Experiment 20000480 PARAMETER Experiment Name: Zm_Drought_P Parameter: Plant Line Value: 35A19
  misc_feature: MA Experiment 20000480 PARAMETER Experiment Name: Zm_Drought_P Parameter: Timepoint (hr) Value: 72
  misc_feature: MA Experiment 20000480 PARAMETER Experiment Name: Zm_Drought_P Parameter: Tissue Value: Aerial
  misc_feature: MA Experiment 20000480 PARAMETER Experiment Name: Zm_Drought_P Parameter: Treatment Value: Drought vs. No Drought
  misc_feature: MA Experiment ID: 20000535 Result: Down-regulated in Transcription
  misc_feature: MA Experiment 20000535 PARAMETER Experiment Name: Zm_Hybrid_Seed_Dev_P Parameter: DAP Value: 30 vs. 12
  misc_feature: MA Experiment 20000535 PARAMETER Experiment Name: Zm_Hybrid_Seed_Dev_P Parameter: Organism Value: Zea mays
  misc_feature: MA Experiment 20000535 PARAMETER Experiment Name: Zm_Hybrid_Seed_Dev_P Parameter: Plant Line Value: 35A19
  misc_feature: MA Experiment 20000535 PARAMETER Experiment Name: Zm_Hybrid_Seed_Dev_P Parameter: Tissue Value: Embryo vs. Unfert Floret
  misc_feature: MA Experiment ID: 20000627 Result: Up-regulated in Transcription
  misc_feature: MA Experiment 20000627 PARAMETER Experiment Name: Zm_Herbicide-Treatments_P Parameter: Timepoint (hr) Value: 12
  misc_feature: MA Experiment 20000627 PARAMETER Experiment Name: Zm_Herbicide-Treatments_P Parameter: Tissue Value: Aerial
  misc_feature: MA Experiment 20000627 PARAMETER Experiment Name: Zm_Herbicide-Treatments_P Parameter: Treatment Value: Finale vs. No Treatment
  misc_feature: MA Experiment ID: 20001608 Result: Down-regulated in Transcription
  misc_feature: MA Experiment 20001608 PARAMETER Experiment Name: Zm_50ppm_KNO3_L-to-H_P Parameter: Age (day) Value: 21
  misc_feature: MA Experiment 20001608 PARAMETER Experiment Name: Zm_50ppm_KNO3_L-to-H_P Parameter: Organism Value: Zea mays
  misc_feature: MA Experiment 20001608 PARAMETER Experiment Name: Zm_50ppm_KNO3_L-to-H_P Parameter: Plant Line Value: 35A19
  misc_feature: MA Experiment 20001608 PARAMETER Experiment Name: Zm_50ppm_KNO3_L-to-H_P Parameter: Timepoint (hr) Value: 48
  misc_feature: MA Experiment 20001608 PARAMETER Experiment Name: Zm_50ppm_KNO3_L-to-H_P Parameter: Tissue Value: Shoots
  misc_feature: MA Experiment 20001608 PARAMETER Experiment Name: Zm_50ppm_KNO3_L-to-H_P Parameter: Treatment Value: 50ppm KNO3 vs. 50ppm KCl
agttcttgcacctcacgattcgttcggtttcttttcgttctagcatcgtccagctctcacacgcagcctatttgtccctgcgccctctgatgaatataccagctcaaagttagaacaggcatgggtggatcggtttgtgattttaatagttagagcagccatgaataaacaactccggtctctgtcatctgtttatcatggcagtcgctctcgaccagcgtcggggatggagcgaaatggctggtgaacaagctgaagggcaagatgcagaagccgctggcggacctgctcaaggagcacaacctccccgtgggcctgttcccgcgcgaggcgaccaactacgagttcgtgccagagacgcggcgcctgacggtgtacatcccgtccccctgcgaggtcggctaccgcgacggctccgagctgcggttcgacgccacggtgtcgggcacgctgggcgagggccgcctcacggaggtggaagggatcaagaccaaggtgctcgtctgggccagggtcaccgccgtcaaggccgacgccgccaaggtccacttcaccgccgggatcaagaggtcgcgcagccgggacgcctacgaggtcgtcaggggcggcatcaccgtcgacgaattctagcttagttttgctttcgcggctcacatggatggacgggcttcctcttgctcgctgcacgctgagatggacagattgttgctttcagttgcaggaataaattctacacccattagctatgtgggagatctgcgtgcactgtgcatcgtgtgttttgtgctttgttgtgagaatgtaacacctgaaggattcagaacgtgtgctcattgcttatgatatatgtctcgtgtcaggttttagcaacaaaatgtcccgagcagagctcgatgcagctct

SEQ ID NO: 17170 - protein, 145 aa, Zea mays subsp. mays
  peptide (1)..(145): Ceres Seq. ID no. 12354715
MAVALDQRRGWSEMAGEQAEGQDAEAAGGPAQGAQPPRGPVPARGDQLRVRARDAAPDGVHPVPLRGRLPRRLRAAVRRHGVGHAGRGPPHGGGRDQDQGARLGQGHRRQGRRRQGPLHRRDQEVAQPGRLRGRQGRHHRRRILA

SEQ ID NO: 17171 - protein, 132 aa, Zea mays subsp. mays
  peptide (1)..(132): Ceres Seq. ID no. 12354716
MAGEQAEGQDAEAAGGPAQGAQPPRGPVPARGDQLRVRARDAAPDGVHPVPLRGRLPRRLRAAVRRHGVGHAGRGPPHGGGRDQDQGARLGQGHRRQGRRRQGPLHRRDQEVAQPGRLRGRQGRHHRRRILA

SEQ ID NO: 17172 - protein, 121 aa, Zea mays subsp. mays
  peptide (1)..(121): Ceres Seq. ID no. 12354717
  misc_feature (1)..(121): Pfam Name: Protein of unknown function, DUF538 Pfam Description: Protein of unknown function, DUF538
  misc_feature (7)..(100): Homolog of NCBI NO: 9759120 NR Description: gb|AAF02163.1~gene_id:MQK4.11~similar to unknown
  misc_feature (2)..(100): Homolog of NCBI NO: 15235335 NR Description: putative protein; protein id: At4g02360.1
  misc_feature (1)..(121): Homolog of NCBI NO: 21553803 NR Description: unknown [Arabidopsis thaliana]
  misc_feature (1)..(121): Homolog of NCBI NO: 18395537 NR Description: expressed protein
  misc_feature (1)..(121): Homolog of NCBI NO: 40642817 NR Description: cp protein [Celosia cristata]
  misc_feature (1)..(121): Homolog of NCBI NO: 28466909 NR Description: At5g01610 [Arabidopsis thaliana]
  misc_feature (1)..(121): Homolog of NCBI NO: 15241019 NR Description: putative protein
  misc_feature (1)..(121): Homolog of NCBI NO: 15240103 NR Description: putative protein; protein id: At5g37070.1
  misc_feature (1)..(121): Homolog of NCBI NO: 34914210 NR Description: OSJNBb0049O23.18 [Oryza sativa (japonica
  misc_feature (1)..(121): Homolog of NCBI NO: 18398279 NR Description: expressed protein
MQKPLADLLKEHNLPVGLFPREATNYEFVPETRRLTVYIPSPCEVGYRDGSELRFDATVSGTLGEGRLTEVEGIKTKVLVWARVTAVKADAAKVHFTAGIKRSRSRDAYEVVRGGITVDEF

SEQ ID NO: 17173 - DNA, 1833 bp, Zea mays subsp. mays
  misc_feature (1)..(1833): Ceres Seq. ID no. 12424091
  misc_feature: MA Experiment ID: 108504 Result: Up-regulated in Transcription
  misc_feature: MA Experiment 108504 PARAMETER Experiment Name: Zm_Drought_P Parameter: Age (day) Value: 8
  misc_feature: MA Experiment 108504 PARAMETER Experiment Name: Zm_Drought_P Parameter: Organism Value: Zea mays
  misc_feature: MA Experiment 108504 PARAMETER Experiment Name: Zm_Drought_P Parameter: Plant Line Value: 35A19
  misc_feature: MA Experiment 108504 PARAMETER Experiment Name: Zm_Drought_P Parameter: Timepoint (hr) Value: 12
  misc_feature: MA Experiment 108504 PARAMETER Experiment Name: Zm_Drought_P Parameter: Tissue Value: Aerial
  misc_feature: MA Experiment 108504 PARAMETER Experiment Name: Zm_Drought_P Parameter: Treatment Value: Drought vs. No Drought
  misc_feature: MA Experiment ID: 108527 Result: Up-regulated in Transcription
  misc_feature: MA Experiment 108527 PARAMETER Experiment Name: Zm_5mM_NO_P Parameter: Age (day) Value: 8
  misc_feature: MA Experiment 108527 PARAMETER Experiment Name: Zm_5mM_NO_P Parameter: Organism Value: Zea mays
  misc_feature: MA Experiment 108527 PARAMETER Experiment Name: Zm_5mM_NO_P Parameter: Plant Line Value: 35A19
  misc_feature: MA Experiment 108527 PARAMETER Experiment Name: Zm_5mM_NO_P Parameter: Timepoint (hr) Value: 6
  misc_feature: MA Experiment 108527 PARAMETER Experiment Name: Zm_5mM_NO_P Parameter: Tissue Value: Aerial
  misc_feature: MA Experiment 108527 PARAMETER Experiment Name: Zm_5mM_NO_P Parameter: Treatment Value: 5mM NO vs. No Treatment
  misc_feature: MA Experiment ID: 108540 Result: Up-regulated in Transcription
  misc_feature: MA Experiment 108540 PARAMETER Experiment Name: Zm_20percent_PEG_P Parameter: Age (day) Value: 8
  misc_feature: MA Experiment 108540 PARAMETER Experiment Name: Zm_20percent_PEG_P Parameter: Organism Value: Zea mays
  misc_feature: MA Experiment 108540 PARAMETER Experiment Name: Zm_20percent_PEG_P Parameter: Plant Line Value: 35A19
  misc_feature: MA Experiment 108540 PARAMETER Experiment Name: Zm_20percent_PEG_P Parameter: Timepoint (hr) Value: 6
  misc_feature: MA Experiment 108540 PARAMETER Experiment Name: Zm_20percent_PEG_P Parameter: Tissue Value: Aerial
  misc_feature: MA Experiment 108540 PARAMETER Experiment Name: Zm_20percent_PEG_P Parameter: Treatment Value: 20percent PEG vs. No Treatment
  misc_feature: MA Experiment ID: 108544 Result: Up-regulated in Transcription
  misc_feature: MA Experiment ID: 108597 Result: Up-regulated in Transcription
  misc_feature: MA Experiment 108597 PARAMETER Experiment Name: Zm_100uM_ABA_P Parameter: Age (day) Value: 9
  misc_feature: MA Experiment 108597 PARAMETER Experiment Name: Zm_100uM_ABA_P Parameter: Organism Value: Zea mays
  misc_feature: MA Experiment 108597 PARAMETER Experiment Name: Zm_100uM_ABA_P Parameter: Plant Line Value: 35A19
  misc_feature: MA Experiment 108597 PARAMETER Experiment Name: Zm_100uM_ABA_P Parameter: Timepoint (hr) Value: 24
  misc_feature: MA Experiment 108597 PARAMETER Experiment Name: Zm_100uM_ABA_P Parameter: Tissue Value: Aerial
  misc_feature: MA Experiment 108597 PARAMETER Experiment Name: Zm_100uM_ABA_P Parameter: Treatment Value: 100uM ABA vs. No Treatment
  misc_feature: MA Experiment ID: 20000477 Result: Up-regulated in Transcription
  misc_feature: MA Experiment 20000477 PARAMETER Experiment Name: Zm_5mM_SA_P Parameter: Age (day) Value: 10
  misc_feature: MA Experiment 20000477 PARAMETER Experiment Name: Zm_5mM_SA_P Parameter: Organism Value: Zea mays
  misc_feature: MA Experiment 20000477 PARAMETER Experiment Name: Zm_5mM_SA_P Parameter: Plant Line Value: 35A19
  misc_feature: MA Experiment 20000477 PARAMETER Experiment Name: Zm_5mM_SA_P Parameter: Timepoint (hr) Value: 48
  misc_feature: MA Experiment 20000477 PARAMETER Experiment Name: Zm_5mM_SA_P Parameter: Tissue Value: Aerial
  misc_feature: MA Experiment 20000477 PARAMETER Experiment Name: Zm_5mM_SA_P Parameter: Treatment Value: 5mM SA vs. No Treatment
  misc_feature: MA Experiment ID: 20000478 Result: Up-regulated in Transcription
  misc_feature: MA Experiment 20000478 PARAMETER Experiment Name: Zm_5mM_SA_P Parameter: Age (day) Value: 11
  misc_feature: MA Experiment 20000478 PARAMETER Experiment Name: Zm_5mM_SA_P Parameter: Organism Value: Zea mays
  misc_feature: MA Experiment 20000478 PARAMETER Experiment Name: Zm_5mM_SA_P Parameter: Plant Line Value: 35A19
  misc_feature: MA Experiment 20000478 PARAMETER Experiment Name: Zm_5mM_SA_P Parameter: Timepoint (hr) Value: 72
  misc_feature: MA Experiment 20000478 PARAMETER Experiment Name: Zm_5mM_SA_P Parameter: Tissue Value: Aerial
  misc_feature: MA Experiment 20000478 PARAMETER Experiment Name: Zm_5mM_SA_P Parameter: Treatment Value: 5mM SA vs. No Treatment
  misc_feature: MA Experiment ID: 20000479 Result: Up-regulated in Transcription
  misc_feature: MA Experiment 20000479 PARAMETER Experiment Name: Zm_Drought_P Parameter: Age (day) Value: 10
  misc_feature: MA Experiment 20000479 PARAMETER Experiment Name: Zm_Drought_P Parameter: Organism Value: Zea mays
  misc_feature: MA Experiment 20000479 PARAMETER Experiment Name: Zm_Drought_P Parameter: Plant Line Value: 35A19
  misc_feature: MA Experiment 20000479 PARAMETER Experiment Name: Zm_Drought_P Parameter: Timepoint (hr) Value: 48
  misc_feature: MA Experiment 20000479 PARAMETER Experiment Name: Zm_Drought_P Parameter: Tissue Value: Aerial
  misc_feature: MA Experiment 20000479 PARAMETER Experiment Name: Zm_Drought_P Parameter: Treatment Value: Drought vs. No Drought
  misc_feature: MA Experiment ID: 20000480 Result: Up-regulated in Transcription
  misc_feature: MA Experiment 20000480 PARAMETER Experiment Name: Zm_Drought_P Parameter: Age (day) Value: 11
  misc_feature: MA Experiment 20000480 PARAMETER Experiment Name: Zm_Drought_P Parameter: Organism Value: Zea mays
  misc_feature: MA Experiment 20000480 PARAMETER Experiment Name: Zm_Drought_P Parameter: Plant Line Value: 35A19
  misc_feature: MA Experiment 20000480 PARAMETER Experiment Name: Zm_Drought_P Parameter: Timepoint (hr) Value: 72
  misc_feature: MA Experiment 20000480 PARAMETER Experiment Name: Zm_Drought_P Parameter: Tissue Value: Aerial
  misc_feature: MA Experiment 20000480 PARAMETER Experiment Name: Zm_Drought_P Parameter: Treatment Value: Drought vs. No Drought
  misc_feature: MA Experiment ID: 20000535 Result: Down-regulated in Transcription
  misc_feature: MA Experiment 20000535 PARAMETER Experiment Name: Zm_Hybrid_Seed_Dev_P Parameter: DAP Value: 30 vs. 12
  misc_feature: MA Experiment 20000535 PARAMETER Experiment Name: Zm_Hybrid_Seed_Dev_P Parameter: Organism Value: Zea mays
  misc_feature: MA Experiment 20000535 PARAMETER Experiment Name: Zm_Hybrid_Seed_Dev_P Parameter: Plant Line Value: 35A19
  misc_feature: MA Experiment 20000535 PARAMETER Experiment Name: Zm_Hybrid_Seed_Dev_P Parameter: Tissue Value: Embryo vs. Unfert Floret
  misc_feature: MA Experiment ID: 20000626 Result: Up-regulated in Transcription
  misc_feature: MA Experiment 20000626 PARAMETER Experiment Name: Zm_Herbicide-Treatments_P Parameter: Timepoint (hr) Value: 12
  misc_feature: MA Experiment 20000626 PARAMETER Experiment Name: Zm_Herbicide-Treatments_P Parameter: Tissue Value: Aerial
  misc_feature: MA Experiment 20000626 PARAMETER Experiment Name: Zm_Herbicide-Treatments_P Parameter: Treatment Value: Roundup vs. No Treatment
gcacgagaccattacctagaacatcctaatcgaaaaaaaaaatttcaatgcctctctagatctttcaagctatccttgcttcctagctccctttggcgtgctgtaccggacgacaggggtaggtaggtaggtaggtgtagctagctcggcgagcgagggagcaatccggccaacagcacacgcgtcgatcgccatgccgagaagcggcggcggcggcaatggcggtggcattagtagtagtagtagggtgatgcccaacctcccggccgggttccgcttccaccccacggacgaggagctcatggtgcactacctcatgaggcaggccgcctccatgccgtgccccgtccccatcatcgccgaggtcaacatctaccagtgcaacccctgggatctccctgccaaggcattgttcggcgacaaggagtggtttttcttcagcccccgggaccgcaagtaccccaacggcgcccgccccaaccgcgccgccgggtccgggtactggaaggccaccggcaccgacaaggccatcctgtcgtcgtccacgcccacgagccacggcggcgccaacatcgtcgtcggcgtcaagaaggcgctcgtcttctacggcggcaggccgcccaagggcaccaagacggactggatcatgcacgagtaccgcctctcgggcgcggcggacgacgactgcaagggcagcaccaggcgcagagtgtcttcctcctcgtcgtcctccatgaggctggacgactgggtgctgtgcaggatccacaagaagagcaacgatttccagttgtcgtcgtcgtcggagcatgagcacgagcaggaggagccggcggcgggcggctcagcgacgactgtggaggaactagacgctctcgtcgtcgtcgacaacagcagcagcagcgacaccaccaccaccaccaccaccaccaacaacaactctactgaaacagctgcgactcatcacgatcctcagacgatgatgatgctgagcaagtcgtgctcgctcaccgacctcctcgacagcatcgactacgcggcgctctcctcgcagatgctcctcctcgacgcgccccagccccacgctgatgacccgccgccacacatggtctactacccaccggcggcgtcggcgacgatgcaccagcaagcaataatagctaataacaccaacagtaatgactactatgacgacgacaacttgttgccgactgctgcggtagacgcggcgacggcggtgctactcagctcgtcgcctgcagacaccaacggtgtgaacaagaggaagcgagtgacggccgtggactactacggcgccgctgaaccgccgaccttcttccaccaccacctcgatgatggcggcaacagcttcttcagtacgaccaagaagctcaagccgccgccgccaagtgattcgaggcatggcggccatttcggcaccgccacagcgagcagctaccgcgacagccagcagctcgtggacagcgcgagcagcagcggcgtcttcttccatcagtatgggtacggctacagcagcagcaacccgttcttgaacttgaaccagcagcagcagctgctactcaacagccacatcgggatgcagtagagctcgagagatcgagagagagagagagagagagagatgatatatcattggaaggatcagcacgcgtacgtgcagattaattgcagcgagttctatcttgtttgctttcattattatatactccgtatgtgtcgttcatgtaaaattagtttaaattgtaaattagtgtgctgaaattcatgtgcctgctctctgctcatcaatgaatggatgatgacgacccatgc

SEQ ID NO: 17174 - protein, 470 aa, Zea mays subsp. mays
  peptide (1)..(470): Ceres Seq. ID no. 12424092
  misc_feature (23)..(158): Pfam Name: No apical meristem (NAM) protein Pfam Description: No apical meristem (NAM) protein
  misc_feature (12)..(238): Homolog of NCBI NO: 18407026 NR Description: NAM protein, putative
  misc_feature (22)..(213): Homolog of NCBI NO: 30679026 NR Description: No apical meristem (NAM) protein family
  misc_feature (12)..(238): Homolog of NCBI NO: 21593425 NR Description: NAM protein, putative [Arabidopsis thaliana]
  misc_feature (21)..(207): Homolog of NCBI NO: 15232606 NR Description: putative jasmonic acid regulatory protein
  misc_feature (22)..(213): Homolog of NCBI NO: 6223651 NR Description: NAM-like protein (no apical meristem)
  misc_feature (21)..(208): Homolog of NCBI NO: 21554226 NR Description: NAM-like protein [Arabidopsis thaliana]
  misc_feature (21)..(208): Homolog of NCBI NO: 20466640 NR Description: NAM-like protein [Arabidopsis thaliana]
  misc_feature (21)..(208): Homolog of NCBI NO: 15219110 NR Description: NAM-like protein
  misc_feature (21)..(286): Homolog of NCBI NO: 34899790 NR Description: OJ1773_H01.21 [Oryza sativa (japonica
  misc_feature (23)..(364): Homolog of NCBI NO: 34902154 NR Description: Putative NAM (no apical meristem) protein
MPRSGGGGNGGGISSSSRVMPNLPAGFRFHPTDEELMVHYLMRQAASMPCPVPIIAEVNIYQCNPWDLPAKALFGDKEWFFFSPRDRKYPNGARPNRAAGSGYWKATGTDKAILSSSTPTSHGGANIVVGVKKALVFYGGRPPKGTKTDWIMHEYRLSGAADDDCKGSTRRRVSSSSSSSMRLDDWVLCRIHKKSNDFQLSSSSEHEHEQEEPAAGGSATTVEELDALVVVDNSSSSDTTTTTTTTNNNSTETAATHHDPQTMMMLSKSCSLTDLLDSIDYAALSSQMLLLDAPQPHADDPPPHMVYYPPAASATMHQQAIIANNTNSNDYYDDDNLLPTAAVDAATAVLLSSSPADTNGVNKRKRVTAVDYYGAAEPPTFFHHHLDDGGNSFFSTTKKLKPPPPSDSRHGGHFGTATASSYRDSQQLVDSASSSGVFFHQYGYGYSSSNPFLNLNQQQQLLLNSHIGMQ

SEQ ID NO: 17175 - protein, 451 aa, Zea mays subsp. mays
  peptide (1)..(451): Ceres Seq. ID no. 12424093
  misc_feature (4)..(139): Pfam Name: No apical meristem (NAM) protein Pfam Description: No apical meristem (NAM) protein
  misc_feature (1)..(219): Homolog of NCBI NO: 18407026 NR Description: NAM protein, putative
  misc_feature (3)..(194): Homolog of NCBI NO: 30679026 NR Description: No apical meristem (NAM) protein family
  misc_feature (1)..(219): Homolog of NCBI NO: 21593425 NR Description: NAM protein, putative [Arabidopsis thaliana]
  misc_feature (2)..(188): Homolog of NCBI NO: 15232606 NR Description: putative jasmonic acid regulatory protein
  misc_feature (3)..(194): Homolog of NCBI NO: 6223651 NR Description: NAM-like protein (no apical meristem)
  misc_feature (2)..(189): Homolog of NCBI NO: 21554226 NR Description: NAM-like protein [Arabidopsis thaliana]
  misc_feature (2)..(189): Homolog of NCBI NO: 20466640 NR Description: NAM-like protein [Arabidopsis thaliana]
  misc_feature (2)..(189): Homolog of NCBI NO: 15219110 NR Description: NAM-like protein
  misc_feature (2)..(267): Homolog of NCBI NO: 34899790 NR Description: OJ1773_H01.21 [Oryza sativa (japonica
  misc_feature (4)..(345): Homolog of NCBI NO: 34902154 NR Description: Putative NAM (no apical meristem) protein
MPNLPAGFRFHPTDEELMVHYLMRQAASMPCPVPIIAEVNIYQCNPWDLPAKALFGDKEWFFFSPRDRKYPNGARPNRAAGSGYWKATGTDKAILSSSTPTSHGGANIVVGVKKALVFYGGRPPKGTKTDWIMHEYRLSGAADDDCKGSTRRRVSSSSSSSMRLDDWVLCRIHKKSNDFQLSSSSEHEHEQEEPAAGGSATTVEELDALVVVDNSSSSDTTTTTTTTNNNSTETAATHHDPQTMMMLSKSCSLTDLLDSIDYAALSSQMLLLDAPQPHADDPPPHMVYYPPAASATMHQQAIIANNTNSNDYYDDDNLLPTAAVDAATAVLLSSSPADTNGVNKRKRVTAVDYYGAAEPPTFFHHHLDDGGNSFFSTTKKLKPPPPSDSRHGGHFGTATASSYRDSQQLVDSASSSGVFFHQYGYGYSSSNPFLNLNQQQQLLLNSHIGMQ

SEQ ID NO: 17176 - protein, 434 aa, Zea mays subsp. mays
  peptide (1)..(434): Ceres Seq. ID no. 12424094
  misc_feature (1)..(122): Pfam Name: No apical meristem (NAM) protein Pfam Description: No apical meristem (NAM) protein
  misc_feature (1)..(202): Homolog of NCBI NO: 18407026 NR Description: NAM protein, putative
  misc_feature (1)..(177): Homolog of NCBI NO: 30679026 NR Description: No apical meristem (NAM) protein family
  misc_feature (1)..(202): Homolog of NCBI NO: 21593425 NR Description: NAM protein, putative [Arabidopsis thaliana]
  misc_feature (1)..(171): Homolog of NCBI NO: 15232606 NR Description: putative jasmonic acid regulatory protein
  misc_feature (1)..(177): Homolog of NCBI NO: 6223651 NR Description: NAM-like protein (no apical meristem)
  misc_feature (1)..(172): Homolog of NCBI NO: 21554226 NR Description: NAM-like protein [Arabidopsis thaliana]
  misc_feature (1)..(172): Homolog of NCBI NO: 20466640 NR Description: NAM-like protein [Arabidopsis thaliana]
  misc_feature (1)..(172): Homolog of NCBI NO: 15219110 NR Description: NAM-like protein
  misc_feature (1)..(250): Homolog of NCBI NO: 34899790 NR Description: OJ1773_H01.21 [Oryza sativa (japonica
  misc_feature (1)..(328): Homolog of NCBI NO: 34902154 NR Description: Putative NAM (no apical meristem) protein
MVHYLMRQAASMPCPVPIIAEVNIYQCNPWDLPAKALFGDKEWFFFSPRDRKYPNGARPNRAAGSGYWKATGTDKAILSSSTPTSHGGANIVVGVKKALVFYGGRPPKGTKTDWIMHEYRLSGAADDDCKGSTRRRVSSSSSSSMRLDDWVLCRIHKKSNDFQLSSSSEHEHEQEEPAAGGSATTVEELDALVVVDNSSSSDTTTTTTTTNNNSTETAATHHDPQTMMMLSKSCSLTDLLDSIDYAALSSQMLLLDAPQPHADDPPPHMVYYPPAASATMHQQAIIANNTNSNDYYDDDNLLPTAAVDAATAVLLSSSPADTNGVNKRKRVTAVDYYGAAEPPTFFHHHLDDGGNSFFSTTKKLKPPPPSDSRHGGHFGTATASSYRDSQQLVDSASSSGVFFHQYGYGYSSSNPFLNLNQQQQLLLNSHIGMQ

SEQ ID NO: 17177 - DNA, 903 bp, Zea mays subsp. mays
  misc_feature (1)..(903): Ceres Seq. ID no. 12425306
  misc_feature: MA Experiment ID: 20000492 Result: Down-regulated in Transcription
  misc_feature: MA Experiment 20000492 PARAMETER Experiment Name: Zm_Hybrid_Seed_Dev_P Parameter: DAP Value: 12
  misc_feature: MA Experiment 20000492 PARAMETER Experiment Name: Zm_Hybrid_Seed_Dev_P Parameter: Organism Value: Zea mays
  misc_feature: MA Experiment 20000492 PARAMETER Experiment Name: Zm_Hybrid_Seed_Dev_P Parameter: Plant Line Value: 35A19
  misc_feature: MA Experiment 20000492 PARAMETER Experiment Name: Zm_Hybrid_Seed_Dev_P Parameter: Tissue Value: Fert Kernel vs. Unfert Floret
  misc_feature: MA Experiment ID: 20000535 Result: Down-regulated in Transcription
  misc_feature: MA Experiment 20000535 PARAMETER Experiment Name: Zm_Hybrid_Seed_Dev_P Parameter: DAP Value: 30 vs. 12
  misc_feature: MA Experiment 20000535 PARAMETER Experiment Name: Zm_Hybrid_Seed_Dev_P Parameter: Organism Value: Zea mays
  misc_feature: MA Experiment 20000535 PARAMETER Experiment Name: Zm_Hybrid_Seed_Dev_P Parameter: Plant Line Value: 35A19
  misc_feature: MA Experiment 20000535 PARAMETER Experiment Name: Zm_Hybrid_Seed_Dev_P Parameter: Tissue Value: Embryo vs. Unfert Floret
catatagcccacttacttggtacaagactacattttccacaccagtgggaagtgacgcagtgacactgaaccttagtggtatgggtaagggtgaagtatgggtcaatggagagagtatcggacgatattgggtctctttcaaggctcctagtggcaatccttcgcaatcactgtaagtagagttagctccaacttctactctgtcgcactatttcctacaatctcataagcaaatgtctcactgaccggacattcctaaggtatcacataccacgagaatttctaaaccctcaagacaataccctagccctttttgaggaaatgggaggtaacccacagctaataacagtgaacacaatgtcggtatcaagagtgtgtggcaatgtgaatgagctctcagctccatcacttgaatataaggataaggaaccagcagtagatctctggtgtacagaaggcaaacagatatcaacaattgagtttgcaagctatggaagtcctacgggtgactgcaaaaaatttggtttcggaagatgccatgcaggagcatcagaatctgttgtaaaacaggcttgcttgggtaaaagtggatgctcagttcccgtaacacctatcaaatttggaggcgatccatgtcctggaatccaaaaatctcttctagttgtggcgaactgcaggtgacactagacagtcacacaagtatacatcatagaaaagaagttggacgagtataaaaaataaaaagatgagttacaaaatcaacgagcaatagagtggagggaaagtataagtcaaaacatatagtaattgttattaggtaggcaattgatcacttgaggcttagttggtagaccccatgtaccgattgttttgacctggcatagatatatatgtgttatctgt

SEQ ID NO: 17178 - protein, 119 aa, Zea mays subsp. mays
  peptide (1)..(119): Ceres Seq. ID no. 12425307
  misc_feature (41)..(118): Pfam Name: Galactose binding lectin domain Pfam Description: Galactose binding lectin domain
  misc_feature (1)..(118): Homolog of NCBI NO: 18403090 NR Description: glycosyl hydrolase family 35 (beta-galactosidase)
  misc_feature (1)..(118): Homolog of NCBI NO: 7939625 NR Description: putative beta-galactosidase [Lycopersicon
  misc_feature (1)..(118): Homolog of NCBI NO: 14517399 NR Description: At2g32810/F24L7.5 [Arabidopsis thaliana]
  misc_feature (1)..(101): Homolog of NCBI NO: 26451843 NR Description: unknown protein [Arabidopsis thaliana]
  misc_feature (1)..(118): Homolog of NCBI NO: 7488064 NR Description: probable beta-galactosidase (EC 3.2.1.23) F24L7.5
  misc_feature (1)..(118): Homolog of NCBI NO: 18419821 NR Description: glycosyl hydrolase family 35 (beta-galactosidase)
  misc_feature (1)..(118): Homolog of NCBI NO: 34913072 NR Description: putative beta-galactosidase
  misc_feature (1)..(118): Homolog of NCBI NO: 4138137 NR Description: ss-galactosidase [Lycopersicon esculentum]
  misc_feature (1)..(118): Homolog of NCBI NO: 25326165 NR Description: probable beta-galactosidase [imported] -
  misc_feature (1)..(118): Homolog of NCBI NO: 30699255 NR Description: glycosyl hydrolase family 35 (beta-galactosidase)
MGGNPQLITVNTMSVSRVCGNVNELSAPSLEYKDKEPAVDLWCTEGKQISTIEFASYGSPTGDCKKFGFGRCHAGASESVVKQACLGKSGCSVPVTPIKFGGDPCPGIQKSLLVVANCR

SEQ ID NO: 17179 - protein, 107 aa, Zea mays subsp. mays
  peptide (1)..(107): Ceres Seq. ID no. 12425308
  misc_feature (29)..(106): Pfam Name: Galactose binding lectin domain Pfam Description: Galactose binding lectin domain
  misc_feature (1)..(106): Homolog of NCBI NO: 18419821 NR Description: glycosyl hydrolase family 35 (beta-galactosidase)
  misc_feature (1)..(106): Homolog of NCBI NO: 34913072 NR Description: putative beta-galactosidase
  misc_feature (1)..(106): Homolog of NCBI NO: 7488064 NR Description: probable beta-galactosidase (EC 3.2.1.23) F24L7.5
  misc_feature (1)..(106): Homolog of NCBI NO: 18403090 NR Description: glycosyl hydrolase family 35 (beta-galactosidase)
  misc_feature (1)..(106): Homolog of NCBI NO: 7939625 NR Description: putative beta-galactosidase [Lycopersicon
  misc_feature (1)..(106): Homolog of NCBI NO: 14517399 NR Description: At2g32810/F24L7.5 [Arabidopsis thaliana]
  misc_feature (1)..(89): Homolog of NCBI NO: 26451843 NR Description: unknown protein [Arabidopsis thaliana]
  misc_feature (1)..(106): Homolog of NCBI NO: 4138137 NR Description: ss-galactosidase [Lycopersicon esculentum]
  misc_feature (1)..(106): Homolog of NCBI NO: 25326165 NR Description: probable beta-galactosidase [imported] -
  misc_feature (1)..(106): Homolog of NCBI NO: 30699255 NR Description: glycosyl hydrolase family 35 (beta-galactosidase)
MSVSRVCGNVNELSAPSLEYKDKEPAVDLWCTEGKQISTIEFASYGSPTGDCKKFGFGRCHAGASESVVKQACLGKSGCSVPVTPIKFGGDPCPGIQKSLLVVANCR

SEQ ID NO: 17180 - DNA, 2275 bp, Zea mays subsp. mays
  misc_feature (1)..(2275): Ceres Seq. ID no. 13495441
  misc_feature: MA Experiment ID: 20000488 Result: Down-regulated in Transcription
  misc_feature: MA Experiment 20000488 PARAMETER Experiment Name: Zm_50mM_NH4NO3_L_to_H_P Parameter: Organism Value: Zea mays
  misc_feature: MA Experiment 20000488 PARAMETER Experiment Name: Zm_50mM_NH4NO3_L_to_H_P Parameter: Timepoint (hr) Value: 8
  misc_feature: MA Experiment 20000488 PARAMETER Experiment Name: Zm_50mM_NH4NO3_L_to_H_P Parameter: Tissue Value: Leaves
  misc_feature: MA Experiment 20000488 PARAMETER Experiment Name: Zm_50mM_NH4NO3_L_to_H_P Parameter: Treatment Value: 50mM NH4NO3 vs. 100mM Mannitol
  misc_feature: MA Experiment ID: 20000535 Result: Up-regulated in Transcription
  misc_feature: MA Experiment 20000535 PARAMETER Experiment Name: Zm_Hybrid_Seed_Dev_P Parameter: DAP Value: 30 vs. 12
  misc_feature: MA Experiment 20000535 PARAMETER Experiment Name: Zm_Hybrid_Seed_Dev_P Parameter: Organism Value: Zea mays
  misc_feature: MA Experiment 20000535 PARAMETER Experiment Name: Zm_Hybrid_Seed_Dev_P Parameter: Plant Line Value: 35A19
  misc_feature: MA Experiment 20000535 PARAMETER Experiment Name: Zm_Hybrid_Seed_Dev_P Parameter: Tissue Value: Embryo vs. Unfert Floret
aatgtcccttggtcctctctctgacatctcttgtctcctcttcattgcaaatgtttctcttcctctctcccacctctcctctcctctccattgcaaaccttcgggatgaaggttgagagcctgctctgaaacgacgtacgtaaagggaacaaggaaccggagagcgtgcggcgggcttctggattttagagtaggcacctgtcgcttggacgtgcttcggaggagtaggtgtccaaaagttgcctacagtgggtccagaggtcatgatatagactgtcatggaggcagctgcagatgaggagaggccactgattcagtacctggctccagaggatgatgaagcttcctcacgatacactagcgacggaacgctcgatatcaacaatcagcgtgctctgaagaagagcaccgggaactggagagcatgcttcatgattctgggtaccgagttcgccgaatgcctggcattttacgcgaccgcaaagaacctggtcacctacctcacggctgagcttggtgagagcaacatcgatgccgcgacgaacgtgtccacctcgattggcagctgctacctcacgccgctcatcggcgccttcttggccgacacgtactggggaagatacaagacgatgatagtcttcctcttgctctacatcgttgggatgcttactctgacagcgtcggcgtggctccccttggccatggaggacgactcgcctaacaacagcggacttcggcgtgccacagcgtacctggggctctacctcgtttccctaggcacaggaggcatcaagccctgcacggcggccctcggggccgaccagttcgacggcggcgacgcggcggagcgggtcaccaaggcctccttcttcaactggtactacttctgcaccaacatcggctccctgctgtcggggaccgtgctcgtctgggtgcaggaaaatattggatggggagtcgggtttacggtgcagacggtgttcatgctgttcggcctcgccgtgttcgtcgccggtcgcaaggtgtataggtacaagaagctgggcgggagccctctcacaagggtagcccaggtggttgtcgcggcggtgaggaactgccatctcgtgctgcctgatgatacgtcagccctgtaccacgataagcttctaccaactgaaccaaatttcaggattgagtctgccagacaattcagattctttgacaaggctgccataatcaccggcgagaagggtgcagcagcgccgacgagcccttggagactgtgcacggtgtcccaggtggaggagctgaagatgctgctccggttgctgccggtctgggcatccatggtgctcttcttcgccgtcagtgcgcagacggtaaccacgttcattgagcaggctagggtaatggacaaccgcatcggcccgttcatcattcctccggcgtcgatagcgaccttcgacgtgatcagcgtcatggtctgtgtccccgtctacgacgccgtgctggtgcctctggcccggcgtgccactggcaacgaccgcggcctgtcgcagctgcaccggctctccatcgggatcgcgctgtccgtggtcgtcatggtgtacgcggcgctgctcgagggcaggcgcctggccctcgcgcgggccaacatgcccgccatgaacatcgcgtggcaggcgcccatgttcgccgtgcacggcgcggcggcggtcttcgccaccgtcggcgtgctcgagttcttctacgaccagtcgccggacgggatgaagagcctcggcaacgcgctcgcgctgctctccatggcggccgggagctatttcaactcgcttgcgctcagcactgtcggggtgatcacggcgagcggcggggaacgcgggtggctcccggacgacctgaacaagggtcatatggactatttcttctggatgatggccgctctaggaacgctcaacctgctgcacttcttgcactactgcaacagacgatacacaggcaacaacaacaccacttcttgacgtgtgctgtcatgctgtgtgcaccatgtttctcaaaataatagtttgacaatactacactttgtaattattgttgagtttgtgatctaaattctgaagaaggcggccaagttaatgagcgaagcggaggcccgtcgccgggaggctttccctactcattttagggtttcacctctataaatatctttgtaagccgtaggagataattatctcaattgtaaatctcctgcgatctgtaaccacccgaaaatagtgagaagttgttggccggc

SEQ ID NO: 17181 - protein, 574 aa, Zea mays subsp. mays
  peptide (1)..(574): Ceres Seq. ID no. 13495442
  misc_feature (115)..(504): Pfam Name: POT family Pfam Description: POT family
  misc_feature (115)..(504): Pfam Name: POT family Pfam Description: POT family
  misc_feature (21)..(559): Homolog of NCBI NO: 30683214 NR Description: nitrate transporter -related [Arabidopsis
  misc_feature (20)..(574): Homolog of NCBI NO: 30687920 NR Description: oligopeptide transporter -related [Arabidopsis
  misc_feature (42)..(567): Homolog of NCBI NO: 38567969 NR Description: OSJNBa0093F12.10 [Oryza sativa (japonica
  misc_feature (1)..(566): Homolog of NCBI NO: 31088360 NR Description: peptide transporter 1 [Vicia faba]
  misc_feature (24)..(562): Homolog of NCBI NO: 30696666 NR Description: oligopeptide transporter -related [Arabidopsis
  misc_feature (1)..(566): Homolog of NCBI NO: 31088360 NR Description: peptide transporter 1 [Vicia faba]
  misc_feature (1)..(566): Homolog of NCBI NO: 15226861 NR Description: histidine transport protein (PTR2-B) [Arabidopsis
  misc_feature (1)..(566): Homolog of NCBI NO: 15076661 NR Description: peptide transporter [Oryza sativa (japonica
  misc_feature (42)..(567): Homolog of NCBI NO: 38567969 NR Description: OSJNBa0093F12.10 [Oryza sativa (japonica
  misc_feature (20)..(574): Homolog of NCBI NO: 30687920 NR Description: oligopeptide transporter -related [Arabidopsis
  misc_feature (21)..(559): Homolog of NCBI NO: 30683214 NR Description: nitrate transporter -related [Arabidopsis
  misc_feature (1)..(548): Homolog of NCBI NO: 37530496 NR Description: putative LeOPT1 - oligopeptide transporter
  misc_feature (1)..(574): Homolog of NCBI NO: 37530498 NR Description: putative LeOPT1 - oligopeptide transporter
  misc_feature (19)..(562): Homolog of NCBI NO: 4102839 NR Description: LeOPT1 [Lycopersicon esculentum]
  misc_feature (24)..(562): Homolog of NCBI NO: 30696666 NR Description: oligopeptide transporter -related [Arabidopsis
  misc_feature (1)..(566): Homolog of NCBI NO: 15226861 NR Description: histidine transport protein (PTR2-B) [Arabidopsis
  misc_feature (19)..(562): Homolog of NCBI NO: 4102839 NR Description: LeOPT1 [Lycopersicon esculentum]
  misc_feature (1)..(566): Homolog of NCBI NO: 15076661 NR Description: peptide transporter [Oryza sativa (japonica
  misc_feature (1)..(574): Homolog of NCBI NO: 37530498 NR Description: putative LeOPT1 - oligopeptide transporter
  misc_feature (1)..(548): Homolog of NCBI NO: 37530496 NR Description: putative LeOPT1 - oligopeptide transporter
MEAAADEERPLIQYLAPEDDEASSRYTSDGTLDINNQRALKKSTGNWRACFMILGTEFAECLAFYATAKNLVTYLTAELGESNIDAATNVSTSIGSCYLTPLIGAFLADTYWGRYKTMIVFLLLYIVGMLTLTASAWLPLAMEDDSPNNSGLRRATAYLGLYLVSLGTGGIKPCTAALGADQFDGGDAAERVTKASFFNWYYFCTNIGSLLSGTVLVWVQENIGWGVGFTVQTVFMLFGLAVFVAGRKVYRYKKLGGSPLTRVAQVVVAAVRNCHLVLPDDTSALYHDKLLPTEPNFRIESARQFRFFDKAAIITGEKGAAAPTSPWRLCTVSQVEELKMLLRLLPVWASMVLFFAVSAQTVTTFIEQARVMDNRIGPFIIPPASIATFDVISVMVCVPVYDAVLVPLARRATGNDRGLSQLHRLSIGIALSVVVMVYAALLEGRRLALARANMPAMNIAWQAPMFAVHGAAAVFATVGVLEFFYDQSPDGMKSLGNALALLSMAAGSYFNSLALSTVGVITASGGERGWLPDDLNKGHMDYFFWMMAALGTLNLLHFLHYCNRRYTGNNNTTS

SEQ ID NO: 17182 - protein, 523 aa, Zea mays subsp. mays
  peptide (1)..(523): Ceres Seq. ID no. 13495443
  misc_feature (64)..(453): Pfam Name: POT family Pfam Description: POT family
  misc_feature (64)..(453): Pfam Name: POT family Pfam Description: POT family
  misc_feature (1)..(508): Homolog of NCBI NO: 30683214 NR Description: nitrate transporter -related [Arabidopsis
  misc_feature (1)..(523): Homolog of NCBI NO: 30687920 NR Description: oligopeptide transporter -related [Arabidopsis
  misc_feature (1)..(516): Homolog of NCBI NO: 38567969 NR Description: OSJNBa0093F12.10 [Oryza sativa (japonica
  misc_feature (1)..(515): Homolog of NCBI NO: 31088360 NR Description: peptide transporter 1 [Vicia faba]
  misc_feature (1)..(511): Homolog of NCBI NO: 30696666 NR Description: oligopeptide transporter -related [Arabidopsis
  misc_feature (1)..(508): Homolog of NCBI NO: 30683214 NR Description: nitrate transporter -related [Arabidopsis
  misc_feature (1)..(516): Homolog of NCBI NO: 38567969 NR Description: OSJNBa0093F12.10 [Oryza sativa (japonica
  misc_feature (1)..(511): Homolog of NCBI NO: 30696666 NR Description: oligopeptide transporter -related [Arabidopsis
  misc_feature (1)..(497): Homolog of NCBI NO: 37530496 NR Description: putative LeOPT1 - oligopeptide transporter
  misc_feature (1)..(523): Homolog of NCBI NO: 37530498 NR Description: putative LeOPT1 - oligopeptide transporter
  misc_feature (1)..(515): Homolog of NCBI NO: 15076661 NR Description: peptide transporter [Oryza sativa (japonica
  misc_feature (1)..(511): Homolog of NCBI NO: 4102839 NR Description: LeOPT1 [Lycopersicon esculentum]
  misc_feature (1)..(515): Homolog of NCBI NO: 15226861 NR Description: histidine transport protein (PTR2-B) [Arabidopsis
  misc_feature (1)..(515): Homolog of NCBI NO: 31088360 NR Description: peptide transporter 1 [Vicia faba]
  misc_feature (1)..(523): Homolog of NCBI NO: 30687920 NR Description: oligopeptide transporter -related [Arabidopsis
  misc_feature (1)..(515): Homolog of NCBI NO: 15226861 NR Description: histidine transport protein (PTR2-B) [Arabidopsis
  misc_feature (1)..(511): Homolog of NCBI NO: 4102839 NR Description: LeOPT1 [Lycopersicon esculentum]
  misc_feature (1)..(515): Homolog of NCBI NO: 15076661 NR Description: peptide transporter [Oryza sativa (japonica
  misc_feature (1)..(523): Homolog of NCBI NO: 37530498 NR Description: putative LeOPT1 - oligopeptide transporter
  misc_feature (1)..(497): Homolog of NCBI NO: 37530496 NR Description: putative LeOPT1 - oligopeptide transporter
MILGTEFAECLAFYATAKNLVTYLTAELGESNIDAATNVSTSIGSCYLTPLIGAFLADTYWGRYKTMIVFLLLYIVGMLTLTASAWLPLAMEDDSPNNSGLRRATAYLGLYLVSLGTGGIKPCTAALGADQFDGGDAAERVTKASFFNWYYFCTNIGSLLSGTVLVWVQENIGWGVGFTVQTVFMLFGLAVFVAGRKVYRYKKLGGSPLTRVAQVVVAAVRNCHLVLPDDTSALYHDKLLPTEPNFRIESARQFRFFDKAAIITGEKGAAAPTSPWRLCTVSQVEELKMLLRLLPVWASMVLFFAVSAQTVTTFIEQARVMDNRIGPFIIPPASIATFDVISVMVCVPVYDAVLVPLARRATGNDRGLSQLHRLSIGIALSVVVMVYAALLEGRRLALARANMPAMNIAWQAPMFAVHGAAAVFATVGVLEFFYDQSPDGMKSLGNALALLSMAAGSYFNSLALSTVGVITASGGERGWLPDDLNKGHMDYFFWMMAALGTLNLLHFLHYCNRRYTGNNNTTS

SEQ ID NO: 17183 - protein, 457 aa, Zea mays subsp. mays
  peptide (1)..(457): Ceres Seq. ID no. 13495444
  misc_feature (1)..(387): Pfam Name: POT family Pfam Description: POT family
  misc_feature (1)..(387): Pfam Name: POT family Pfam Description: POT family
  misc_feature (1)..(442): Homolog of NCBI NO: 30683214 NR Description: nitrate transporter -related [Arabidopsis
  misc_feature (1)..(457): Homolog of NCBI NO: 30687920 NR Description: oligopeptide transporter -related [Arabidopsis
  misc_feature (1)..(450): Homolog of NCBI NO: 38567969 NR Description: OSJNBa0093F12.10 [Oryza sativa (japonica
  misc_feature (1)..(449): Homolog of NCBI NO: 31088360 NR Description: peptide transporter 1 [Vicia faba]
  misc_feature (1)..(445): Homolog of NCBI NO: 30696666 NR Description: oligopeptide transporter -related [Arabidopsis
  misc_feature (1)..(442): Homolog of NCBI NO: 30683214 NR Description: nitrate transporter -related [Arabidopsis
  misc_feature (1)..(450): Homolog of NCBI NO: 38567969 NR Description: OSJNBa0093F12.10 [Oryza sativa (japonica
  misc_feature (1)..(445): Homolog of NCBI NO: 30696666 NR Description: oligopeptide transporter -related [Arabidopsis
  misc_feature (1)..(431): Homolog of NCBI NO: 37530496 NR Description: putative LeOPT1 - oligopeptide transporter
  misc_feature (1)..(457): Homolog of NCBI NO: 37530498 NR Description: putative LeOPT1 - oligopeptide transporter
  misc_feature (1)..(449): Homolog of NCBI NO: 15076661 NR Description: peptide transporter [Oryza sativa (japonica
  misc_feature (1)..(445): Homolog of NCBI NO: 4102839 NR Description: LeOPT1 [Lycopersicon esculentum]
  misc_feature (1)..(449): Homolog of NCBI NO: 15226861 NR Description: histidine transport protein (PTR2-B) [Arabidopsis
  misc_feature (1)..(449): Homolog of NCBI NO: 31088360 NR Description: peptide transporter 1 [Vicia faba]
  misc_feature (1)..(457): Homolog of NCBI NO: 30687920 NR Description: oligopeptide transporter -related [Arabidopsis
  misc_feature (1)..(449): Homolog of NCBI NO: 15226861 NR Description: histidine transport protein (PTR2-B) [Arabidopsis
  misc_feature (1)..(445): Homolog of NCBI NO: 4102839 NR Description: LeOPT1 [Lycopersicon esculentum]
  misc_feature (1)..(449): Homolog of NCBI NO: 15076661 NR Description: peptide transporter [Oryza sativa (japonica
  misc_feature (1)..(457): Homolog of NCBI NO: 37530498 NR Description: putative LeOPT1 - oligopeptide transporter
  misc_feature (1)..(431): Homolog of NCBI NO: 37530496 NR Description: putative LeOPT1 - oligopeptide transporter
MIVFLLLYIVGMLTLTASAWLPLAMEDDSPNNSGLRRATAYLGLYLVSLGTGGIKPCTAALGADQFDGGDAAERVTKASFFNWYYFCTNIGSLLSGTVLVWVQENIGWGVGFTVQTVFMLFGLAVFVAGRKVYRYKKLGGSPLTRVAQVVVAAVRNCHLVLPDDTSALYHDKLLPTEPNFRIESARQFRFFDKAAIITGEKGAAAPTSPWRLCTVSQVEELKMLLRLLPVWASMVLFFAVSAQTVTTFIEQARVMDNRIGPFIIPPASIATFDVISVMVCVPVYDAVLVPLARRATGNDRGLSQLHRLSIGIALSVVVMVYAALLEGRRLALARANMPAMNIAWQAPMFAVHGAAAVFATVGVLEFFYDQSPDGMKSLGNALALLSMAAGSYFNSLALSTVGVITASGGERGWLPDDLNKGHMDYFFWMMAALGTLNLLHFLHYCNRRYTGNNNTTS

SEQ ID NO: 17184 - DNA, 2121 bp, Zea mays subsp. mays
  misc_feature (1)..(2121): Ceres Seq. ID no. 12362506
  misc_feature: MA Experiment ID: 20000534 Result: Down-regulated in Transcription
  misc_feature: MA Experiment 20000534 PARAMETER Experiment Name: Zm_Hybrid_Pollen_P Parameter: Age (day) Value: 8
  misc_feature: MA Experiment 20000534 PARAMETER Experiment Name: Zm_Hybrid_Pollen_P Parameter: Organism Value: Zea mays
  misc_feature: MA Experiment 20000534 PARAMETER Experiment Name: Zm_Hybrid_Pollen_P Parameter: Plant Line Value: 35A19
  misc_feature: MA Experiment 20000534 PARAMETER Experiment Name: Zm_Hybrid_Pollen_P Parameter: Tissue Value: Pollen vs. Aerial
ctagaacatcctaatcgaaaaacagtcaaaagctccccattcctcttccccttctcacccggcactcgaactctgcggccctgcaaaccctagctttcgctccatggccgacggcgatccggagccggcgccagcgccggcaccggcactggctaacgagaagctccatgtccgggcggcggcctacgtggatgagacgcgcccgccgccaccgctggagccctccgggggtccggacgaggagaagcgcccgcccgaagaggtagaagcggaggtggagatccacccgccgcgggaaccaaccggggagccgcccgttgatcgcccgggggtggaggtggtggcggacatgaaggcgaacgaagtggagaaggaaaggggggatcgggcaaaggagaagcgggagaaggataaagggaaggggaaggaggagaaagagaaggtggacgaagaggcgaaggggaaagtgactgcggtgatgaaggtggatgggacggagaaggaggtcaagccgacccggcgggccagctggggccagcgcggagacgcccatcctagcggtgccggtggtggccgtgccttgcttcatcgcgcctccagggtttgcgggccagtttgcaatgactcatcaagcagctttggcaagtgttacagcacaggcacaaatgcacttgcagtcaccaactccatctgcatgttcggaagtgccatcaagtccattttatatgacaccaagatctctagtgccattgcagcattcaccatcagtaactgaaggaaatatttgtacaccaattgctgacaagtcattttcatctgattcaaaatcacaccatgttgtaaatatggtagctgatggcttcaactggaggaaatatggtcagaagcaggtgaagagtagtgataattccaggagctactatagatgcacaaactctggttgtctcgctaaaaagaaggttgagcatttccctgatggccgcgttgtggaaatcatttacagaggagcccataatcatgaaccaccacagaagaccagatttgcaaaggaaagagtgactcctattagtgttccctctggaggcgaaaccttgaggcttgtgaacacagaaattgtagaatctagcacgcctacctgtgaattggaacggagtgccatctcagaaacttctgagcagcatctcttttgctcaagtgactgcgaaggggatgctggtaacaaatctgaagatgaacatcctagcgcggaagccctgccaaagcgaagaacacttgaggctacagcaccaaatttaacgccggttcgcagaactgttagagagcaaaagattattgtgcaggctggaaagatgagtgatggatacagatggcgtaagtatggacagaaaattgtgaagggaaatccaaaccccaggagttattaccgctgcacgcacggtggatgccctgtccgtaagcatgtggagaaggcgccagatgatgttaacaatattgttgtaacgtatgaaggcaaacacaaccacgacgaacctttcagaagcagcagcataccagtttctgtaatcagtccatcagcgacagccactgagcaacccaacacatcaagtacgtcagatgagagacctccaaccattacccagaaggacgccaacagtgagtctgataaggagacaaccttgaaatttggaggcgagaaggcactcgaatctgcgcaaacgctgctcagcatcaaaactaactccgatgacatgaagaactctgtcctgaaggaaacttctgctgcagttccagtccaaaacaattgagcatgctgagatagggtgattctattgacatctcttaggctgtcatatttattggttgagtgatatgctattatgttaacttgtatgacgtgaggcttggtgttcggtattccgtgtggagcatttgaggaagcattaggtttcaggaagccacgactggttgtttctgcctgtatagattcccattccctagtgtgtacaggtactgtattttatctgaggccagataacatgtgtggggtggttcttgagaacctgtgtgtgctgtattgttctagctcgatctattgcaatagctgatacgagattgtcattt

SEQ ID NO: 17185 - protein, 438 aa, Zea mays subsp. mays
  peptide (1)..(438): Ceres Seq. ID no. 12362507
  misc_feature (288)..(346): Pfam Name: WRKY DNA -binding domain Pfam Description: WRKY DNA -binding domain
  misc_feature (123)..(414): Homolog of NCBI NO: 22329039 NR Description: WRKY family transcription factor; protein id:
  misc_feature (41)..(353): Homolog of NCBI NO: 15227612 NR Description: WRKY family transcription factor
  misc_feature (123)..(379): Homolog of NCBI NO: 14530685 NR Description: WRKY DNA-binding protein [Nicotiana tabacum]
  misc_feature (109)..(381): Homolog of NCBI NO: 3420906 NR Description: zinc finger protein; WRKY1 [Pimpinella
  misc_feature (123)..(414): Homolog of NCBI NO: 29839502 NR Description: Probable WRKY transcription factor 32 (WRKY
  misc_feature (123)..(384): Homolog of NCBI NO: 4760692 NR Description: transcription factor NtWRKY2 [Nicotiana tabacum]
  misc_feature (41)..(353): Homolog of NCBI NO: 30683544 NR Description: WRKY family transcription factor [Arabidopsis
  misc_feature (41)..(353): Homolog of NCBI NO: 15223004 NR Description: WRKY family transcription factor
  misc_feature (13)..(353): Homolog of NCBI NO: 8778394 NR Description: F16A14.18 [Arabidopsis thaliana]
  misc_feature (18)..(386): Homolog of NCBI NO: 7484759 NR Description: SP8 binding protein homolog - cucumber
MGRRRRSSRPGGPAGASAETPILAVPVVAVPCFIAPPGFAGQFAMTHQAALASVTAQAQMHLQSPTPSACSEVPSSPFYMTPRSLVPLQHSPSVTEGNICTPIADKSFSSDSKSHHVVNMVADGFNWRKYGQKQVKSSDNSRSYYRCTNSGCLAKKKVEHFPDGRVVEIIYRGAHNHEPPQKTRFAKERVTPISVPSGGETLRLVNTEIVESSTPTCELERSAISETSEQHLFCSSDCEGDAGNKSEDEHPSAEALPKRRTLEATAPNLTPVRRTVREQKIIVQAGKMSDGYRWRKYGQKIVKGNPNPRSYYRCTHGGCPVRKHVEKAPDDVNNIVVTYEGKHNHDEPFRSSSIPVSVISPSATATEQPNTSSTSDERPPTITQKDANSESDKETTLKFGGEKALESAQTLLSIKTNSDDMKNSVLKETSAAVPVQNN

SEQ ID NO: 17186 - protein, 394 aa, Zea mays subsp. mays
  peptide (1)..(394): Ceres Seq. ID no. 12362508
  misc_feature (244)..(302): Pfam Name: WRKY DNA -binding domain Pfam Description: WRKY DNA -binding domain
  misc_feature (79)..(370): Homolog of NCBI NO: 22329039 NR Description: WRKY family transcription factor; protein id:
  misc_feature (1)..(309): Homolog of NCBI NO: 15227612 NR Description: WRKY family transcription factor
  misc_feature (79)..(335): Homolog of NCBI NO: 14530685 NR Description: WRKY DNA-binding protein [Nicotiana tabacum]
  misc_feature (65)..(337): Homolog of NCBI NO: 3420906 NR Description: zinc finger protein; WRKY1 [Pimpinella
  misc_feature (79)..(370): Homolog of NCBI NO: 29839502 NR Description: Probable WRKY transcription factor 32 (WRKY
  misc_feature (79)..(340): Homolog of NCBI NO: 4760692 NR Description: transcription factor NtWRKY2 [Nicotiana tabacum]
  misc_feature (1)..(309): Homolog of NCBI NO: 30683544 NR Description: WRKY family transcription factor [Arabidopsis
  misc_feature (1)..(309): Homolog of NCBI NO: 15223004 NR Description: WRKY family transcription factor
  misc_feature (1)..(309): Homolog of NCBI NO: 8778394 NR Description: F16A14.18 [Arabidopsis thaliana]
  misc_feature (1)..(342): Homolog of NCBI NO: 7484759 NR Description: SP8 binding protein homolog - cucumber
MTHQAALASVTAQAQMHLQSPTPSACSEVPSSPFYMTPRSLVPLQHSPSVTEGNICTPIADKSFSSDSKSHHVVNMVADGFNWRKYGQKQVKSSDNSRSYYRCTNSGCLAKKKVEHFPDGRVVEIIYRGAHNHEPPQKTRFAKERVTPISVPSGGETLRLVNTEIVESSTPTCELERSAISETSEQHLFCSSDCEGDAGNKSEDEHPSAEALPKRRTLEATAPNLTPVRRTVREQKIIVQAGKMSDGYRWRKYGQKIVKGNPNPRSYYRCTHGGCPVRKHVEKAPDDVNNIVVTYEGKHNHDEPFRSSSIPVSVISPSATATEQPNTSSTSDERPPTITQKDANSESDKETTLKFGGEKALESAQTLLSIKTNSDDMKNSVLKETSAAVPVQNN

SEQ ID NO: 17187 - protein, 379 aa, Zea mays subsp. mays
  peptide (1)..(379): Ceres Seq. ID no. 12362509
  misc_feature (229)..(287): Pfam Name: WRKY DNA -binding domain Pfam Description: WRKY DNA -binding domain
  misc_feature (64)..(355): Homolog of NCBI NO: 22329039 NR Description: WRKY family transcription factor; protein id:
  misc_feature (1)..(294): Homolog of NCBI NO: 15227612 NR Description: WRKY family transcription factor
  misc_feature (64)..(320): Homolog of NCBI NO: 14530685 NR Description: WRKY DNA-binding protein [Nicotiana tabacum]
  misc_feature (50)..(322): Homolog of NCBI NO: 3420906 NR Description: zinc finger protein; WRKY1 [Pimpinella
  misc_feature (64)..(355): Homolog of NCBI NO: 29839502 NR Description: Probable WRKY transcription factor 32 (WRKY
  misc_feature (64)..(325): Homolog of NCBI NO: 4760692 NR Description: transcription factor NtWRKY2 [Nicotiana tabacum]
  misc_feature (1)..(294): Homolog of NCBI NO: 30683544 NR Description: WRKY family transcription factor [Arabidopsis
  misc_feature (1)..(294): Homolog of NCBI NO: 15223004 NR Description: WRKY family transcription factor
  misc_feature (1)..(294): Homolog of NCBI NO: 8778394 NR Description: F16A14.18 [Arabidopsis thaliana]
  misc_feature (1)..(327): Homolog of NCBI NO: 7484759 NR Description: SP8 binding protein homolog - cucumber
MHLQSPTPSACSEVPSSPFYMTPRSLVPLQHSPSVTEGNICTPIADKSFSSDSKSHHVVNMVADGFNWRKYGQKQVKSSDNSRSYYRCTNSGCLAKKKVEHFPDGRVVEIIYRGAHNHEPPQKTRFAKERVTPISVPSGGETLRLVNTEIVESSTPTCELERSAISETSEQHLFCSSDCEGDAGNKSEDEHPSAEALPKRRTLEATAPNLTPVRRTVREQKIIVQAGKMSDGYRWRKYGQKIVKGNPNPRSYYRCTHGGCPVRKHVEKAPDDVNNIVVTYEGKHNHDEPFRSSSIPVSVISPSATATEQPNTSSTSDERPPTITQKDANSESDKETTLKFGGEKALESAQTLLSIKTNSDDMKNSVLKETSAAVPVQNN

SEQ ID NO: 17188 - DNA, 516 bp, Zea mays subsp. mays
  misc_feature (1)..(516): Ceres Seq. ID no. 2789554
  misc_feature: MA Experiment ID: 108522 Result: Up-regulated in Transcription
  misc_feature: MA Experiment 108522 PARAMETER Experiment Name: Zm_42deg_Heat_P Parameter: Age (day) Value: 8
  misc_feature: MA Experiment 108522 PARAMETER Experiment Name: Zm_42deg_Heat_P Parameter: Organism Value: Zea mays
  misc_feature: MA Experiment 108522 PARAMETER Experiment Name: Zm_42deg_Heat_P Parameter: Plant Line Value: 35A19
  misc_feature: MA Experiment 108522 PARAMETER Experiment Name: Zm_42deg_Heat_P Parameter: Temperature (deg C) Value: 42 vs. 22
  misc_feature: MA Experiment 108522 PARAMETER Experiment Name: Zm_42deg_Heat_P Parameter: Timepoint (hr) Value: 1
  misc_feature: MA Experiment 108522 PARAMETER Experiment Name: Zm_42deg_Heat_P Parameter: Tissue Value: Aerial
  misc_feature: MA Experiment ID: 108523 Result: Up-regulated in Transcription
  misc_feature: MA Experiment 108523 PARAMETER Experiment Name: Zm_42deg_Heat_P Parameter: Age (day) Value: 8
  misc_feature: MA Experiment 108523 PARAMETER Experiment Name: Zm_42deg_Heat_P Parameter: Organism Value: Zea mays
  misc_feature: MA Experiment 108523 PARAMETER Experiment Name: Zm_42deg_Heat_P Parameter: Plant Line Value: 35A19
  misc_feature: MA Experiment 108523 PARAMETER Experiment Name: Zm_42deg_Heat_P Parameter: Temperature (deg C) Value: 42 vs. 22
  misc_feature: MA Experiment 108523 PARAMETER Experiment Name: Zm_42deg_Heat_P Parameter: Timepoint (hr) Value: 6
  misc_feature: MA Experiment 108523 PARAMETER Experiment Name: Zm_42deg_Heat_P Parameter: Tissue Value: Aerial
  misc_feature: MA Experiment ID: 108529 Result: Down-regulated in Transcription
  misc_feature: MA Experiment 108529 PARAMETER Experiment Name: Zm_Imbibed_Seeds_P Parameter: Age (day) Value: 5 vs. 2
  misc_feature: MA Experiment 108529 PARAMETER Experiment Name: Zm_Imbibed_Seeds_P Parameter: Organism Value: Zea mays
  misc_feature: MA Experiment 108529 PARAMETER Experiment Name: Zm_Imbibed_Seeds_P Parameter: Plant Line Value: 35A19
  misc_feature: MA Experiment 108529 PARAMETER Experiment Name: Zm_Imbibed_Seeds_P Parameter: Tissue Value: Roots vs. Embryo
  misc_feature: MA Experiment ID: 108535 Result: Up-regulated in Transcription
  misc_feature: MA Experiment 108535 PARAMETER Experiment Name: Zm_Meristem_P Parameter: Age (day) Value: 8
  misc_feature: MA Experiment 108535 PARAMETER Experiment Name: Zm_Meristem_P Parameter: Organism Value: Zea mays
  misc_feature: MA Experiment 108535 PARAMETER Experiment Name: Zm_Meristem_P Parameter: Plant Line Value: 35A19
  misc_feature: MA Experiment 108535 PARAMETER Experiment Name: Zm_Meristem_P Parameter: Tissue Value: Root Meristem vs. Above Root Meristem
  misc_feature: MA Experiment ID: 20000477 Result: Up-regulated in Transcription
  misc_feature: MA Experiment 20000477 PARAMETER Experiment Name: Zm_5mM_SA_P Parameter: Age (day) Value: 10
  misc_feature: MA Experiment 20000477 PARAMETER Experiment Name: Zm_5mM_SA_P Parameter: Organism Value: Zea mays
  misc_feature: MA Experiment 20000477 PARAMETER Experiment Name: Zm_5mM_SA_P Parameter: Plant Line Value: 35A19
  misc_feature: MA Experiment 20000477 PARAMETER Experiment Name: Zm_5mM_SA_P Parameter: Timepoint (hr) Value: 48
  misc_feature: MA Experiment 20000477 PARAMETER Experiment Name: Zm_5mM_SA_P Parameter: Tissue Value: Aerial
  misc_feature: MA Experiment 20000477 PARAMETER Experiment Name: Zm_5mM_SA_P Parameter: Treatment Value: 5mM SA vs. No Treatment
  misc_feature: MA Experiment ID: 20000487 Result: Up-regulated in Transcription
  misc_feature: MA Experiment 20000487 PARAMETER Experiment Name: Zm_50mM_NH4NO3_L_to_H_P Parameter: Organism Value: Zea mays
  misc_feature: MA Experiment 20000487 PARAMETER Experiment Name: Zm_50mM_NH4NO3_L_to_H_P Parameter: Timepoint (hr) Value: 4
  misc_feature: MA Experiment 20000487 PARAMETER Experiment Name: Zm_50mM_NH4NO3_L_to_H_P Parameter: Tissue Value: Leaves
  misc_feature: MA Experiment 20000487 PARAMETER Experiment Name: Zm_50mM_NH4NO3_L_to_H_P Parameter: Treatment Value: 50mM NH4NO3 vs. 100mM Mannitol
  misc_feature: MA Experiment ID: 20000535 Result: Up-regulated in Transcription
  misc_feature: MA Experiment 20000535 PARAMETER Experiment Name: Zm_Hybrid_Seed_Dev_P Parameter: DAP Value: 30 vs. 12
  misc_feature: MA Experiment 20000535 PARAMETER Experiment Name: Zm_Hybrid_Seed_Dev_P Parameter: Organism Value: Zea mays
  misc_feature: MA Experiment 20000535 PARAMETER Experiment Name: Zm_Hybrid_Seed_Dev_P Parameter: Plant Line Value: 35A19
  misc_feature: MA Experiment 20000535 PARAMETER Experiment Name: Zm_Hybrid_Seed_Dev_P Parameter: Tissue Value: Embryo vs. Unfert Floret
  misc_feature: MA Experiment ID: 20001613 Result: Up-regulated in Transcription
  misc_feature: MA Experiment 20001613 PARAMETER Experiment Name: Zm_50ppm_KNO3_L-to-H_P Parameter: Age (day) Value: 20
  misc_feature: MA Experiment 20001613 PARAMETER Experiment Name: Zm_50ppm_KNO3_L-to-H_P Parameter: Organism Value: Zea mays
  misc_feature: MA Experiment 20001613 PARAMETER Experiment Name: Zm_50ppm_KNO3_L-to-H_P Parameter: Plant Line Value: 35A19
  misc_feature: MA Experiment 20001613 PARAMETER Experiment Name: Zm_50ppm_KNO3_L-to-H_P Parameter: Timepoint (hr) Value: 24
  misc_feature: MA Experiment 20001613 PARAMETER Experiment Name: Zm_50ppm_KNO3_L-to-H_P Parameter: Tissue Value: Roots
  misc_feature: MA Experiment 20001613 PARAMETER Experiment Name: Zm_50ppm_KNO3_L-to-H_P Parameter: Treatment Value: 50ppm KNO3 vs. 50ppm KCl
cagctggaaatgatgaatttgttgggactatgatcgccgaagctattgacaaggttggccctgatggtgtcctctcaattgagtcgtcatcgtcgtttgagaccacagttgaagttgaagaagggatggagcttgacagaggatatatctcccctcagtttgtcactaaccttgaaaaatctattgttgagttcgaaaatgctcggattcttgtcactgatcagaagatatcatcgataaaagaaattattcctctgttggagcagacaacacagttaagagcaccacttcttataattgcagaggatgtaagtggcgaggcgctggcaacattagtcataaacaagcttagaggaattttaaatgtggctgcaatcaaagctcctggttttggtgagaggcgtaaagctcttcttcaggacattgccattgttacaggtgctgaatatcaatccaaagatcttggtctactagttgaggatacaacagtggagcagcttggcatagctccgaaag

SEQ ID NO: 17189 - protein, 171 aa, Zea mays subsp. mays
  peptide (1)..(171): Ceres Seq. ID no. 2789555
  misc_feature (1)..(170): Pfam Name: TCP-1/cpn60 chaperonin family Pfam Description: TCP-1/cpn60 chaperonin family
  misc_feature (1)..(170): Homolog of NCBI NO: 1351030 NR Description: RuBisCO subunit binding-protein alpha subunit,
  misc_feature (1)..(170): Homolog of NCBI NO: 134102 NR Description: RuBisCO subunit binding-protein alpha subunit,
  misc_feature (1)..(170): Homolog of NCBI NO: 5650721 NR Description: rubisco subunit binding-protein alpha subunit (
  misc_feature (1)..(170): Homolog of NCBI NO: 15226314 NR Description: putative rubisco subunit binding-protein alpha
  misc_feature (1)..(170): Homolog of NCBI NO: 99801 NR Description: chaperonine 60K alpha chain - rape (fragment)
  misc_feature (1)..(170): Homolog of NCBI NO: 21554572 NR Description: putative rubisco subunit binding-protein alpha
  misc_feature (1)..(170): Homolog of NCBI NO: 3790441 NR Description: chaperonin 60 alpha subunit [Canavalia lineata]
  misc_feature (1)..(170): Homolog of NCBI NO: 134101 NR Description: RUBISCO SUBUNIT BINDING-PROTEIN ALPHA SUBUNIT (60
  misc_feature (1)..(170): Homolog of NCBI NO: 1710807 NR Description: RuBisCO subunit binding-protein alpha subunit,
  misc_feature (1)..(170): Homolog of NCBI NO: 31193919 NR Description: putative rubisco subunit binding-protein alpha
AGNDEFVGTMIAEAIDKVGPDGVLSIESSSSFETTVEVEEGMELDRGYISPQFVTNLEKSIVEFENARILVTDQKISSIKEIIPLLEQTTQLRAPLLIIAEDVSGEALATLVINKLRGILNVAAIKAPGFGERRKALLQDIAIVTGAEYQSKDLGLLVEDTTVEQLGIAPK

SEQ ID NO: 17190 - protein, 162 aa, Zea mays subsp. mays
  peptide (1)..(162): Ceres Seq. ID no. 2789556
  misc_feature (1)..(161): Pfam Name: TCP-1/cpn60 chaperonin family Pfam Description: TCP-1/cpn60 chaperonin family
  misc_feature (1)..(161): Homolog of NCBI NO: 99801 NR Description: chaperonine 60K alpha chain - rape (fragment)
  misc_feature (1)..(161): Homolog of NCBI NO: 21554572 NR Description: putative rubisco subunit binding-protein alpha
  misc_feature (1)..(161): Homolog of NCBI NO: 15226314 NR Description: putative rubisco subunit binding-protein alpha
  misc_feature (1)..(161): Homolog of NCBI NO: 3790441 NR Description: chaperonin 60 alpha subunit [Canavalia lineata]
  misc_feature (1)..(161): Homolog of NCBI NO: 1351030 NR Description: RuBisCO subunit binding-protein alpha subunit,
  misc_feature (1)..(161): Homolog of NCBI NO: 134102 NR Description: RuBisCO subunit binding-protein alpha subunit,
  misc_feature (1)..(161): Homolog of NCBI NO: 5650721 NR Description: rubisco subunit binding-protein alpha subunit (
  misc_feature (1)..(161): Homolog of NCBI NO: 134101 NR Description: RUBISCO SUBUNIT BINDING-PROTEIN ALPHA SUBUNIT (60
  misc_feature (1)..(161): Homolog of NCBI NO: 1710807 NR Description: RuBisCO subunit binding-protein alpha subunit,
  misc_feature (1)..(161): Homolog of NCBI NO: 31193919 NR Description: putative rubisco subunit binding-protein alpha
MIAEAIDKVGPDGVLSIESSSSFETTVEVEEGMELDRGYISPQFVTNLEKSIVEFENARILVTDQKISSIKEIIPLLEQTTQLRAPLLIIAEDVSGEALATLVINKLRGILNVAAIKAPGFGERRKALLQDIAIVTGAEYQSKDLGLLVEDTTVEQLGIAPK

SEQ ID NO: 17191 - protein, 130 aa, Zea mays subsp. mays
  peptide (1)..(130): Ceres Seq. ID no. 2789557
  misc_feature (1)..(129): Pfam Name: TCP-1/cpn60 chaperonin family Pfam Description: TCP-1/cpn60 chaperonin family
  misc_feature (1)..(129): Homolog of NCBI NO: 99801 NR Description: chaperonine 60K alpha chain - rape (fragment)
  misc_feature (1)..(129): Homolog of NCBI NO: 21554572 NR Description: putative rubisco subunit binding-protein alpha
  misc_feature (1)..(129): Homolog of NCBI NO: 15226314 NR Description: putative rubisco subunit binding-protein alpha
  misc_feature (1)..(129): Homolog of NCBI NO: 3790441 NR Description: chaperonin 60 alpha subunit [Canavalia lineata]
  misc_feature (1)..(129): Homolog of NCBI NO: 1351030 NR Description: RuBisCO subunit binding-protein alpha subunit,
  misc_feature (1)..(129): Homolog of NCBI NO: 134102 NR Description: RuBisCO subunit binding-protein alpha subunit,
  misc_feature (1)..(129): Homolog of NCBI NO: 5650721 NR Description: rubisco subunit binding-protein alpha subunit (
  misc_feature (1)..(129): Homolog of NCBI NO: 134101 NR Description: RUBISCO SUBUNIT BINDING-PROTEIN ALPHA SUBUNIT (60
  misc_feature (1)..(129): Homolog of NCBI NO: 1710807 NR Description: RuBisCO subunit binding-protein alpha subunit,
  misc_feature (1)..(129): Homolog of NCBI NO: 31193919 NR Description: putative rubisco subunit binding-protein alpha
MELDRGYISPQFVTNLEKSIVEFENARILVTDQKISSIKEIIPLLEQTTQLRAPLLIIAEDVSGEALATLVINKLRGILNVAAIKAPGFGERRKALLQDIAIVTGAEYQSKDLGLLVEDTTVEQLGIAPK

SEQ ID NO: 17192 - DNA, 499 bp, Zea mays subsp. mays
  misc_feature (1)..(499): Ceres Seq. ID no. 1940669
  misc_feature: MA Experiment ID: 108522 Result: Up-regulated in Transcription
  misc_feature: MA Experiment 108522 PARAMETER Experiment Name: Zm_42deg_Heat_P Parameter: Age (day) Value: 8
  misc_feature: MA Experiment 108522 PARAMETER Experiment Name: Zm_42deg_Heat_P Parameter: Organism Value: Zea mays
  misc_feature: MA Experiment 108522 PARAMETER Experiment Name: Zm_42deg_Heat_P Parameter: Plant Line Value: 35A19
  misc_feature: MA Experiment 108522 PARAMETER Experiment Name: Zm_42deg_Heat_P Parameter: Temperature (deg C) Value: 42 vs. 22
  misc_feature: MA Experiment 108522 PARAMETER Experiment Name: Zm_42deg_Heat_P Parameter: Timepoint (hr) Value: 1
  misc_feature: MA Experiment 108522 PARAMETER Experiment Name: Zm_42deg_Heat_P Parameter: Tissue Value: Aerial
acaccacgcgctgcagctgctcacacacagtgcaacagaccccctccacctccacgcgatcggacgacacgaagcggccatcggggatcccctccgctacgcctctcgatggtctcctccagcgcgccgccgccgcaggcccagtccgacgcggccgggtcgggggaggaagcgagcaagaaggtgcggaagccgtacacaatcaccaagtcccgggagagctggacggagcaggagcacgacaagttcctcgaggccctgcagctctttgatcgtgactggaagaagatagaggcttttgttggctccaagactgtcatccagattaggagccatgcacagaagtaccttttgaaggttcagaaaaatggaaccagcgaacatgtcccacctccacgaccaaagcgaaaagctgcncatccatatcctcagaaggcttccaagaatgttatgccagattttgcgggagtgtacagcttcttaggtagtgtttcgatcc

SEQ ID NO: 17193 - protein, 166 aa, Zea mays subsp. mays
  peptide (1)..(166): Ceres Seq. ID no. 1940670
  misc_feature (72)..(116): Pfam Name: Myb-like DNA-binding domain Pfam Description: Myb-like DNA-binding domain
  misc_feature (56)..(148): Homolog of NCBI NO: 15223419 NR Description: myb family transcription factor; protein id:
  misc_feature (56)..(152): Homolog of NCBI NO: 2505876 NR Description: MYB-related protein [Arabidopsis thaliana]
  misc_feature (54)..(149): Homolog of NCBI NO: 14596213 NR Description: putative protein [Arabidopsis thaliana]
  misc_feature (54)..(149): Homolog of NCBI NO: 18414039 NR Description: myb family transcription factor
  misc_feature (54)..(149): Homolog of NCBI NO: 11357907 NR Description: hypothetical protein F9G14.150 - Arabidopsis
  misc_feature (29)..(158): Homolog of NCBI NO: 30696225 NR Description: myb family transcription factor [Arabidopsis
  misc_feature (29)..(158): Homolog of NCBI NO: 30696221 NR Description: myb family transcription factor [Arabidopsis
  misc_feature (29)..(158): Homolog of NCBI NO: 8953721 NR Description: contains similarity to MYB-related DNA-binding
  misc_feature (30)..(149): Homolog of NCBI NO: 6682239 NR Description: putative MYB-related protein [Arabidopsis
  misc_feature (30)..(152): Homolog of NCBI NO: 30680926 NR Description: myb family transcription factor [Arabidopsis
  misc_feature (139)..(139): Xaa is any aa, unknown or other
TPRAAAAHTQCNRPPPPPRDRTTRSGHRGSPPLRLSMVSSSAPPPQAQSDAAGSGEEASKKVRKPYTITKSRESWTEQEHDKFLEALQLFDRDWKKIEAFVGSKTVIQIRSHAQKYLLKVQKNGTSEHVPPPRPKRKAXHPYPQKASKNVMPDFAGVYSFLGSVSI

SEQ ID NO: 17194 - protein, 96 aa, Zea mays subsp. mays
  peptide (1)..(96): Ceres Seq. ID no. 1940671
HHALQLLTHSATDPLHLHAIGRHEAAIGDPLRYASRWSPPARRRRRPSPTRPGRGRKRARRCGSRTQSPSPGRAGRSRSTTSSSRPCSSLIVTGRR

SEQ ID NO: 17195 - protein, 130 aa, Zea mays subsp. mays
  peptide (1)..(130): Ceres Seq. ID no. 1940672
  misc_feature (36)..(80): Pfam Name: Myb-like DNA-binding domain Pfam Description: Myb-like DNA-binding domain
  misc_feature (20)..(112): Homolog of NCBI NO: 15223419 NR Description: myb family transcription factor; protein id:
  misc_feature (20)..(116): Homolog of NCBI NO: 2505876 NR Description: MYB-related protein [Arabidopsis thaliana]
  misc_feature (18)..(113): Homolog of NCBI NO: 14596213 NR Description: putative protein [Arabidopsis thaliana]
  misc_feature (18)..(113): Homolog of NCBI NO: 18414039 NR Description: myb family transcription factor
  misc_feature (18)..(113): Homolog of NCBI NO: 11357907 NR Description: hypothetical protein F9G14.150 - Arabidopsis
  misc_feature (1)..(122): Homolog of NCBI NO: 30696225 NR Description: myb family transcription factor [Arabidopsis
  misc_feature (1)..(122): Homolog of NCBI NO: 30696221 NR Description: myb family transcription factor [Arabidopsis
  misc_feature (1)..(122): Homolog of NCBI NO: 8953721 NR Description: contains similarity to MYB-related DNA-binding
  misc_feature (1)..(113): Homolog of NCBI NO: 6682239 NR Description: putative MYB-related protein [Arabidopsis
  misc_feature (1)..(116): Homolog of NCBI NO: 30680926 NR Description: myb family transcription factor [Arabidopsis
  misc_feature (103)..(103): Xaa is any aa, unknown or other
MVSSSAPPPQAQSDAAGSGEEASKKVRKPYTITKSRESWTEQEHDKFLEALQLFDRDWKKIEAFVGSKTVIQIRSHAQKYLLKVQKNGTSEHVPPPRPKRKAXHPYPQKASKNVMPDFAGVYSFLGSVSI

SEQ ID NO: 17196 - DNA, 2378 bp, Zea mays subsp. mays
  misc_feature (1)..(2378): Ceres Seq. ID no. 12362946
  misc_feature: MA Experiment ID: 20000535 Result: Down-regulated in Transcription
  misc_feature: MA Experiment 20000535 PARAMETER Experiment Name: Zm_Hybrid_Seed_Dev_P Parameter: DAP Value: 30 vs. 12
  misc_feature: MA Experiment 20000535 PARAMETER Experiment Name: Zm_Hybrid_Seed_Dev_P Parameter: Organism Value: Zea mays
  misc_feature: MA Experiment 20000535 PARAMETER Experiment Name: Zm_Hybrid_Seed_Dev_P Parameter: Plant Line Value: 35A19
  misc_feature: MA Experiment 20000535 PARAMETER Experiment Name: Zm_Hybrid_Seed_Dev_P Parameter: Tissue Value: Embryo vs. Unfert Floret
  misc_feature: MA Experiment ID: 20000633 Result: Down-regulated in Transcription
  misc_feature: MA Experiment 20000633 PARAMETER Experiment Name: Zm_Herbicide-Treatments_P Parameter: Timepoint (hr) Value: 4
  misc_feature: MA Experiment 20000633 PARAMETER Experiment Name: Zm_Herbicide-Treatments_P Parameter: Tissue Value: Aerial
  misc_feature: MA Experiment 20000633 PARAMETER Experiment Name: Zm_Herbicide-Treatments_P Parameter: Treatment Value: Trimec vs. No Treatment
gcacgagaccattacctagaacatcctaatcgaaaagcactctcctccccgctctcgacttcccatcccctgcggccccgccccccggactcttctcgtcgcggcgcgcccaatcggctcggtggcaggcttgcgcaccggctcggctcgggtccggttctaccgccaacgcgggccgccgcgctcccggatctcggtctagtcagagagttagcagacaaagatggcgacttatgagcccaagaacattctcataactggtgctgctggtttcattgcatcgcatgtcgccaaccgtctggtcaggaactatccccaatacaagatcgttgtccttgacaagattgactactgctccaacctaaagaacctcaatccttcacggtcttcaccaaatttcaaatttgtcaagggtgatattgcaagtgctgacctggtgaattaccttctgatcaccgagtcaattgacaccatcatgcactttgctgcccagacgcatgttgataattcttttggcaattcatttgagttcacaaaaaacaatatatatggcacccatgttcttcttgaggcttgcaaggttactggtcagatcaggaggtttattcatgtcagtaccgacgaggtgtatggtgaaactgatgaagatgctgtggttggtaaccatgaggcctcacagctgcttccaacaaatccatattcagctacaaaggctggggctgaaatgcttgtgatggcatacggaaggtcttatggtcttcctgtgattaccactcgtggcaacaatgtgtatgggccaaatcaatttcctgagaaactcattcccaaattcattcttttggccatgcaaggtctgcctcttccaattcatggagatggctccaacgtcaggagctacctgtactgtgaggatgtggccgaagcttttgaggtggtccttcacaaaggagaagttggacatgtgtataatattggtactgtgaaggagaggagggtgattgatgtagccaaggacatatgcaagctctttggcttggatactgagaaagtcatcaggtttgttgagaacaggcccttcaatgaccagaggtacttcttagatgatcagaagctaaagagattgggatgggcagagcgcacaccatgggaagagggcttgaagaagacgatggagtggtacaccaccaatcctgattactggggagatgtcactggtgcgctgcttcctcatccaaggatgttgatgactcctggagttgaaaggcataactgggctgaagaaatcaagtctctggcttcttcgccagctgaagctagtacaatagctccagcaaccagtaccaaaagcatctctgatgcccctcagaagccttcctacaggtttttaatctatggtaggactggatggattggtggcctccttggaaagatttgtgaaaagcaagggataccatatgagtatgggaaaggacgcttggaagagcgctctcagctgttggaggatattaggaatgtgaagccgactcatgttttcaatgctgccggagtcactgggagaccaaatgttgactggtgcgagacccataaacaggacactatccgcaccaatgttgtaggcactttgaatcttgctgatgtctgtcgcaagcagggtctgctcatgattaattatgctacaggctgtatatttgagtatgatgctaagcaccctgaagggtctggtattggctttaaagaggaagacacgcccaactttattggttccttttattccaaaactaaagcaatggtggaagagctattgaaggagtatgataatgtctgtactcttagggtcaggatgcctatatcatcagatctaagcaaccctcgtaacttcatcacaaagatagctcgttacgacaaggtggtgaacattcccaacagcatgacaatcttggatgagcttctgcctatctccattgagatggcgaaacgggactgcaggggcatatggaacttcaccaaccctggcgctgtaagccacaacgagattctagagatgtacaagaaatacatcaatcctgatttcaagtggaccaatttcacactcgaagaacaggccaaggtgatagtcgcgcctagaagcaacaacgagatggacacgtcgaaactgaaggccgagttccctcagctgctgtccatcaaggattctttgatcaagtacgtctttgagcccaacaggaaggttcctgttaattgaggatttacgttgcgtggatgcggaggttatttgtgttggttattggactctaaattagctaatgttgcaccgtggtgcgtactagttgtgttcgattcttttgggacaatagcaagcatacctctttctggtcgtc

SEQ ID NO: 17197 - protein, 672 aa, Zea mays subsp. mays
  peptide (1)..(672): Ceres Seq. ID no. 12362947
  misc_feature (9)..(323): Pfam Name: NAD dependent epimerase/dehydratase family Pfam Description: NAD dependent epimerase/dehydratase family
  misc_feature (4)..(316): Homolog of NCBI NO: 17531421 NR Description: 4 6-dehydratase (71.1 kD) [Caenorhabditis
  misc_feature (402)..(670): Homolog of NCBI NO: 2982303 NR Description: hypothetical protein [Picea mariana]
  misc_feature (376)..(671): Homolog of NCBI NO: 14423536 NR Description: Unknown protein [Arabidopsis thaliana]
  misc_feature (376)..(671): Homolog of NCBI NO: 21593701 NR Description: unknown [Arabidopsis thaliana]
  misc_feature (376)..(671): Homolog of NCBI NO: 18407710 NR Description: expressed protein
  misc_feature (168)..(668): Homolog of NCBI NO: 15081769 NR Description: At1g53500/F22G10_13 [Arabidopsis thaliana]
  misc_feature (168)..(668): Homolog of NCBI NO: 18404494 NR Description: dTDP-D-glucose 4,6-dehydratase, putative
  misc_feature (3)..(668): Homolog of NCBI NO: 25405640 NR Description: hypothetical protein F22G10.13 [imported] -
  misc_feature (1)..(668): Homolog of NCBI NO: 15231926 NR Description: dTDP-glucose 4,6-dehydratase, putative
  misc_feature (1)..(668): Homolog of NCBI NO: 15218420 NR Description: dTDP-glucose 4,6-dehydratase, putative
MATYEPKNILITGAAGFIASHVANRLVRNYPQYKIVVLDKIDYCSNLKNLNPSRSSPNFKFVKGDIASADLVNYLLITESIDTIMHFAAQTHVDNSFGNSFEFTKNNIYGTHVLLEACKVTGQIRRFIHVSTDEVYGETDEDAVVGNHEASQLLPTNPYSATKAGAEMLVMAYGRSYGLPVITTRGNNVYGPNQFPEKLIPKFILLAMQGLPLPIHGDGSNVRSYLYCEDVAEAFEVVLHKGEVGHVYNIGTVKERRVIDVAKDICKLFGLDTEKVIRFVENRPFNDQRYFLDDQKLKRLGWAERTPWEEGLKKTMEWYTTNPDYWGDVTGALLPHPRMLMTPGVERHNWAEEIKSLASSPAEASTIAPATSTKSISDAPQKPSYRFLIYGRTGWIGGLLGKICEKQGIPYEYGKGRLEERSQLLEDIRNVKPTHVFNAAGVTGRPNVDWCETHKQDTIRTNVVGTLNLADVCRKQGLLMINYATGCIFEYDAKHPEGSGIGFKEEDTPNFIGSFYSKTKAMVEELLKEYDNVCTLRVRMPISSDLSNPRNFITKIARYDKVVNIPNSMTILDELLPISIEMAKRDCRGIWNFTNPGAVSHNEILEMYKKYINPDFKWTNFTLEEQAKVIVAPRSNNEMDTSKLKAEFPQLLSIKDSLIKYVFEPNRKVPVN

SEQ ID NO: 17198 - protein, 588 aa, Zea mays subsp. mays
  peptide (1)..(588): Ceres Seq. ID no. 12362948
  misc_feature (1)..(239): Pfam Name: NAD dependent epimerase/dehydratase family Pfam Description: NAD dependent epimerase/dehydratase family
  misc_feature (1)..(232): Homolog of NCBI NO: 17531421 NR Description: 4 6-dehydratase (71.1 kD) [Caenorhabditis
  misc_feature (318)..(586): Homolog of NCBI NO: 2982303 NR Description: hypothetical protein [Picea mariana]
  misc_feature (292)..(587): Homolog of NCBI NO: 14423536 NR Description: Unknown protein [Arabidopsis thaliana]
  misc_feature (292)..(587): Homolog of NCBI NO: 21593701 NR Description: unknown [Arabidopsis thaliana]
  misc_feature (292)..(587): Homolog of NCBI NO: 18407710 NR Description: expressed protein
  misc_feature (84)..(584): Homolog of NCBI NO: 15081769 NR Description: At1g53500/F22G10_13 [Arabidopsis thaliana]
  misc_feature (84)..(584): Homolog of NCBI NO: 18404494 NR Description: dTDP-D-glucose 4,6-dehydratase, putative
  misc_feature (1)..(584): Homolog of NCBI NO: 25405640 NR Description: hypothetical protein F22G10.13 [imported] -
  misc_feature (1)..(584): Homolog of NCBI NO: 15231926 NR Description: dTDP-glucose 4,6-dehydratase, putative
  misc_feature (1)..(584): Homolog of NCBI NO: 15218420 NR Description: dTDP-glucose 4,6-dehydratase, putative
MHFAAQTHVDNSFGNSFEFTKNNIYGTHVLLEACKVTGQIRRFIHVSTDEVYGETDEDAVVGNHEASQLLPTNPYSATKAGAEMLVMAYGRSYGLPVITTRGNNVYGPNQFPEKLIPKFILLAMQGLPLPIHGDGSNVRSYLYCEDVAEAFEVVLHKGEVGHVYNIGTVKERRVIDVAKDICKLFGLDTEKVIRFVENRPFNDQRYFLDDQKLKRLGWAERTPWEEGLKKTMEWYTTNPDYWGDVTGALLPHPRMLMTPGVERHNWAEEIKSLASSPAEASTIAPATSTKSISDAPQKPSYRFLIYGRTGWIGGLLGKICEKQGIPYEYGKGRLEERSQLLEDIRNVKPTHVFNAAGVTGRPNVDWCETHKQDTIRTNVVGTLNLADVCRKQGLLMINYATGCIFEYDAKHPEGSGIGFKEEDTPNFIGSFYSKTKAMVEELLKEYDNVCTLRVRMPISSDLSNPRNFITKIARYDKVVNIPNSMTILDELLPISIEMAKRDCRGIWNFTNPGAVSHNEILEMYKKYINPDFKWTNFTLEEQAKVIVAPRSNNEMDTSKLKAEFPQLLSIKDSLIKYVFEPNRKVPVN

SEQ ID NO: 17199 - protein, 505 aa, Zea mays subsp. mays
  peptide (1)..(505): Ceres Seq. ID no. 12362949
  misc_feature (1)..(156): Pfam Name: NAD dependent epimerase/dehydratase family Pfam Description: NAD dependent epimerase/dehydratase family
  misc_feature (1)..(149): Homolog of NCBI NO: 17531421 NR Description: 4 6-dehydratase (71.1 kD) [Caenorhabditis
  misc_feature (235)..(503): Homolog of NCBI NO: 2982303 NR Description: hypothetical protein [Picea mariana]
  misc_feature (209)..(504): Homolog of NCBI NO: 14423536 NR Description: Unknown protein [Arabidopsis thaliana]
  misc_feature (209)..(504): Homolog of NCBI NO: 21593701 NR Description: unknown [Arabidopsis thaliana]
  misc_feature (209)..(504): Homolog of NCBI NO: 18407710 NR Description: expressed protein
  misc_feature (1)..(501): Homolog of NCBI NO: 15081769 NR Description: At1g53500/F22G10_13 [Arabidopsis thaliana]
  misc_feature (1)..(501): Homolog of NCBI NO: 18404494 NR Description: dTDP-D-glucose 4,6-dehydratase, putative
  misc_feature (1)..(501): Homolog of NCBI NO: 25405640 NR Description: hypothetical protein F22G10.13 [imported] -
  misc_feature (1)..(501): Homolog of NCBI NO: 15231926 NR Description: dTDP-glucose 4,6-dehydratase, putative
  misc_feature (1)..(501): Homolog of NCBI NO: 15218420 NR Description: dTDP-glucose 4,6-dehydratase, putative
MLVMAYGRSYGLPVITTRGNNVYGPNQFPEKLIPKFILLAMQGLPLPIHGDGSNVRSYLYCEDVAEAFEVVLHKGEVGHVYNIGTVKERRVIDVAKDICKLFGLDTEKVIRFVENRPFNDQRYFLDDQKLKRLGWAERTPWEEGLKKTMEWYTTNPDYWGDVTGALLPHPRMLMTPGVERHNWAEEIKSLASSPAEASTIAPATSTKSISDAPQKPSYRFLIYGRTGWIGGLLGKICEKQGIPYEYGKGRLEERSQLLEDIRNVKPTHVFNAAGVTGRPNVDWCETHKQDTIRTNVVGTLNLADVCRKQGLLMINYATGCIFEYDAKHPEGSGIGFKEEDTPNFIGSFYSKTKAMVEELLKEYDNVCTLRVRMPISSDLSNPRNFITKIARYDKVVNIPNSMTILDELLPISIEMAKRDCRGIWNFTNPGAVSHNEILEMYKKYINPDFKWTNFTLEEQAKVIVAPRSNNEMDTSKLKAEFPQLLSIKDSLIKYVFEPNRKVPVN

SEQ ID NO: 17200 - DNA, 493 bp, Zea mays subsp. mays
  misc_feature (1)..(493): Ceres Seq. ID no. 1671328
  misc_feature: MA Experiment ID: 20000487 Result: Up-regulated in Transcription
  misc_feature: MA Experiment 20000487 PARAMETER Experiment Name: Zm_50mM_NH4NO3_L_to_H_P Parameter: Organism Value: Zea mays
  misc_feature: MA Experiment 20000487 PARAMETER Experiment Name: Zm_50mM_NH4NO3_L_to_H_P Parameter: Timepoint (hr) Value: 4
  misc_feature: MA Experiment 20000487 PARAMETER Experiment Name: Zm_50mM_NH4NO3_L_to_H_P Parameter: Tissue Value: Leaves
  misc_feature: MA Experiment 20000487 PARAMETER Experiment Name: Zm_50mM_NH4NO3_L_to_H_P Parameter: Treatment Value: 50mM NH4NO3 vs. 100mM Mannitol
cggtgtctgctaatatattcatattaacaaaggtctgtctgctgtttattggtatttacacttgtgtcaccagcttctttacaaatacgctcattctgcctacaataaatggaccaacggagggcctgatgctgatctatgtatcacatttgtttacattttttactggcgctgaatggtgggcacaggattttcggaaatcactaccctttttcggttggattccacttccatttctttctgaaattgaaattcctttatatgttcttgtgctgattcttatgatcgtatgtgctgttatacctactgttagatccaatgtcagtaatgtccaagaggtagttgaggcacgaaaaggaagcatggcattagcattagccatgatccttccttttattgtactgttagctggagttgctatctggtgttatctttctccttcaagtataatgaggaaccagccacatttgctcgtgattggaactggcttaat

SEQ ID NO: 17201 - protein, 163 aa, Zea mays subsp. mays
  peptide (1)..(163): Ceres Seq. ID no. 1671329
  misc_feature (25)..(90): Pfam Name: CDP-alcohol phosphatidyltransferase Pfam Description: CDP-alcohol phosphatidyltransferase
  misc_feature (25)..(162): Homolog of NCBI NO: 15222885 NR Description: aminoalcoholphosphotransferase
  misc_feature (25)..(162): Homolog of NCBI NO: 7488522 NR Description: ethanolaminephosphotransferase homolog - turnip
  misc_feature (25)..(162): Homolog of NCBI NO: 30313359 NR Description: aminoalcoholphosphotransferase [Brassica rapa
  misc_feature (15)..(162): Homolog of NCBI NO: 27762264 NR Description: aminoalcoholphosphotransferase [Brassica napus]
  misc_feature (25)..(162): Homolog of NCBI NO: 15229490 NR Description: hypothetical protein
  misc_feature (25)..(162): Homolog of NCBI NO: 5917787 NR Description: aminoalcoholphosphotransferase [Brassica rapa]
  misc_feature (25)..(162): Homolog of NCBI NO: 7488701 NR Description: probable ethanolaminephosphotransferase (EC
  misc_feature (25)..(162): Homolog of NCBI NO: 3927806 NR Description: aminoalcoholphosphotransferase [Pimpinella
  misc_feature (25)..(162): Homolog of NCBI NO: 18390098 NR Description: aminoalcoholphosphotransferase [Sorghum bicolor]
VSANIFILTKVCLLFIGIYTCVTSFFTNTLILPTINGPTEGLMLIYVSHLFTFFTGAEWWAQDFRKSLPFFGWIPLPFLSEIEIPLYVLVLILMIVCAVIPTVRSNVSNVQEVVEARKGSMALALAMILPFIVLLAGVAIWCYLSPSSIMRNQPHLLVIGTGL

SEQ ID NO: 17202 - protein, 121 aa, Zea mays subsp. mays
  peptide (1)..(121): Ceres Seq. ID no. 1671330
  misc_feature (1)..(120): Homolog of NCBI NO: 27762264 NR Description: aminoalcoholphosphotransferase [Brassica napus]
  misc_feature (1)..(120): Homolog of NCBI NO: 5917787 NR Description: aminoalcoholphosphotransferase [Brassica rapa]
  misc_feature (1)..(120): Homolog of NCBI NO: 15229490 NR Description: hypothetical protein
  misc_feature (1)..(120): Homolog of NCBI NO: 15222885 NR Description: aminoalcoholphosphotransferase
  misc_feature (1)..(120): Homolog of NCBI NO: 7488522 NR Description: ethanolaminephosphotransferase homolog - turnip
  misc_feature (1)..(120): Homolog of NCBI NO: 30313359 NR Description: aminoalcoholphosphotransferase [Brassica rapa
  misc_feature (1)..(120): Homolog of NCBI NO: 7488701 NR Description: probable ethanolaminephosphotransferase (EC
  misc_feature (1)..(120): Homolog of NCBI NO: 3927806 NR Description: aminoalcoholphosphotransferase [Pimpinella
  misc_feature (1)..(120): Homolog of NCBI NO: 18390098 NR Description: aminoalcoholphosphotransferase [Sorghum bicolor]
MLIYVSHLFTFFTGAEWWAQDFRKSLPFFGWIPLPFLSEIEIPLYVLVLILMIVCAVIPTVRSNVSNVQEVVEARKGSMALALAMILPFIVLLAGVAIWCYLSPSSIMRNQPHLLVIGTGL

SEQ ID NO: 17203 - DNA, 1953 bp, Zea mays subsp. mays
  misc_feature (1)..(1953): Ceres Seq. ID no. 12387587
  misc_feature: MA Experiment ID: 108535 Result: Up-regulated in Transcription
  misc_feature: MA Experiment 108535 PARAMETER Experiment Name: Zm_Meristem_P Parameter: Age (day) Value: 8
  misc_feature: MA Experiment 108535 PARAMETER Experiment Name: Zm_Meristem_P Parameter: Organism Value: Zea mays
  misc_feature: MA Experiment 108535 PARAMETER Experiment Name: Zm_Meristem_P Parameter: Plant Line Value: 35A19
  misc_feature: MA Experiment 108535 PARAMETER Experiment Name: Zm_Meristem_P Parameter: Tissue Value: Root Meristem vs. Above Root Meristem
  misc_feature: MA Experiment ID: 108687 Result: Down-regulated in Transcription
  misc_feature: MA Experiment 108687 PARAMETER Experiment Name: Zm_Embryos-Flowers__P Parameter: Tissue Value: Embryo vs. Aerial+
  misc_feature: MA Experiment ID: 20000477 Result: Down-regulated in Transcription
  misc_feature: MA Experiment 20000477 PARAMETER Experiment Name: Zm_5mM_SA_P Parameter: Age (day) Value: 10
  misc_feature: MA Experiment 20000477 PARAMETER Experiment Name: Zm_5mM_SA_P Parameter: Organism Value: Zea mays
  misc_feature: MA Experiment 20000477 PARAMETER Experiment Name: Zm_5mM_SA_P Parameter: Plant Line Value: 35A19
  misc_feature: MA Experiment 20000477 PARAMETER Experiment Name: Zm_5mM_SA_P Parameter: Timepoint (hr) Value: 48
  misc_feature: MA Experiment 20000477 PARAMETER Experiment Name: Zm_5mM_SA_P Parameter: Tissue Value: Aerial
  misc_feature: MA Experiment 20000477 PARAMETER Experiment Name: Zm_5mM_SA_P Parameter: Treatment Value: 5mM SA vs. No Treatment
  misc_feature: MA Experiment ID: 20000479 Result: Down-regulated in Transcription
  misc_feature: MA Experiment 20000479 PARAMETER Experiment Name: Zm_Drought_P Parameter: Age (day) Value: 10
  misc_feature: MA Experiment 20000479 PARAMETER Experiment Name: Zm_Drought_P Parameter: Organism Value: Zea mays
  misc_feature: MA Experiment 20000479 PARAMETER Experiment Name: Zm_Drought_P Parameter: Plant Line Value: 35A19
  misc_feature: MA Experiment 20000479 PARAMETER Experiment Name: Zm_Drought_P Parameter: Timepoint (hr) Value: 48
  misc_feature: MA Experiment 20000479 PARAMETER Experiment Name: Zm_Drought_P Parameter: Tissue Value: Aerial
  misc_feature: MA Experiment 20000479 PARAMETER Experiment Name: Zm_Drought_P Parameter: Treatment Value: Drought vs. No Drought
  misc_feature: MA Experiment ID: 20000632 Result: Down-regulated in Transcription
  misc_feature: MA Experiment 20000632 PARAMETER Experiment Name: Zm_Herbicide-Treatments_P Parameter: Timepoint (hr) Value: 4
  misc_feature: MA Experiment 20000632 PARAMETER Experiment Name: Zm_Herbicide-Treatments_P Parameter: Tissue Value: Aerial
  misc_feature: MA Experiment 20000632 PARAMETER Experiment Name: Zm_Herbicide-Treatments_P Parameter: Treatment Value: Glean vs. No Treatment
gcacgagaccattacctagaacatcctaatcgaaaaaagcgaggaggcagtgcggagacgggagccagtggccagtgacagtgagcggcgacgttccagtgtccactgtccagtaggcgagcgaggaggtggtccattggccggccatggctcgtctccgctgcgtcttcgtcgtcttcgtcctgctctcgtctgccctccgccttccaggcgacgccattgcctcccgggggcaccatggccccgccgcacacgactacagggactcgctcgtcaagtccatcctcttcttcgagggccagcggtcgggcaagctgccgccgtcgcagcgcgtgtcctggcgcagggactcgggactctccgacggtcactccgccaaggtggacctggtgggcgggtaccacgacgctggtgacaacgtcaagttcgggttcccgatggcgttcagcatgacgatgctggcgtggagcgtggtggagtttggcggcctcatgaagtcggagctgcagcacgccagggacgccgtccgctggggcgccgactacctgctcaaggccacggcgcacccggacaccatctacgtccaggtcggtgacgcgaccaaggaccacgcgtgctgggagcggccggaggacatggacacccccaggacggtgtacaaggtggaccgtggcaccccgggatccgacgtcgccgccgagactgccgcggctctcgccgccgcctccctcgtcttccgcaagtccgacccggcctacgccagccgccttgtcgccagggccaagagggtgttcgagttcgcggacaagcaccgcggctcctacagcaccgggctggcggcggacgtgtgcccgtactactgctcctactccgggtaccaggacgagctcctgtggggcgcggcgtggcttcaccgcgccaccaagagcccctcttacctgagctacatccagacgaacgggcaggtgctgggcgcggacgagtcggacaacacgttcgggtgggacaacaagcacgcgggcgcgcgggtgctcatctccaagtcgttcctggtgcagcgcctgggcgcgctccacgagtacaagggccacgccgacggcttcatttgctccatggtgcccggcacggccacggaccagacgcagtacacccggggcgggctgctgttcaggcttagcgacagcaacatgcagtacgtgacgtcgagctctttcctcctgctcacctacgccaagtacctggcgttcgccaagcagacggtgcgctgcggcggcgtggcggtcacgccgcagcggctgcgcgccatcgcgcgcaggcaggtggactacctgctggggagcaacccgatggggatgtcctacatggtgggctacggcgccaagtacccgcgccgcatccaccaccgcgcttcgtcgctgccgtccgtggcggcgcacccggctaggatcggttgctcgcaggggttcaccgcgctgtacgcgggtggggccaatcccaacctgctcgtcggtgccgtcgtcgggggacccgacatgcaggacaggttccccgacgagcggaacgaccacgagcactcggagccggccacctacatcaacgcgccgctcgtcggcgcgctcgcctacctcgcgcactcctacggccagctctaagctccctagcgttaattgttgccgtgttgattgattgttcggaaattagagcatcgcgatttgacgaccccagtgcaagcaaaaccaaggaccttcgcttgtgggtcttaatatattgccactagtactcgtaggcgtgatttgtttgttacgcgacgccgctgctggcgcacgtatgtaagcgcggagacaaactgtgctccacggctccaccaagtgtactgctactaaggttgcagctcgcaactctatctgatgctatctactgttttgtttaattacatccacgaacctatccgcc

SEQ ID NO: 17204 - protein, 501 aa, Zea mays subsp. mays
  peptide (1)..(501): Ceres Seq. ID no. 12387588
  misc_feature (37)..(494): Pfam Name: Glycosyl hydrolase family 9 Pfam Description: Glycosyl hydrolase family 9
  misc_feature (13)..(495): Homolog of NCBI NO: 34904062 NR Description: putative endo-beta-1,4-glucanase
  misc_feature (1)..(500): Homolog of NCBI NO: 12957206 NR Description: beta-1,4-glucanase [Atriplex lentiformis]
  misc_feature (29)..(498): Homolog of NCBI NO: 11357128 NR Description: cellulase (EC 3.2.1.4) 2 precursor - Monterey
  misc_feature (8)..(497): Homolog of NCBI NO: 15218612 NR Description: glycosyl hydrolase family 9
  misc_feature (8)..(497): Homolog of NCBI NO: 25350173 NR Description: cellulase (EC 3.2.1.4) [imported] - Arabidopsis
  misc_feature (31)..(497): Homolog of NCBI NO: 7484476 NR Description: cellulase (EC 3.2.1.4) 1 precursor - Monterey
  misc_feature (30)..(501): Homolog of NCBI NO: 15235301 NR Description: glycosyl hydrolase family 9
  misc_feature (4)..(501): Homolog of NCBI NO: 6009979 NR Description: endo-1,4-beta-glucanase [Pisum sativum]
  misc_feature (30)..(501): Homolog of NCBI NO: 1362091 NR Description: cellulase (EC 3.2.1.4) precursor - tomato
  misc_feature (4)..(501): Homolog of NCBI NO: 11358947 NR Description: endo-1,3(4)-beta-glucanase (EC 3.2.1.6) - garden
MARLRCVFVVFVLLSSALRLPGDAIASRGHHGPAAHDYRDSLVKSILFFEGQRSGKLPPSQRVSWRRDSGLSDGHSAKVDLVGGYHDAGDNVKFGFPMAFSMTMLAWSVVEFGGLMKSELQHARDAVRWGADYLLKATAHPDTIYVQVGDATKDHACWERPEDMDTPRTVYKVDRGTPGSDVAAETAAALAAASLVFRKSDPAYASRLVARAKRVFEFADKHRGSYSTGLAADVCPYYCSYSGYQDELLWGAAWLHRATKSPSYLSYIQTNGQVLGADESDNTFGWDNKHAGARVLISKSFLVQRLGALHEYKGHADGFICSMVPGTATDQTQYTRGGLLFRLSDSNMQYVTSSSFLLLTYAKYLAFAKQTVRCGGVAVTPQRLRAIARRQVDYLLGSNPMGMSYMVGYGAKYPRRIHHRASSLPSVAAHPARIGCSQGFTALYAGGANPNLLVGAVVGGPDMQDRFPDERNDHEHSEPATYINAPLVGALAYLAHSYGQL

SEQ ID NO: 17205 - protein, 404 aa, Zea mays subsp. mays
  peptide (1)..(404): Ceres Seq. ID no. 12387589
  misc_feature (1)..(397): Pfam Name: Glycosyl hydrolase family 9 Pfam Description: Glycosyl hydrolase family 9
  misc_feature (1)..(398): Homolog of NCBI NO: 34904062 NR Description: putative endo-beta-1,4-glucanase
  misc_feature (1)..(403): Homolog of NCBI NO: 12957206 NR Description: beta-1,4-glucanase [Atriplex lentiformis]
  misc_feature (1)..(401): Homolog of NCBI NO: 11357128 NR Description: cellulase (EC 3.2.1.4) 2 precursor - Monterey
  misc_feature (1)..(400): Homolog of NCBI NO: 15218612 NR Description: glycosyl hydrolase family 9
  misc_feature (1)..(400): Homolog of NCBI NO: 25350173 NR Description: cellulase (EC 3.2.1.4) [imported] - Arabidopsis
  misc_feature (1)..(400): Homolog of NCBI NO: 7484476 NR Description: cellulase (EC 3.2.1.4) 1 precursor - Monterey
  misc_feature (1)..(404): Homolog of NCBI NO: 15235301 NR Description: glycosyl hydrolase family 9
  misc_feature (1)..(404): Homolog of NCBI NO: 6009979 NR Description: endo-1,4-beta-glucanase [Pisum sativum]
  misc_feature (1)..(404): Homolog of NCBI NO: 1362091 NR Description: cellulase (EC 3.2.1.4) precursor - tomato
  misc_feature (1)..(404): Homolog of NCBI NO: 11358947 NR Description: endo-1,3(4)-beta-glucanase (EC 3.2.1.6) - garden
MAFSMTMLAWSVVEFGGLMKSELQHARDAVRWGADYLLKATAHPDTIYVQVGDATKDHACWERPEDMDTPRTVYKVDRGTPGSDVAAETAAALAAASLVFRKSDPAYASRLVARAKRVFEFADKHRGSYSTGLAADVCPYYCSYSGYQDELLWGAAWLHRATKSPSYLSYIQTNGQVLGADESDNTFGWDNKHAGARVLISKSFLVQRLGALHEYKGHADGFICSMVPGTATDQTQYTRGGLLFRLSDSNMQYVTSSSFLLLTYAKYLAFAKQTVRCGGVAVTPQRLRAIARRQVDYLLGSNPMGMSYMVGYGAKYPRRIHHRASSLPSVAAHPARIGCSQGFTALYAGGANPNLLVGAVVGGPDMQDRFPDERNDHEHSEPATYINAPLVGALAYLAHSYGQL

SEQ ID NO: 17206 - protein, 400 aa, Zea mays subsp. mays
  peptide (1)..(400): Ceres Seq. ID no. 12387590
  misc_feature (1)..(393): Pfam Name: Glycosyl hydrolase family 9 Pfam Description: Glycosyl hydrolase family 9
  misc_feature (1)..(394): Homolog of NCBI NO: 34904062 NR Description: putative endo-beta-1,4-glucanase
  misc_feature (1)..(399): Homolog of NCBI NO: 12957206 NR Description: beta-1,4-glucanase [Atriplex lentiformis]
  misc_feature (1)..(397): Homolog of NCBI NO: 11357128 NR Description: cellulase (EC 3.2.1.4) 2 precursor - Monterey
  misc_feature (1)..(396): Homolog of NCBI NO: 15218612 NR Description: glycosyl hydrolase family 9
  misc_feature (1)..(396): Homolog of NCBI NO: 25350173 NR Description: cellulase (EC 3.2.1.4) [imported] - Arabidopsis
  misc_feature (1)..(396): Homolog of NCBI NO: 7484476 NR Description: cellulase (EC 3.2.1.4) 1 precursor - Monterey
  misc_feature (1)..(400): Homolog of NCBI NO: 15235301 NR Description: glycosyl hydrolase family 9
  misc_feature (1)..(400): Homolog of NCBI NO: 6009979 NR Description: endo-1,4-beta-glucanase [Pisum sativum]
  misc_feature (1)..(400): Homolog of NCBI NO: 1362091 NR Description: cellulase (EC 3.2.1.4) precursor - tomato
  misc_feature (1)..(400): Homolog of NCBI NO: 11358947 NR Description: endo-1,3(4)-beta-glucanase (EC 3.2.1.6) - garden
MTMLAWSVVEFGGLMKSELQHARDAVRWGADYLLKATAHPDTIYVQVGDATKDHACWERPEDMDTPRTVYKVDRGTPGSDVAAETAAALAAASLVFRKSDPAYASRLVARAKRVFEFADKHRGSYSTGLAADVCPYYCSYSGYQDELLWGAAWLHRATKSPSYLSYIQTNGQVLGADESDNTFGWDNKHAGARVLISKSFLVQRLGALHEYKGHADGFICSMVPGTATDQTQYTRGGLLFRLSDSNMQYVTSSSFLLLTYAKYLAFAKQTVRCGGVAVTPQRLRAIARRQVDYLLGSNPMGMSYMVGYGAKYPRRIHHRASSLPSVAAHPARIGCSQGFTALYAGGANPNLLVGAVVGGPDMQDRFPDERNDHEHSEPATYINAPLVGALAYLAHSYGQL

SEQ ID NO: 17207 - DNA, 1959 bp, Zea mays subsp. mays; identical to SEQ ID NO: 10575
  misc_feature (1)..(1959): Ceres Seq. ID no. 12387609
  misc_feature: MA Experiment ID: 108522 Result: Down-regulated in Transcription
  misc_feature: MA Experiment 108522 PARAMETER Experiment Name: Zm_42deg_Heat_P Parameter: Age (day) Value: 8
  misc_feature: MA Experiment 108522 PARAMETER Experiment Name: Zm_42deg_Heat_P Parameter: Organism Value: Zea mays
  misc_feature: MA Experiment 108522 PARAMETER Experiment Name: Zm_42deg_Heat_P Parameter: Plant Line Value: 35A19
  misc_feature: MA Experiment 108522 PARAMETER Experiment Name: Zm_42deg_Heat_P Parameter: Temperature (deg C) Value: 42 vs. 22
  misc_feature: MA Experiment 108522 PARAMETER Experiment Name: Zm_42deg_Heat_P Parameter: Timepoint (hr) Value: 1
  misc_feature: MA Experiment 108522 PARAMETER Experiment Name: Zm_42deg_Heat_P Parameter: Tissue Value: Aerial
  misc_feature: MA Experiment ID: 108527 Result: Down-regulated in Transcription
  misc_feature: MA Experiment 108527 PARAMETER Experiment Name: Zm_5mM_NO_P Parameter: Age (day) Value: 8
  misc_feature: MA Experiment 108527 PARAMETER Experiment Name: Zm_5mM_NO_P Parameter: Organism Value: Zea mays
  misc_feature: MA Experiment 108527 PARAMETER Experiment Name: Zm_5mM_NO_P Parameter: Plant Line Value: 35A19
  misc_feature: MA Experiment 108527 PARAMETER Experiment Name: Zm_5mM_NO_P Parameter: Timepoint (hr) Value: 6
  misc_feature: MA Experiment 108527 PARAMETER Experiment Name: Zm_5mM_NO_P Parameter: Tissue Value: Aerial
  misc_feature: MA Experiment 108527 PARAMETER Experiment Name: Zm_5mM_NO_P Parameter: Treatment Value: 5mM NO vs. No Treatment
  misc_feature: MA Experiment ID: 108528 Result: Down-regulated in Transcription
  misc_feature: MA Experiment 108528 PARAMETER Experiment Name: Zm_Imbibed_Seeds_P Parameter: Age (day) Value: 5 vs. 2
  misc_feature: MA Experiment 108528 PARAMETER Experiment Name: Zm_Imbibed_Seeds_P Parameter: Organism Value: Zea mays
  misc_feature: MA Experiment 108528 PARAMETER Experiment Name: Zm_Imbibed_Seeds_P Parameter: Plant Line Value: 35A19
  misc_feature: MA Experiment 108528 PARAMETER Experiment Name: Zm_Imbibed_Seeds_P Parameter: Tissue Value: Aerial vs. Embryo
  misc_feature: MA Experiment ID: 108529 Result: Down-regulated in Transcription
  misc_feature: MA Experiment 108529 PARAMETER Experiment Name: Zm_Imbibed_Seeds_P Parameter: Age (day) Value: 5 vs. 2
  misc_feature: MA Experiment 108529 PARAMETER Experiment Name: Zm_Imbibed_Seeds_P Parameter: Organism Value: Zea mays
  misc_feature: MA Experiment 108529 PARAMETER Experiment Name: Zm_Imbibed_Seeds_P Parameter: Plant Line Value: 35A19
  misc_feature: MA Experiment 108529 PARAMETER Experiment Name: Zm_Imbibed_Seeds_P Parameter: Tissue Value: Roots vs. Embryo
  misc_feature: MA Experiment ID: 108530 Result: Down-regulated in Transcription
  misc_feature: MA Experiment 108530 PARAMETER Experiment Name: Zm_Imbibed_Seeds_P Parameter: Age (day) Value: 6 vs. 2
  misc_feature: MA Experiment 108530 PARAMETER Experiment Name: Zm_Imbibed_Seeds_P Parameter: Organism Value: Zea mays
  misc_feature: MA Experiment 108530 PARAMETER Experiment Name: Zm_Imbibed_Seeds_P Parameter: Plant Line Value: 35A19
  misc_feature: MA Experiment 108530 PARAMETER Experiment Name: Zm_Imbibed_Seeds_P Parameter: Tissue Value: Aerial vs. Embryo
  misc_feature: MA Experiment ID: 108543 Result: Up-regulated in Transcription
  misc_feature: MA Experiment ID: 108544 Result: Down-regulated in Transcription
  misc_feature: MA Experiment ID: 108556 Result: Down-regulated in Transcription
  misc_feature: MA Experiment 108556 PARAMETER Experiment Name: Zm_Drought_P Parameter: Age (day) Value: 9
  misc_feature: MA Experiment 108556 PARAMETER Experiment Name: Zm_Drought_P Parameter: Organism Value: Zea mays
  misc_feature: MA Experiment 108556 PARAMETER Experiment Name: Zm_Drought_P Parameter: Plant Line Value: 35A19
  misc_feature: MA Experiment 108556 PARAMETER Experiment Name: Zm_Drought_P Parameter: Timepoint (hr) Value: 24
  misc_feature: MA Experiment 108556 PARAMETER Experiment Name: Zm_Drought_P Parameter: Tissue Value: Aerial
  misc_feature: MA Experiment 108556 PARAMETER Experiment Name: Zm_Drought_P Parameter: Treatment Value: Drought vs. No Drought
  misc_feature: MA Experiment ID: 20000477 Result: Down-regulated in Transcription
  misc_feature: MA Experiment 20000477 PARAMETER Experiment Name: Zm_5mM_SA_P Parameter: Age (day) Value: 10
  misc_feature: MA Experiment 20000477 PARAMETER Experiment Name: Zm_5mM_SA_P Parameter: Organism Value: Zea mays
  misc_feature: MA Experiment 20000477 PARAMETER Experiment Name: Zm_5mM_SA_P Parameter: Plant Line Value: 35A19
  misc_feature: MA Experiment 20000477 PARAMETER Experiment Name: Zm_5mM_SA_P Parameter: Timepoint (hr) Value: 48
  misc_feature: MA Experiment 20000477 PARAMETER Experiment Name: Zm_5mM_SA_P Parameter: Tissue Value: Aerial
  misc_feature: MA Experiment 20000477 PARAMETER Experiment Name: Zm_5mM_SA_P Parameter: Treatment Value: 5mM SA vs. No Treatment
  misc_feature: MA Experiment ID: 20000478 Result: Down-regulated in Transcription
  misc_feature: MA Experiment 20000478 PARAMETER Experiment Name: Zm_5mM_SA_P Parameter: Age (day) Value: 11
  misc_feature: MA Experiment 20000478 PARAMETER Experiment Name: Zm_5mM_SA_P Parameter: Organism Value: Zea mays
  misc_feature: MA Experiment 20000478 PARAMETER Experiment Name: Zm_5mM_SA_P Parameter: Plant Line Value: 35A19
  misc_feature: MA Experiment 20000478 PARAMETER Experiment Name: Zm_5mM_SA_P Parameter: Timepoint (hr) Value: 72
  misc_feature: MA Experiment 20000478 PARAMETER Experiment Name: Zm_5mM_SA_P Parameter: Tissue Value: Aerial
  misc_feature: MA Experiment 20000478 PARAMETER Experiment Name: Zm_5mM_SA_P Parameter: Treatment Value: 5mM SA vs. No Treatment
  misc_feature: MA Experiment ID: 20000479 Result: Down-regulated in Transcription
  misc_feature: MA Experiment 20000479 PARAMETER Experiment Name: Zm_Drought_P Parameter: Age (day) Value: 10
  misc_feature: MA Experiment 20000479 PARAMETER Experiment Name: Zm_Drought_P Parameter: Organism Value: Zea mays
  misc_feature: MA Experiment 20000479 PARAMETER Experiment Name: Zm_Drought_P Parameter: Plant Line Value: 35A19
  misc_feature: MA Experiment 20000479 PARAMETER Experiment Name: Zm_Drought_P Parameter: Timepoint (hr) Value: 48
  misc_feature: MA Experiment 20000479 PARAMETER Experiment Name: Zm_Drought_P Parameter: Tissue Value: Aerial
  misc_feature: MA Experiment 20000479 PARAMETER Experiment Name: Zm_Drought_P Parameter: Treatment Value: Drought vs. No Drought
  misc_feature: MA Experiment ID: 20000480 Result: Down-regulated in Transcription
  misc_feature: MA Experiment 20000480 PARAMETER Experiment Name: Zm_Drought_P Parameter: Age (day) Value: 11
  misc_feature: MA Experiment 20000480 PARAMETER Experiment Name: Zm_Drought_P Parameter: Organism Value: Zea mays
  misc_feature: MA Experiment 20000480 PARAMETER Experiment Name: Zm_Drought_P Parameter: Plant Line Value: 35A19
  misc_feature: MA Experiment 20000480 PARAMETER Experiment Name: Zm_Drought_P Parameter: Timepoint (hr) Value: 72
  misc_feature: MA Experiment 20000480 PARAMETER Experiment Name: Zm_Drought_P Parameter: Tissue Value: Aerial
  misc_feature: MA Experiment 20000480 PARAMETER Experiment Name: Zm_Drought_P Parameter: Treatment Value: Drought vs. No Drought
  misc_feature: MA Experiment ID: 20000534 Result: Down-regulated in Transcription
  misc_feature: MA Experiment 20000534 PARAMETER Experiment Name: Zm_Hybrid_Pollen_P Parameter: Age (day) Value: 8
  misc_feature: MA Experiment 20000534 PARAMETER Experiment Name: Zm_Hybrid_Pollen_P Parameter: Organism Value: Zea mays
  misc_feature: MA Experiment 20000534 PARAMETER Experiment Name: Zm_Hybrid_Pollen_P Parameter: Plant Line Value: 35A19
  misc_feature: MA Experiment 20000534 PARAMETER Experiment Name: Zm_Hybrid_Pollen_P Parameter: Tissue Value: Pollen vs. Aerial
  misc_feature: MA Experiment ID: 20000535 Result: Up-regulated in Transcription
  misc_feature: MA Experiment 20000535 PARAMETER Experiment Name: Zm_Hybrid_Seed_Dev_P Parameter: DAP Value: 30 vs. 12
  misc_feature: MA Experiment 20000535 PARAMETER Experiment Name: Zm_Hybrid_Seed_Dev_P Parameter: Organism Value: Zea mays
  misc_feature: MA Experiment 20000535 PARAMETER Experiment Name: Zm_Hybrid_Seed_Dev_P Parameter: Plant Line Value: 35A19
  misc_feature: MA Experiment 20000535 PARAMETER Experiment Name: Zm_Hybrid_Seed_Dev_P Parameter: Tissue Value: Embryo vs. Unfert Floret

SEQ ID NO: 17208 - protein, 350 aa, Zea mays subsp. mays; identical to SEQ ID NO: 10576
  peptide (1)..(350): Ceres Seq. ID no. 12387610
  misc_feature (1)..(297): Pfam Name: Cellulase (glycosyl hydrolase family 5) Pfam Description: Cellulase (glycosyl hydrolase family 5)
  misc_feature (1)..(346): Homolog of NCBI NO: 34909462 NR Description: putative (1-4)-beta-mannan endohydrolase [Oryza
  misc_feature (1)..(346): Homolog of NCBI NO: 30681096 NR Description: glycosyl hydrolase family 5/cellulase endohydrolase) [Arabidopsis thaliana] >gi|30793940|gb|AAP40422.1|
  misc_feature (1)..(342): Homolog of NCBI NO: 15235255 NR Description: glycosyl hydrolase family 5/cellulase
  misc_feature (75)..(346): Homolog of NCBI NO: 25354515 NR Description: (1-4)-beta-mannan endohydrolase [imported] -
  misc_feature (1)..(46): Homolog of NCBI NO: 25354515 NR Description: (1-4)-beta-mannan endohydrolase [imported] -
  misc_feature (1)..(332): Homolog of NCBI NO: 10129675 NR Description: (1-4)-beta-mannan endohydrolase [Coffea arabica]
  misc_feature (1)..(327): Homolog of NCBI NO: 34912090 NR Description: putative mannan endo-1,4-beta-mannosidase [Oryza
  misc_feature (1)..(331): Homolog of NCBI NO: 15239973 NR Description: glycosyl hydrolase family 5/cellulase
  misc_feature (1)..(328): Homolog of NCBI NO: 15241093 NR Description: glycosyl hydrolase family 5/cellulase
  misc_feature (3)..(339): Homolog of NCBI NO: 15228393 NR Description: glycosyl hydrolase family 5/cellulase

SEQ ID NO: 17209 - protein, 275 aa, Zea mays subsp. mays; identical to SEQ ID NO: 10577
  peptide (1)..(275): Ceres Seq. ID no. 12387611
  misc_feature (1)..(222): Pfam Name: Cellulase (glycosyl hydrolase family 5) Pfam Description: Cellulase (glycosyl hydrolase family 5)
  misc_feature (1)..(271): Homolog of NCBI NO: 34909462 NR Description: putative (1-4)-beta-mannan endohydrolase [Oryza
  misc_feature (1)..(271): Homolog of NCBI NO: 30681096 NR Description: glycosyl hydrolase family 5/cellulase endohydrolase) [Arabidopsis thaliana] >gi|30793940|gb|AAP40422.1|
  misc_feature (1)..(267): Homolog of NCBI NO: 15235255 NR Description: glycosyl hydrolase family 5/cellulase
  misc_feature (1)..(271): Homolog of NCBI NO: 25354515 NR Description: (1-4)-beta-mannan endohydrolase [imported] -
  misc_feature (1)..(257): Homolog of NCBI NO: 10129675 NR Description: (1-4)-beta-mannan endohydrolase [Coffea arabica]
  misc_feature (1)..(252): Homolog of NCBI NO: 34912090 NR Description: putative mannan endo-1,4-beta-mannosidase [Oryza
  misc_feature (1)..(256): Homolog of NCBI NO: 15239973 NR Description: glycosyl hydrolase family 5/cellulase
  misc_feature (1)..(253): Homolog of NCBI NO: 15241093 NR Description: glycosyl hydrolase family 5/cellulase
  misc_feature (1)..(264): Homolog of NCBI NO: 15228393 NR Description: glycosyl hydrolase family 5/cellulase
  misc_feature (1)..(259): Homolog of NCBI NO: 23477717 NR Description: endo-beta-mannanase [Daucus carota]

SEQ ID NO: 17210 - protein, 227 aa, Zea mays subsp. mays; identical to SEQ ID NO: 10578
  peptide (1)..(227): Ceres Seq. ID no. 12387612
  misc_feature (1)..(174): Pfam Name: Cellulase (glycosyl hydrolase family 5) Pfam Description: Cellulase (glycosyl hydrolase family 5)
  misc_feature (1)..(223): Homolog of NCBI NO: 34909462 NR Description: putative (1-4)-beta-mannan endohydrolase [Oryza
  misc_feature (1)..(223): Homolog of NCBI NO: 30681096 NR Description: glycosyl hydrolase family 5/cellulase endohydrolase) [Arabidopsis thaliana] >gi|30793940|gb|AAP40422.1|
  misc_feature (1)..(219): Homolog of NCBI NO: 15235255 NR Description: glycosyl hydrolase family 5/cellulase
  misc_feature (1)..(223): Homolog of NCBI NO: 25354515 NR Description: (1-4)-beta-mannan endohydrolase [imported] -
  misc_feature (1)..(209): Homolog of NCBI NO: 10129675 NR Description: (1-4)-beta-mannan endohydrolase [Coffea arabica]
  misc_feature (1)..(204): Homolog of NCBI NO: 34912090 NR Description: putative mannan endo-1,4-beta-mannosidase [Oryza
  misc_feature (1)..(208): Homolog of NCBI NO: 15239973 NR Description: glycosyl hydrolase family 5/cellulase
  misc_feature (1)..(205): Homolog of NCBI NO: 15241093 NR Description: glycosyl hydrolase family 5/cellulase
  misc_feature (1)..(216): Homolog of NCBI NO: 15228393 NR Description: glycosyl hydrolase family 5/cellulase
  misc_feature (1)..(211): Homolog of NCBI NO: 23477717 NR Description: endo-beta-mannanase [Daucus carota]

SEQ ID NO: 17211 - DNA, 2051 bp, Zea mays subsp. mays
  misc_feature (1)..(2051): Ceres Seq. ID no. 12417588
  misc_feature: MA Experiment ID: 108687 Result: Down-regulated in Transcription
  misc_feature: MA Experiment 108687 PARAMETER Experiment Name: Zm_Embryos-Flowers__P Parameter: Tissue Value: Embryo vs. Aerial+
  misc_feature: MA Experiment ID: 20000477 Result: Down-regulated in Transcription
  misc_feature: MA Experiment 20000477 PARAMETER Experiment Name: Zm_5mM_SA_P Parameter: Age (day) Value: 10
  misc_feature: MA Experiment 20000477 PARAMETER Experiment Name: Zm_5mM_SA_P Parameter: Organism Value: Zea mays
  misc_feature: MA Experiment 20000477 PARAMETER Experiment Name: Zm_5mM_SA_P Parameter: Plant Line Value: 35A19
  misc_feature: MA Experiment 20000477 PARAMETER Experiment Name: Zm_5mM_SA_P Parameter: Timepoint (hr) Value: 48
  misc_feature: MA Experiment 20000477 PARAMETER Experiment Name: Zm_5mM_SA_P Parameter: Tissue Value: Aerial
  misc_feature: MA Experiment 20000477 PARAMETER Experiment Name: Zm_5mM_SA_P Parameter: Treatment Value: 5mM SA vs. No Treatment
  misc_feature: MA Experiment ID: 20000478 Result: Down-regulated in Transcription
  misc_feature: MA Experiment 20000478 PARAMETER Experiment Name: Zm_5mM_SA_P Parameter: Age (day) Value: 11
  misc_feature: MA Experiment 20000478 PARAMETER Experiment Name: Zm_5mM_SA_P Parameter: Organism Value: Zea mays
  misc_feature: MA Experiment 20000478 PARAMETER Experiment Name: Zm_5mM_SA_P Parameter: Plant Line Value: 35A19
  misc_feature: MA Experiment 20000478 PARAMETER Experiment Name: Zm_5mM_SA_P Parameter: Timepoint (hr) Value: 72
  misc_feature: MA Experiment 20000478 PARAMETER Experiment Name: Zm_5mM_SA_P Parameter: Tissue Value: Aerial
  misc_feature: MA Experiment 20000478 PARAMETER Experiment Name: Zm_5mM_SA_P Parameter: Treatment Value: 5mM SA vs. No Treatment
  misc_feature: MA Experiment ID: 20000479 Result: Down-regulated in Transcription
  misc_feature: MA Experiment 20000479 PARAMETER Experiment Name: Zm_Drought_P Parameter: Age (day) Value: 10
  misc_feature: MA Experiment 20000479 PARAMETER Experiment Name: Zm_Drought_P Parameter: Organism Value: Zea mays
  misc_feature: MA Experiment 20000479 PARAMETER Experiment Name: Zm_Drought_P Parameter: Plant Line Value: 35A19
  misc_feature: MA Experiment 20000479 PARAMETER Experiment Name: Zm_Drought_P Parameter: Timepoint (hr) Value: 48
  misc_feature: MA Experiment 20000479 PARAMETER Experiment Name: Zm_Drought_P Parameter: Tissue Value: Aerial
  misc_feature: MA Experiment 20000479 PARAMETER Experiment Name: Zm_Drought_P Parameter: Treatment Value: Drought vs. No Drought
  misc_feature: MA Experiment ID: 20000492 Result: Up-regulated in Transcription
  misc_feature: MA Experiment 20000492 PARAMETER Experiment Name: Zm_Hybrid_Seed_Dev_P Parameter: DAP Value: 12
  misc_feature: MA Experiment 20000492 PARAMETER Experiment Name: Zm_Hybrid_Seed_Dev_P Parameter: Organism Value: Zea mays
  misc_feature: MA Experiment 20000492 PARAMETER Experiment Name: Zm_Hybrid_Seed_Dev_P Parameter: Plant Line Value: 35A19
  misc_feature: MA Experiment 20000492 PARAMETER Experiment Name: Zm_Hybrid_Seed_Dev_P Parameter: Tissue Value: Fert Kernel vs. Unfert Floret
  misc_feature: MA Experiment ID: 20000632 Result: Down-regulated in Transcription
  misc_feature: MA Experiment 20000632 PARAMETER Experiment Name: Zm_Herbicide-Treatments_P Parameter: Timepoint (hr) Value: 4
  misc_feature: MA Experiment 20000632 PARAMETER Experiment Name: Zm_Herbicide-Treatments_P Parameter: Tissue Value: Aerial
  misc_feature: MA Experiment 20000632 PARAMETER Experiment Name: Zm_Herbicide-Treatments_P Parameter: Treatment Value: Glean vs. No Treatment
  misc_feature: MA Experiment ID: 20000633 Result: Down-regulated in Transcription
  misc_feature: MA Experiment 20000633 PARAMETER Experiment Name: Zm_Herbicide-Treatments_P Parameter: Timepoint (hr) Value: 4
  misc_feature: MA Experiment 20000633 PARAMETER Experiment Name: Zm_Herbicide-Treatments_P Parameter: Tissue Value: Aerial
  misc_feature: MA Experiment 20000633 PARAMETER Experiment Name: Zm_Herbicide-Treatments_P Parameter: Treatment Value: Trimec vs. No Treatment
  misc_feature: MA Experiment ID: 20001610 Result: Up-regulated in Transcription
  misc_feature: MA Experiment 20001610 PARAMETER Experiment Name: Zm_50ppm_KNO3_L-to-H_P Parameter: Age (day) Value: 19
  misc_feature: MA Experiment 20001610 PARAMETER Experiment Name: Zm_50ppm_KNO3_L-to-H_P Parameter: Organism Value: Zea mays
  misc_feature: MA Experiment 20001610 PARAMETER Experiment Name: Zm_50ppm_KNO3_L-to-H_P Parameter: Plant Line Value: 35A19
  misc_feature: MA Experiment 20001610 PARAMETER Experiment Name: Zm_50ppm_KNO3_L-to-H_P Parameter: Timepoint (hr) Value: 2
  misc_feature: MA Experiment 20001610 PARAMETER Experiment Name: Zm_50ppm_KNO3_L-to-H_P Parameter: Tissue Value: Roots
  misc_feature: MA Experiment 20001610 PARAMETER Experiment Name: Zm_50ppm_KNO3_L-to-H_P Parameter: Treatment Value: 50ppm KNO3 vs. 50ppm KCl
gcacgagaccattacctagaacatcctaatcgaaaacaccccaaccaaaaccccacggacggaacccaagaaagaagagaggggcacgagtccccatgaacgacgccggcgaggccgaggcgcaagaactcgccccacccggcgcctccgccgccgccggcctgcaaggcagggcggaggtcgacacctcgacgcccttcaagtcggtgcgcgaggccgtcgaccgcttcggcggcagcgccgcctggagctccgacctcatcaagcgtatgttcgcgctgcccccgagcccaaagaagcaggaggggggcgacgaactggccgatctggaggagcagaccgcgcagctagagaaggagctcggcgtcaaggaaagggagacgcttgatgtgctcaaagagttggagtccaccaagaaggtggtcgcagatttgaagctaaagatacagaacgaaggtgccggtgcattttgcatccctgaagagagtgttcgggggtcaagccgagctgcccactgccgctgaagaggttgcagaagtgcagcctgagaatgctgaaactgatgtggttatgggcgcgcttcatgtgcagctgcaccagtctcctggtacttcagtgctgaagggccttgagcaggcaaaagccaatctaaacaggaccacgagtgatcttgcagctataagggcctccgtcgagtcgctgcggaacgacattgcgaaagagagaatcttggtggagagaagccgagagaaggtatgtgccaacacgacactgattgcttctctggaggatgagctgaaccggactgcacagaagctgcagacgctgcgggatctgcagaggaggcgtgacgatcaatcggacatcttcatagagatcaagaagatgacatctgagctagagcagctcaggaatgcagcgagtgctgccaaatcggaagctgctatgctgtctgccgaaattgagcagatgagagctagcatcggcactgctgaggtgaggtgccgtgcagccaggaagatagaagaggcggcaagggcagcagaagctcttgcccttgctgaaatcaagatcctactacgcaatgaagcttcagttgaggatcttcagggcatggaagatgtgagcctttcattggaagagtactctgagcttgctgccaaagctcaggaggctgatgaacgctcaagaaagaaaatcgatgctgcaatggtgcaggtagatgaagctaacaggacagaatctgactccctcagaaagctggaggaagctcgattacaggttgaggaatgtaagaaggcgctacaggatgcccagaagagggtggatgctgctaaccgagggaagagcgcagtagaagaggctcttcgcagatgtcgatccacgactggacacaggaggaggtcggtccatgaccctcccaggttcaaacatccagctccccgttccagagattctcagaatatggatatcgtcggtgtttcaaagggtcccttgaaaccaacgttgtcaatagggcagatactgagtatgaagctaatgggaccagatgggtatgacaaaagcgtctgggacgacgcaagcgaagcttctactatgtcgctcggacatatcctgaaccgcaggcatgcagtcgtgtatagcagcgatgcaactgctcagaagaaattcccagggaagaggaagaagtttgcctttacaggactctctattttcttggcgagacaggccaagaggaagaaggaaaagggatcgcattagaaactgctgaagccaacttgggctgggaaaagagaagcattgtagtctaccttgctagctgttaactcagaccctagtgttactgttcttgtaatttactagtatgtgtcgttgataggtgcctagatcattggtttttccatagcaggctagtaagttgtagctgatatttctgtctagtggttatttcaggtgctgtgtgaacttgcaatgtagcagtatgactagtagctgatatcaagtatatgaggcatatgtggttcactgagattggaatcttcttctctgct

SEQ ID NO: 17212 - protein, 396 aa, Zea mays subsp. mays
  peptide (1)..(396): Ceres Seq. ID no. 12417589
  misc_feature (1)..(248): Pfam Name: Plant protein of unknown function (DUF827) Pfam Description: Plant protein of unknown function (DUF827)
  misc_feature (1)..(373): Homolog of NCBI NO: 15224495 NR Description: hypothetical protein; protein id: At2g38370.1
  misc_feature (20)..(270): Homolog of NCBI NO: 15241071 NR Description: myosin heavy chain-like; protein id: At5g55860.1
  misc_feature (1)..(276): Homolog of NCBI NO: 15220079 NR Description: hypothetical protein; protein id: At1g45545.1
  misc_feature (15)..(323): Homolog of NCBI NO: 14029007 NR Description: Putative myosin heavy chain-like [Oryza sativa]
  misc_feature (1)..(279): Homolog of NCBI NO: 15234171 NR Description: putative protein; protein id: At4g33390.1
  misc_feature (5)..(279): Homolog of NCBI NO: 15225334 NR Description: unknown protein; protein id: At2g26570.1
  misc_feature (1)..(300): Homolog of NCBI NO: 15239100 NR Description: putative protein; protein id: At5g42880.1
  misc_feature (1)..(325): Homolog of NCBI NO: 34906758 NR Description: putative paramyosin [Oryza sativa (japonica
  misc_feature (1)..(61): Homolog of NCBI NO: 4433618 NR Description: putative myosin heavy chain [Dendrobium grex
  misc_feature (1)..(393): Homolog of NCBI NO: 33146426 NR Description: myosin heavy chain-like [Oryza sativa (japonica
MGALHVQLHQSPGTSVLKGLEQAKANLNRTTSDLAAIRASVESLRNDIAKERILVERSREKVCANTTLIASLEDELNRTAQKLQTLRDLQRRRDDQSDIFIEIKKMTSELEQLRNAASAAKSEAAMLSAEIEQMRASIGTAEVRCRAARKIEEAARAAEALALAEIKILLRNEASVEDLQGMEDVSLSLEEYSELAAKAQEADERSRKKIDAAMVQVDEANRTESDSLRKLEEARLQVEECKKALQDAQKRVDAANRGKSAVEEALRRCRSTTGHRRRSVHDPPRFKHPAPRSRDSQNMDIVGVSKGPLKPTLSIGQILSMKLMGPDGYDKSVWDDASEASTMSLGHILNRRHAVVYSSDATAQKKFPGKRKKFAFTGLSIFLARQAKRKKEKGSH

SEQ ID NO: 17213 - protein, 291 aa, Zea mays subsp. mays
  peptide (1)..(291): Ceres Seq. ID no. 12417590
  misc_feature (1)..(143): Pfam Name: Plant protein of unknown function (DUF827) Pfam Description: Plant protein of unknown function (DUF827)
  misc_feature (1)..(288): Homolog of NCBI NO: 15230567 NR Description: putative protein
  misc_feature (1)..(165): Homolog of NCBI NO: 15241071 NR Description: myosin heavy chain-like; protein id: At5g55860.1
  misc_feature (1)..(171): Homolog of NCBI NO: 15220079 NR Description: hypothetical protein; protein id: At1g45545.1
  misc_feature (1)..(220): Homolog of NCBI NO: 34906758 NR Description: putative paramyosin [Oryza sativa (japonica
  misc_feature (1)..(218): Homolog of NCBI NO: 14029007 NR Description: Putative myosin heavy chain-like [Oryza sativa]
  misc_feature (1)..(195): Homolog of NCBI NO: 15239100 NR Description: putative protein; protein id: At5g42880.1
  misc_feature (1)..(174): Homolog of NCBI NO: 15234171 NR Description: putative protein; protein id: At4g33390.1
  misc_feature (1)..(174): Homolog of NCBI NO: 15225334 NR Description: unknown protein; protein id: At2g26570.1
  misc_feature (1)..(268): Homolog of NCBI NO: 15224495 NR Description: hypothetical protein; protein id: At2g38370.1
  misc_feature (1)..(288): Homolog of NCBI NO: 33146426 NR Description: myosin heavy chain-like [Oryza sativa (japonica
MTSELEQLRNAASAAKSEAAMLSAEIEQMRASIGTAEVRCRAARKIEEAARAAEALALAEIKILLRNEASVEDLQGMEDVSLSLEEYSELAAKAQEADERSRKKIDAAMVQVDEANRTESDSLRKLEEARLQVEECKKALQDAQKRVDAANRGKSAVEEALRRCRSTTGHRRRSVHDPPRFKHPAPRSRDSQNMDIVGVSKGPLKPTLSIGQILSMKLMGPDGYDKSVWDDASEASTMSLGHILNRRHAVVYSSDATAQKKFPGKRKKFAFTGLSIFLARQAKRKKEKGSH

SEQ ID NO: 17214 - protein, 271 aa, Zea mays subsp. mays
  peptide (1)..(271): Ceres Seq. ID no. 12417591
  misc_feature (1)..(123): Pfam Name: Plant protein of unknown function (DUF827) Pfam Description: Plant protein of unknown function (DUF827)
  misc_feature (1)..(268): Homolog of NCBI NO: 15230567 NR Description: putative protein
  misc_feature (1)..(145): Homolog of NCBI NO: 15241071 NR Description: myosin heavy chain-like; protein id: At5g55860.1
  misc_feature (1)..(151): Homolog of NCBI NO: 15220079 NR Description: hypothetical protein; protein id: At1g45545.1
  misc_feature (1)..(200): Homolog of NCBI NO: 34906758 NR Description: putative paramyosin [Oryza sativa (japonica
  misc_feature (1)..(198): Homolog of NCBI NO: 14029007 NR Description: Putative myosin heavy chain-like [Oryza sativa]
  misc_feature (1)..(175): Homolog of NCBI NO: 15239100 NR Description: putative protein; protein id: At5g42880.1
  misc_feature (1)..(154): Homolog of NCBI NO: 15234171 NR Description: putative protein; protein id: At4g33390.1
  misc_feature (1)..(154): Homolog of NCBI NO: 15225334 NR Description: unknown protein; protein id: At2g26570.1
  misc_feature (1)..(248): Homolog of NCBI NO: 15224495 NR Description: hypothetical protein; protein id: At2g38370.1
  misc_feature (1)..(268): Homolog of NCBI NO: 33146426 NR Description: myosin heavy chain-like [Oryza sativa (japonica
MLSAEIEQMRASIGTAEVRCRAARKIEEAARAAEALALAEIKILLRNEASVEDLQGMEDVSLSLEEYSELAAKAQEADERSRKKIDAAMVQVDEANRTESDSLRKLEEARLQVEECKKALQDAQKRVDAANRGKSAVEEALRRCRSTTGHRRRSVHDPPRFKHPAPRSRDSQNMDIVGVSKGPLKPTLSIGQILSMKLMGPDGYDKSVWDDASEASTMSLGHILNRRHAVVYSSDATAQKKFPGKRKKFAFTGLSIFLARQAKRKKEKGSH

SEQ ID NO: 17215 - DNA, 1069 bp, Zea mays subsp. mays
  misc_feature (1)..(1069): Ceres Seq. ID no. 12417357
  misc_feature: MA Experiment ID: 108515 Result: Up-regulated in Transcription
  misc_feature: MA Experiment 108515 PARAMETER Experiment Name: Zm_2mM_SA_P Parameter: Age (day) Value: 8
  misc_feature: MA Experiment 108515 PARAMETER Experiment Name: Zm_2mM_SA_P Parameter: Organism Value: Zea mays
  misc_feature: MA Experiment 108515 PARAMETER Experiment Name: Zm_2mM_SA_P Parameter: Plant Line Value: 35A19
  misc_feature: MA Experiment 108515 PARAMETER Experiment Name: Zm_2mM_SA_P Parameter: Timepoint (hr) Value: 12
  misc_feature: MA Experiment 108515 PARAMETER Experiment Name: Zm_2mM_SA_P Parameter: Tissue Value: Aerial
  misc_feature: MA Experiment 108515 PARAMETER Experiment Name: Zm_2mM_SA_P Parameter: Treatment Value: 2mM SA vs. No Treatment
  misc_feature: MA Experiment ID: 108528 Result: Down-regulated in Transcription
  misc_feature: MA Experiment 108528 PARAMETER Experiment Name: Zm_Imbibed_Seeds_P Parameter: Age (day) Value: 5 vs. 2
  misc_feature: MA Experiment 108528 PARAMETER Experiment Name: Zm_Imbibed_Seeds_P Parameter: Organism Value: Zea mays
  misc_feature: MA Experiment 108528 PARAMETER Experiment Name: Zm_Imbibed_Seeds_P Parameter: Plant Line Value: 35A19
  misc_feature: MA Experiment 108528 PARAMETER Experiment Name: Zm_Imbibed_Seeds_P Parameter: Tissue Value: Aerial vs. Embryo
  misc_feature: MA Experiment ID: 108530 Result: Down-regulated in Transcription
  misc_feature: MA Experiment 108530 PARAMETER Experiment Name: Zm_Imbibed_Seeds_P Parameter: Age (day) Value: 6 vs. 2
  misc_feature: MA Experiment 108530 PARAMETER Experiment Name: Zm_Imbibed_Seeds_P Parameter: Organism Value: Zea mays
  misc_feature: MA Experiment 108530 PARAMETER Experiment Name: Zm_Imbibed_Seeds_P Parameter: Plant Line Value: 35A19
  misc_feature: MA Experiment 108530 PARAMETER Experiment Name: Zm_Imbibed_Seeds_P Parameter: Tissue Value: Aerial vs. Embryo
  misc_feature: MA Experiment ID: 108534 Result: Down-regulated in Transcription
  misc_feature: MA Experiment 108534 PARAMETER Experiment Name: Zm_4deg_Cold_P Parameter: Age (hr) Value: 8
  misc_feature: MA Experiment 108534 PARAMETER Experiment Name: Zm_4deg_Cold_P Parameter: Organism Value: Zea mays
  misc_feature: MA Experiment 108534 PARAMETER Experiment Name: Zm_4deg_Cold_P Parameter: Plant Line Value: 35A19
  misc_feature: MA Experiment 108534 PARAMETER Experiment Name: Zm_4deg_Cold_P Parameter: Temperature (deg C) Value: 4 vs. 22
  misc_feature: MA Experiment 108534 PARAMETER Experiment Name: Zm_4deg_Cold_P Parameter: Timepoint (hr) Value: 6
  misc_feature: MA Experiment 108534 PARAMETER Experiment Name: Zm_4deg_Cold_P Parameter: Tissue Value: Aerial
  misc_feature: MA Experiment ID: 108536 Result: Up-regulated in Transcription
  misc_feature: MA Experiment 108536 PARAMETER Experiment Name: Zm_Meristem_P Parameter: Age (day) Value: 8
  misc_feature: MA Experiment 108536 PARAMETER Experiment Name: Zm_Meristem_P Parameter: Organism Value: Zea mays
  misc_feature: MA Experiment 108536 PARAMETER Experiment Name: Zm_Meristem_P Parameter: Plant Line Value: 35A19
  misc_feature: MA Experiment 108536 PARAMETER Experiment Name: Zm_Meristem_P Parameter: Tissue Value: Shoot Meristem vs. Above Shoot Meristem
  misc_feature: MA Experiment ID: 108543 Result: Down-regulated in Transcription
  misc_feature: MA Experiment ID: 108545 Result: Down-regulated in Transcription
  misc_feature: MA Experiment 108545 PARAMETER Experiment Name: Zm_Imbibed_Seeds_P Parameter: Age (day) Value: 3 vs. 2
  misc_feature: MA Experiment 108545 PARAMETER Experiment Name: Zm_Imbibed_Seeds_P Parameter: Organism Value: Zea mays
  misc_feature: MA Experiment 108545 PARAMETER Experiment Name: Zm_Imbibed_Seeds_P Parameter: Plant Line Value: 35A19
  misc_feature: MA Experiment 108545 PARAMETER Experiment Name: Zm_Imbibed_Seeds_P Parameter: Tissue Value: Aerial vs. Embryo
  misc_feature: MA Experiment ID: 108547 Result: Down-regulated in Transcription
  misc_feature: MA Experiment 108547 PARAMETER Experiment Name: Zm_Imbibed_Seeds_P Parameter: Age (day) Value: 4 vs. 2
  misc_feature: MA Experiment 108547 PARAMETER Experiment Name: Zm_Imbibed_Seeds_P Parameter: Organism Value: Zea mays
  misc_feature: MA Experiment 108547 PARAMETER Experiment Name: Zm_Imbibed_Seeds_P Parameter: Plant Line Value: 35A19
  misc_feature: MA Experiment 108547 PARAMETER Experiment Name: Zm_Imbibed_Seeds_P Parameter: Tissue Value: Aerial vs. Embryo
  misc_feature: MA Experiment ID: 20000478 Result: Down-regulated in Transcription
  misc_feature: MA Experiment 20000478 PARAMETER Experiment Name: Zm_5mM_SA_P Parameter: Age (day) Value: 11
  misc_feature: MA Experiment 20000478 PARAMETER Experiment Name: Zm_5mM_SA_P Parameter: Organism Value: Zea mays
  misc_feature: MA Experiment 20000478 PARAMETER Experiment Name: Zm_5mM_SA_P Parameter: Plant Line Value: 35A19
  misc_feature: MA Experiment 20000478 PARAMETER Experiment Name: Zm_5mM_SA_P Parameter: Timepoint (hr) Value: 72
  misc_feature: MA Experiment 20000478 PARAMETER Experiment Name: Zm_5mM_SA_P Parameter: Tissue Value: Aerial
  misc_feature: MA Experiment 20000478 PARAMETER Experiment Name: Zm_5mM_SA_P Parameter: Treatment Value: 5mM SA vs. No Treatment
  misc_feature: MA Experiment ID: 20000535 Result: Up-regulated in Transcription
  misc_feature: MA Experiment 20000535 PARAMETER Experiment Name: Zm_Hybrid_Seed_Dev_P Parameter: DAP Value: 30 vs. 12
  misc_feature: MA Experiment 20000535 PARAMETER Experiment Name: Zm_Hybrid_Seed_Dev_P Parameter: Organism Value: Zea mays
  misc_feature: MA Experiment 20000535 PARAMETER Experiment Name: Zm_Hybrid_Seed_Dev_P Parameter: Plant Line Value: 35A19
  misc_feature: MA Experiment 20000535 PARAMETER Experiment Name: Zm_Hybrid_Seed_Dev_P Parameter: Tissue Value: Embryo vs. Unfert Floret
gcacgagaccattacctagaacatcctaatcgaaaaaatcatcactgccatctctctctgactctgtgtccgtctctaaactctagtctgtgcgaatcctgctgccagcagcgaggaacagaacagtagccaatttgccatctcacagttgcgttcctccgattccccgtcccccgatggacctgtctcccagctcgtcggcgccatccgcgccgccggtgccgtgcgagtggtccggcgccgggctcggctccgcggcgtgcggcctcgcctgcagggtgctctgcgccgtcgccacctgcgtcttcgcggccgtggggtcgctggtcggggcggtgacggggtccatggtggggctggcgaccgagagcgggatgctgcgcggcgccggcatcggggccatctccggcgccgtcttctccatcgaggtcgccgagtcgtcccgcgacctctggcactcgggcgactccggcgtctggaccctcctctacatggtggacatcatctccagtctcttgagcggcaggctggtccgggagaaggtggggccggctgttcagagcgccgtgcagagccagatcagcgccatcagctcgccgttcgaggagacgagcgacctgttcgagaccggcagcgtgaggggcctccccgaggccgcggtgcgccggctgccggtgacggtggtcgcggaggacggcgccgtggacgcggcgggccaggcgctgtgctgctcggtgtgcctgcaggacttccgggtgggcgaccgcgcgcggaggctgcccggttgccgccacctgttccacgtgccctgcatcgactgctggctcctcaggcacggctcctgcccgctgtgccggcgagacatctgaaactcggtcgtctgctctgtgaaccgccacccacgtcgccggaaacgtggtgtagtgttgctgctttggacgagatggtcagttagttgagtagggttcctactttttaggacggcaccctgatgcccgtaagggaaatggtgcgctctgacgctctgttaactaaaaaagaagaagagagaaaacagcccctcagcttc

SEQ ID NO: 17216 - protein, 230 aa, Zea mays subsp. mays
  peptide (1)..(230): Ceres Seq. ID no. 12417358
  misc_feature (185)..(226): Pfam Name: Zinc finger, C3HC4 type (RING finger) Pfam Description: Zinc finger, C3HC4 type (RING finger)
  misc_feature (39)..(225): Homolog of NCBI NO: 7485279 NR Description: hypothetical protein A_TM017A05.9 - Arabidopsis
  misc_feature (35)..(225): Homolog of NCBI NO: 25411815 NR Description: hypothetical protein At2g17730 [imported] -
  misc_feature (27)..(230): Homolog of NCBI NO: 15239242 NR Description: putative protein; protein id: At5g66070.1
  misc_feature (35)..(230): Homolog of NCBI NO: 27524902 NR Description: NEP1-interacting protein [Arabidopsis thaliana]
  misc_feature (3)..(230): Homolog of NCBI NO: 18855037 NR Description: putative zinc finger protein [Oryza sativa]
  misc_feature (1)..(230): Homolog of NCBI NO: 33146606 NR Description: putative NEP1-interacting protein 2
  misc_feature (35)..(230): Homolog of NCBI NO: 26451101 NR Description: unknown protein [Arabidopsis thaliana]
  misc_feature (35)..(230): Homolog of NCBI NO: 30680091 NR Description: expressed protein [Arabidopsis thaliana]
  misc_feature (35)..(230): Homolog of NCBI NO: 26452210 NR Description: unknown protein [Arabidopsis thaliana]
  misc_feature (1)..(230): Homolog of NCBI NO: 37536572 NR Description: hypothetical protein [Oryza sativa (japonica
MDLSPSSSAPSAPPVPCEWSGAGLGSAACGLACRVLCAVATCVFAAVGSLVGAVTGSMVGLATESGMLRGAGIGAISGAVFSIEVAESSRDLWHSGDSGVWTLLYMVDIISSLLSGRLVREKVGPAVQSAVQSQISAISSPFEETSDLFETGSVRGLPEAAVRRLPVTVVAEDGAVDAAGQALCCSVCLQDFRVGDRARRLPGCRHLFHVPCIDCWLLRHGSCPLCRRDI

SEQ ID NO: 17217 - protein, 173 aa, Zea mays subsp. mays
  peptide (1)..(173): Ceres Seq. ID no. 12417359
  misc_feature (128)..(169): Pfam Name: Zinc finger, C3HC4 type (RING finger) Pfam Description: Zinc finger, C3HC4 type (RING finger)
  misc_feature (1)..(168): Homolog of NCBI NO: 7485279 NR Description: hypothetical protein A_TM017A05.9 - Arabidopsis
  misc_feature (1)..(168): Homolog of NCBI NO: 25411815 NR Description: hypothetical protein At2g17730 [imported] -
  misc_feature (1)..(173): Homolog of NCBI NO: 15239242 NR Description: putative protein; protein id: At5g66070.1
  misc_feature (1)..(173): Homolog of NCBI NO: 27524902 NR Description: NEP1-interacting protein [Arabidopsis thaliana]
  misc_feature (1)..(173): Homolog of NCBI NO: 18855037 NR Description: putative zinc finger protein [Oryza sativa]
  misc_feature (1)..(173): Homolog of NCBI NO: 33146606 NR Description: putative NEP1-interacting protein 2
  misc_feature (1)..(173): Homolog of NCBI NO: 26451101 NR Description: unknown protein [Arabidopsis thaliana]
  misc_feature (1)..(173): Homolog of NCBI NO: 30680091 NR Description: expressed protein [Arabidopsis thaliana]
  misc_feature (1)..(173): Homolog of NCBI NO: 26452210 NR Description: unknown protein [Arabidopsis thaliana]
  misc_feature (1)..(173): Homolog of NCBI NO: 37536572 NR Description: hypothetical protein [Oryza sativa (japonica
MVGLATESGMLRGAGIGAISGAVFSIEVAESSRDLWHSGDSGVWTLLYMVDIISSLLSGRLVREKVGPAVQSAVQSQISAISSPFEETSDLFETGSVRGLPEAAVRRLPVTVVAEDGAVDAAGQALCCSVCLQDFRVGDRARRLPGCRHLFHVPCIDCWLLRHGSCPLCRRDI

SEQ ID NO: 17218 - protein, 164 aa, Zea mays subsp. mays
  peptide (1)..(164): Ceres Seq. ID no. 12417360
  misc_feature (119)..(160): Pfam Name: Zinc finger, C3HC4 type (RING finger) Pfam Description: Zinc finger, C3HC4 type (RING finger)
  misc_feature (1)..(159): Homolog of NCBI NO: 7485279 NR Description: hypothetical protein A_TM017A05.9 - Arabidopsis
  misc_feature (1)..(159): Homolog of NCBI NO: 25411815 NR Description: hypothetical protein At2g17730 [imported] -
  misc_feature (1)..(164): Homolog of NCBI NO: 15239242 NR Description: putative protein; protein id: At5g66070.1
  misc_feature (1)..(164): Homolog of NCBI NO: 27524902 NR Description: NEP1-interacting protein [Arabidopsis thaliana]
  misc_feature (1)..(164): Homolog of NCBI NO: 18855037 NR Description: putative zinc finger protein [Oryza sativa]
  misc_feature (1)..(164): Homolog of NCBI NO: 33146606 NR Description: putative NEP1-interacting protein 2
  misc_feature (1)..(164): Homolog of NCBI NO: 26451101 NR Description: unknown protein [Arabidopsis thaliana]
  misc_feature (1)..(164): Homolog of NCBI NO: 30680091 NR Description: expressed protein [Arabidopsis thaliana]
  misc_feature (1)..(164): Homolog of NCBI NO: 26452210 NR Description: unknown protein [Arabidopsis thaliana]
  misc_feature (1)..(164): Homolog of NCBI NO: 37536572 NR Description: hypothetical protein [Oryza sativa (japonica
MLRGAGIGAISGAVFSIEVAESSRDLWHSGDSGVWTLLYMVDIISSLLSGRLVREKVGPAVQSAVQSQISAISSPFEETSDLFETGSVRGLPEAAVRRLPVTVVAEDGAVDAAGQALCCSVCLQDFRVGDRARRLPGCRHLFHVPCIDCWLLRHGSCPLCRRDI

SEQ ID NO: 17219 - DNA, 1012 bp, Zea mays subsp. mays
  misc_feature (1)..(1012): Ceres Seq. ID no. 12417137
  misc_feature: MA Experiment ID: 108527 Result: Down-regulated in Transcription
  misc_feature: MA Experiment 108527 PARAMETER Experiment Name: Zm_5mM_NO_P Parameter: Age (day) Value: 8
  misc_feature: MA Experiment 108527 PARAMETER Experiment Name: Zm_5mM_NO_P Parameter: Organism Value: Zea mays
  misc_feature: MA Experiment 108527 PARAMETER Experiment Name: Zm_5mM_NO_P Parameter: Plant Line Value: 35A19
  misc_feature: MA Experiment 108527 PARAMETER Experiment Name: Zm_5mM_NO_P Parameter: Timepoint (hr) Value: 6
  misc_feature: MA Experiment 108527 PARAMETER Experiment Name: Zm_5mM_NO_P Parameter: Tissue Value: Aerial
  misc_feature: MA Experiment 108527 PARAMETER Experiment Name: Zm_5mM_NO_P Parameter: Treatment Value: 5mM NO vs. No Treatment
  misc_feature: MA Experiment ID: 108528 Result: Up-regulated in Transcription
  misc_feature: MA Experiment 108528 PARAMETER Experiment Name: Zm_Imbibed_Seeds_P Parameter: Age (day) Value: 5 vs. 2
  misc_feature: MA Experiment 108528 PARAMETER Experiment Name: Zm_Imbibed_Seeds_P Parameter: Organism Value: Zea mays
  misc_feature: MA Experiment 108528 PARAMETER Experiment Name: Zm_Imbibed_Seeds_P Parameter: Plant Line Value: 35A19
  misc_feature: MA Experiment 108528 PARAMETER Experiment Name: Zm_Imbibed_Seeds_P Parameter: Tissue Value: Aerial vs. Embryo
  misc_feature: MA Experiment ID: 108530 Result: Up-regulated in Transcription
  misc_feature: MA Experiment 108530 PARAMETER Experiment Name: Zm_Imbibed_Seeds_P Parameter: Age (day) Value: 6 vs. 2
  misc_feature: MA Experiment 108530 PARAMETER Experiment Name: Zm_Imbibed_Seeds_P Parameter: Organism Value: Zea mays
  misc_feature: MA Experiment 108530 PARAMETER Experiment Name: Zm_Imbibed_Seeds_P Parameter: Plant Line Value: 35A19
  misc_feature: MA Experiment 108530 PARAMETER Experiment Name: Zm_Imbibed_Seeds_P Parameter: Tissue Value: Aerial vs. Embryo
  misc_feature: MA Experiment ID: 108545 Result: Up-regulated in Transcription
  misc_feature: MA Experiment 108545 PARAMETER Experiment Name: Zm_Imbibed_Seeds_P Parameter: Age (day) Value: 3 vs. 2
  misc_feature: MA Experiment 108545 PARAMETER Experiment Name: Zm_Imbibed_Seeds_P Parameter: Organism Value: Zea mays
  misc_feature: MA Experiment 108545 PARAMETER Experiment Name: Zm_Imbibed_Seeds_P Parameter: Plant Line Value: 35A19
  misc_feature: MA Experiment 108545 PARAMETER Experiment Name: Zm_Imbibed_Seeds_P Parameter: Tissue Value: Aerial vs. Embryo
  misc_feature: MA Experiment ID: 108546 Result: Down-regulated in Transcription
  misc_feature: MA Experiment 108546 PARAMETER Experiment Name: Zm_Imbibed_Seeds_P Parameter: Age (day) Value: 3 vs. 2
  misc_feature: MA Experiment 108546 PARAMETER Experiment Name: Zm_Imbibed_Seeds_P Parameter: Organism Value: Zea mays
  misc_feature: MA Experiment 108546 PARAMETER Experiment Name: Zm_Imbibed_Seeds_P Parameter: Plant Line Value: 35A19
  misc_feature: MA Experiment 108546 PARAMETER Experiment Name: Zm_Imbibed_Seeds_P Parameter: Tissue Value: Roots vs. Embryo
  misc_feature: MA Experiment ID: 108547 Result: Up-regulated in Transcription
  misc_feature: MA Experiment 108547 PARAMETER Experiment Name: Zm_Imbibed_Seeds_P Parameter: Age (day) Value: 4 vs. 2
  misc_feature: MA Experiment 108547 PARAMETER Experiment Name: Zm_Imbibed_Seeds_P Parameter: Organism Value: Zea mays
  misc_feature: MA Experiment 108547 PARAMETER Experiment Name: Zm_Imbibed_Seeds_P Parameter: Plant Line Value: 35A19
  misc_feature: MA Experiment 108547 PARAMETER Experiment Name: Zm_Imbibed_Seeds_P Parameter: Tissue Value: Aerial vs. Embryo
  misc_feature: MA Experiment ID: 108556 Result: Down-regulated in Transcription
  misc_feature: MA Experiment 108556 PARAMETER Experiment Name: Zm_Drought_P Parameter: Age (day) Value: 9
  misc_feature: MA Experiment 108556 PARAMETER Experiment Name: Zm_Drought_P Parameter: Organism Value: Zea mays
  misc_feature: MA Experiment 108556 PARAMETER Experiment Name: Zm_Drought_P Parameter: Plant Line Value: 35A19
  misc_feature: MA Experiment 108556 PARAMETER Experiment Name: Zm_Drought_P Parameter: Timepoint (hr) Value: 24
  misc_feature: MA Experiment 108556 PARAMETER Experiment Name: Zm_Drought_P Parameter: Tissue Value: Aerial
  misc_feature: MA Experiment 108556 PARAMETER Experiment Name: Zm_Drought_P Parameter: Treatment Value: Drought vs. No Drought
  misc_feature: MA Experiment ID: 108559 Result: Down-regulated in Transcription
  misc_feature: MA Experiment 108559 PARAMETER Experiment Name: Zm_5mM_NO_P Parameter: Age (day) Value: 8
  misc_feature: MA Experiment 108559 PARAMETER Experiment Name: Zm_5mM_NO_P Parameter: Organism Value: Zea mays
  misc_feature: MA Experiment 108559 PARAMETER Experiment Name: Zm_5mM_NO_P Parameter: Plant Line Value: 35A19
  misc_feature: MA Experiment 108559 PARAMETER Experiment Name: Zm_5mM_NO_P Parameter: Timepoint (hr) Value: 12
  misc_feature: MA Experiment 108559 PARAMETER Experiment Name: Zm_5mM_NO_P Parameter: Tissue Value: Aerial
  misc_feature: MA Experiment 108559 PARAMETER Experiment Name: Zm_5mM_NO_P Parameter: Treatment Value: 5mM NO vs. No Treatment
  misc_feature: MA Experiment ID: 108687 Result: Down-regulated in Transcription
  misc_feature: MA Experiment 108687 PARAMETER Experiment Name: Zm_Embryos-Flowers__P Parameter: Tissue Value: Embryo vs. Aerial+
  misc_feature: MA Experiment ID: 108688 Result: Down-regulated in Transcription
  misc_feature: MA Experiment 108688 PARAMETER Experiment Name: Zm_Embryos-Flowers__P Parameter: Tissue Value: Immature Flowers vs. Aerial+
  misc_feature: MA Experiment ID: 20000480 Result: Down-regulated in Transcription
  misc_feature: MA Experiment 20000480 PARAMETER Experiment Name: Zm_Drought_P Parameter: Age (day) Value: 11
  misc_feature: MA Experiment 20000480 PARAMETER Experiment Name: Zm_Drought_P Parameter: Organism Value: Zea mays
  misc_feature: MA Experiment 20000480 PARAMETER Experiment Name: Zm_Drought_P Parameter: Plant Line Value: 35A19
  misc_feature: MA Experiment 20000480 PARAMETER Experiment Name: Zm_Drought_P Parameter: Timepoint (hr) Value: 72
  misc_feature: MA Experiment 20000480 PARAMETER Experiment Name: Zm_Drought_P Parameter: Tissue Value: Aerial
  misc_feature: MA Experiment 20000480 PARAMETER Experiment Name: Zm_Drought_P Parameter: Treatment Value: Drought vs. No Drought
  misc_feature: MA Experiment ID: 20000535 Result: Down-regulated in Transcription
  misc_feature: MA Experiment 20000535 PARAMETER Experiment Name: Zm_Hybrid_Seed_Dev_P Parameter: DAP Value: 30 vs. 12
  misc_feature: MA Experiment 20000535 PARAMETER Experiment Name: Zm_Hybrid_Seed_Dev_P Parameter: Organism Value: Zea mays
  misc_feature: MA Experiment 20000535 PARAMETER Experiment Name: Zm_Hybrid_Seed_Dev_P Parameter: Plant Line Value: 35A19
  misc_feature: MA Experiment 20000535 PARAMETER Experiment Name: Zm_Hybrid_Seed_Dev_P Parameter: Tissue Value: Embryo vs. Unfert Floret
atcttcgcccccgtctcgggcgcccattctcctcctcgacgccgcctccgtctcgcgccattgcacgtcgtcgacgactccaagaacccccccgaggagaggtctgagacggataagatggtcgacggcatggacttcggggagctctgcagcgacttcgagtgcataagcagcccctacgtggagtcgacggcgaggcaggtcgcgcgggacatcctggagctccgcgaggacaaccgcgcattcaactgctacgcggtctccgtcaagtacaaggacccactcaggacatttgttgggcgtgagaagtacaggaggccgttgtggatcaccaaggcgttggaaaaccctgtagtgacagtccaggaaatgtcaatgcagtcgacgagcaacctgaccatcagatgggcgttgagagggaagcctaagaacccgttgttcgcgagcgtcggaggagacgtcatcgtccgcgtcgagtcacggttcgtcctgaaccagataagcgggcaggtgctggagcaggccgagtcctgggacctctccgcctcgtccctccctgcccaggcctacttctggctgtcccgaagggtctactccgccgtggagtccgggaaggacgcgatcgaagccgccaagagcgcggcgtcgtctgggctgacgaccaagggagaccagaatctcgaggcctatccggatccttctgctgatcctacaaagttctttcagaggccggatgatgggttcagccaagacgtgtaccagatcggccttctcctggccgtgatctacttcattgtacagtttctgaaggcgaccctgtgaccggctgcagcctgtcgaagaatgtagcctgtgtgcagtatacatgtatgtaactatgcctagcaacattataaaatacgggcatatatcatcctgccatctgacctgcgacagatttgtgacctttcaccactgctgtcggtgatattagtttggcacgcaagttgccaatttacaggtgttaaacttg

SEQ ID NO: 17220 - protein, 273 aa, Zea mays subsp. mays
  peptide (1)..(273): Ceres Seq. ID no. 12417138
  misc_feature (33)..(239): Homolog of NCBI NO: 25404541 NR Description: hypothetical protein T23K8.14 [imported] -
  misc_feature (33)..(273): Homolog of NCBI NO: 22330431 NR Description: unknown protein
  misc_feature (3)..(273): Homolog of NCBI NO: 34906888 NR Description: P0470A12.24 [Oryza sativa (japonica
IFAPVSGAHSPPRRRLRLAPLHVVDDSKNPPEERSETDKMVDGMDFGELCSDFECISSPYVESTARQVARDILELREDNRAFNCYAVSVKYKDPLRTFVGREKYRRPLWITKALENPVVTVQEMSMQSTSNLTIRWALRGKPKNPLFASVGGDVIVRVESRFVLNQISGQVLEQAESWDLSASSLPAQAYFWLSRRVYSAVESGKDAIEAAKSAASSGLTTKGDQNLEAYPDPSADPTKFFQRPDDGFSQDVYQIGLLLAVIYFIVQFLKATL

SEQ ID NO: 17221 - protein, 234 aa, Zea mays subsp. mays
  peptide (1)..(234): Ceres Seq. ID no. 12417139
  misc_feature (1)..(200): Homolog of NCBI NO: 25404541 NR Description: hypothetical protein T23K8.14 [imported] -
  misc_feature (1)..(234): Homolog of NCBI NO: 22330431 NR Description: unknown protein
  misc_feature (1)..(234): Homolog of NCBI NO: 34906888 NR Description: P0470A12.24 [Oryza sativa (japonica
MVDGMDFGELCSDFECISSPYVESTARQVARDILELREDNRAFNCYAVSVKYKDPLRTFVGREKYRRPLWITKALENPVVTVQEMSMQSTSNLTIRWALRGKPKNPLFASVGGDVIVRVESRFVLNQISGQVLEQAESWDLSASSLPAQAYFWLSRRVYSAVESGKDAIEAAKSAASSGLTTKGDQNLEAYPDPSADPTKFFQRPDDGFSQDVYQIGLLLAVIYFIVQFLKATL

SEQ ID NO: 17222 - protein, 230 aa, Zea mays subsp. mays
  peptide (1)..(230): Ceres Seq. ID no. 12417140
  misc_feature (1)..(196): Homolog of NCBI NO: 25404541 NR Description: hypothetical protein T23K8.14 [imported] -
  misc_feature (1)..(230): Homolog of NCBI NO: 22330431 NR Description: unknown protein
  misc_feature (1)..(230): Homolog of NCBI NO: 34906888 NR Description: P0470A12.24 [Oryza sativa (japonica
MDFGELCSDFECISSPYVESTARQVARDILELREDNRAFNCYAVSVKYKDPLRTFVGREKYRRPLWITKALENPVVTVQEMSMQSTSNLTIRWALRGKPKNPLFASVGGDVIVRVESRFVLNQISGQVLEQAESWDLSASSLPAQAYFWLSRRVYSAVESGKDAIEAAKSAASSGLTTKGDQNLEAYPDPSADPTKFFQRPDDGFSQDVYQIGLLLAVIYFIVQFLKATL

SEQ ID NO: 17223 - DNA, 1919 bp, Zea mays subsp. mays; identical to SEQ ID NO: 4314
  misc_feature (1)..(1919): Ceres Seq. ID no. 12406508
  misc_feature: MA Experiment ID: 20000535 Result: Down-regulated in Transcription
  misc_feature: MA Experiment 20000535 PARAMETER Experiment Name: Zm_Hybrid_Seed_Dev_P Parameter: DAP Value: 30 vs. 12
  misc_feature: MA Experiment 20000535 PARAMETER Experiment Name: Zm_Hybrid_Seed_Dev_P Parameter: Organism Value: Zea mays
  misc_feature: MA Experiment 20000535 PARAMETER Experiment Name: Zm_Hybrid_Seed_Dev_P Parameter: Plant Line Value: 35A19
  misc_feature: MA Experiment 20000535 PARAMETER Experiment Name: Zm_Hybrid_Seed_Dev_P Parameter: Tissue Value: Embryo vs. Unfert Floret
  misc_feature: MA Experiment ID: 20000626 Result: Up-regulated in Transcription
  misc_feature: MA Experiment 20000626 PARAMETER Experiment Name: Zm_Herbicide-Treatments_P Parameter: Timepoint (hr) Value: 12
  misc_feature: MA Experiment 20000626 PARAMETER Experiment Name: Zm_Herbicide-Treatments_P Parameter: Tissue Value: Aerial
  misc_feature: MA Experiment 20000626 PARAMETER Experiment Name: Zm_Herbicide-Treatments_P Parameter: Treatment Value: Roundup vs. No Treatment

SEQ ID NO: 17224 - protein, 460 aa, Zea mays subsp. mays; identical to SEQ ID NO: 4315
  peptide (1)..(460): Ceres Seq. ID no. 12406509
  misc_feature (18)..(442): Homolog of NCBI NO: 34895168 NR Description: putative cytochrome P450 [Oryza sativa (japonica group)] >gi|21104826|dbj|BAB93411.1| putative cytochrome P450
  misc_feature (33)..(442): Homolog of NCBI NO: 34913354 NR Description: putative cytochrome P450 [Oryza sativa (japonica group)] >gi|22293694|dbj|BAC10039.1| putative cytochrome P450
  misc_feature (20)..(442): Homolog of NCBI NO: 38112707 NR Description: cytochrome P450 [Triticum aestivum]
  misc_feature (20)..(442): Homolog of NCBI NO: 22324446 NR Description: putative cytochrome P450 [Oryza sativa (japonica
  misc_feature (29)..(442): Homolog of NCBI NO: 34913346 NR Description: putative cytochrome P450 [Oryza sativa (japonica group)] >gi|22093840|dbj|BAC07127.1| putative cytochrome P450
  misc_feature (23)..(442): Homolog of NCBI NO: 34913362 NR Description: putative cytochrome P450 [Oryza sativa (japonica group)] >gi|22293698|dbj|BAC10043.1| putative cytochrome P450
  misc_feature (20)..(434): Homolog of NCBI NO: 34896952 NR Description: putative cytochrome P450-related protein [Oryza
  misc_feature (21)..(442): Homolog of NCBI NO: 14719280 NR Description: cytochrome P450 [Zea mays]
  misc_feature (19)..(434): Homolog of NCBI NO: 15226472 NR Description: cytochrome p450, putative; protein id: [Arabidopsis thaliana] >gi|7430708|pir||T02192 probable
  misc_feature (20)..(434): Homolog of NCBI NO: 15234248 NR Description: cytochrome P450 - like protein; protein id: [Arabidopsis thaliana] >gi|7484900|pir||T05876 cytochrome P450

SEQ ID NO: 17225 - protein, 371 aa, Zea mays subsp. mays; identical to SEQ ID NO: 4316
  peptide (1)..(371): Ceres Seq. ID no. 12406510
  misc_feature (1)..(353): Homolog of NCBI NO: 34895168 NR Description: putative cytochrome P450 [Oryza sativa (japonica group)] >gi|21104826|dbj|BAB93411.1| putative cytochrome P450
  misc_feature (1)..(353): Homolog of NCBI NO: 34913354 NR Description: putative cytochrome P450 [Oryza sativa (japonica group)] >gi|22293694|dbj|BAC10039.1| putative cytochrome P450
  misc_feature (1)..(353): Homolog of NCBI NO: 38112707 NR Description: cytochrome P450 [Triticum aestivum]
  misc_feature (1)..(353): Homolog of NCBI NO: 22324446 NR Description: putative cytochrome P450 [Oryza sativa (japonica
  misc_feature (1)..(353): Homolog of NCBI NO: 34913346 NR Description: putative cytochrome P450 [Oryza sativa (japonica group)] >gi|22093840|dbj|BAC07127.1| putative cytochrome P450
  misc_feature (1)..(353): Homolog of NCBI NO: 34913362 NR Description: putative cytochrome P450 [Oryza sativa (japonica group)] >gi|22293698|dbj|BAC10043.1| putative cytochrome P450
  misc_feature (1)..(345): Homolog of NCBI NO: 34896952 NR Description: putative cytochrome P450-related protein [Oryza
  misc_feature (1)..(353): Homolog of NCBI NO: 14719280 NR Description: cytochrome P450 [Zea mays]
  misc_feature (1)..(345): Homolog of NCBI NO: 15226472 NR Description: cytochrome p450, putative; protein id: [Arabidopsis thaliana] >gi|7430708|pir||T02192 probable
  misc_feature (1)..(345): Homolog of NCBI NO: 15234248 NR Description: cytochrome P450 - like protein; protein id: [Arabidopsis thaliana] >gi|7484900|pir||T05876 cytochrome P450

SEQ ID NO: 17226 - protein, 319 aa, Zea mays subsp. mays; identical to SEQ ID NO: 4317
  peptide (1)..(319): Ceres Seq. ID no. 12406511
  misc_feature (1)..(301): Homolog of NCBI NO: 34895168 NR Description: putative cytochrome P450 [Oryza sativa (japonica group)] >gi|21104826|dbj|BAB93411.1| putative cytochrome P450
  misc_feature (1)..(301): Homolog of NCBI NO: 34913354 NR Description: putative cytochrome P450 [Oryza sativa (japonica group)] >gi|22293694|dbj|BAC10039.1| putative cytochrome P450
  misc_feature (1)..(301): Homolog of NCBI NO: 38112707 NR Description: cytochrome P450 [Triticum aestivum]
  misc_feature (1)..(301): Homolog of NCBI NO: 22324446 NR Description: putative cytochrome P450 [Oryza sativa (japonica
  misc_feature (1)..(301): Homolog of NCBI NO: 34913346 NR Description: putative cytochrome P450 [Oryza sativa (japonica group)] >gi|22093840|dbj|BAC07127.1| putative cytochrome P450
  misc_feature (1)..(301): Homolog of NCBI NO: 34913362 NR Description: putative cytochrome P450 [Oryza sativa (japonica group)] >gi|22293698|dbj|BAC10043.1| putative cytochrome P450
  misc_feature (1)..(293): Homolog of NCBI NO: 34896952 NR Description: putative cytochrome P450-related protein [Oryza
  misc_feature (1)..(301): Homolog of NCBI NO: 14719280 NR Description: cytochrome P450 [Zea mays]
  misc_feature (1)..(293): Homolog of NCBI NO: 15226472 NR Description: cytochrome p450, putative; protein id: [Arabidopsis thaliana] >gi|7430708|pir||T02192 probable
  misc_feature (1)..(293): Homolog of NCBI NO: 15234248 NR Description: cytochrome P450 - like protein; protein id: [Arabidopsis thaliana] >gi|7484900|pir||T05876 cytochrome P450

SEQ ID NO: 17227 - DNA, 477 bp, Zea mays subsp. mays
  misc_feature (1)..(477): Ceres Seq. ID no. 1671513
  misc_feature: MA Experiment ID: 108527 Result: Up-regulated in Transcription
  misc_feature: MA Experiment 108527 PARAMETER Experiment Name: Zm_5mM_NO_P Parameter: Age (day) Value: 8
  misc_feature: MA Experiment 108527 PARAMETER Experiment Name: Zm_5mM_NO_P Parameter: Organism Value: Zea mays
  misc_feature: MA Experiment 108527 PARAMETER Experiment Name: Zm_5mM_NO_P Parameter: Plant Line Value: 35A19
  misc_feature: MA Experiment 108527 PARAMETER Experiment Name: Zm_5mM_NO_P Parameter: Timepoint (hr) Value: 6
  misc_feature: MA Experiment 108527 PARAMETER Experiment Name: Zm_5mM_NO_P Parameter: Tissue Value: Aerial
  misc_feature: MA Experiment 108527 PARAMETER Experiment Name: Zm_5mM_NO_P Parameter: Treatment Value: 5mM NO vs. No Treatment
  misc_feature: MA Experiment ID: 20000478 Result: Up-regulated in Transcription
  misc_feature: MA Experiment 20000478 PARAMETER Experiment Name: Zm_5mM_SA_P Parameter: Age (day) Value: 11
  misc_feature: MA Experiment 20000478 PARAMETER Experiment Name: Zm_5mM_SA_P Parameter: Organism Value: Zea mays
  misc_feature: MA Experiment 20000478 PARAMETER Experiment Name: Zm_5mM_SA_P Parameter: Plant Line Value: 35A19
  misc_feature: MA Experiment 20000478 PARAMETER Experiment Name: Zm_5mM_SA_P Parameter: Timepoint (hr) Value: 72
  misc_feature: MA Experiment 20000478 PARAMETER Experiment Name: Zm_5mM_SA_P Parameter: Tissue Value: Aerial
  misc_feature: MA Experiment 20000478 PARAMETER Experiment Name: Zm_5mM_SA_P Parameter: Treatment Value: 5mM SA vs. No Treatment
agagcagaagcaaagcgagcaacagagcaaagctaagcacagagctagcaagtgaccgaccgagagcaaacaggcaaggcaagatggtgcaacagcaagccgcgaaggaggtgatcccgctgctgacgccttacaagatggggcagttcgagctctctcaccgggtggtgctggcgccgctgacgaggtgccgctcctacggcaacgtgccgcagccacacgccgccgtgtactactcgcagcgcgccaccaggggtggcctgctcatcgcggaggccacgggggtgtcggccaccgcgcaggggttcccggagtctcctggcatctggacgcaggagcaggtcgaggcgtggaagcccatcgtcgacgccgtccaccgcaagggcgccatcttcgtctgccagatctggcatgtgggcagggtctccaccaacgagctccagcccaacggcgacgcgccctatctcgagcacggac

SEQ ID NO: 17228 - protein, 158 aa, Zea mays subsp. mays
  peptide (1)..(158): Ceres Seq. ID no. 1671514
  misc_feature (39)..(153): Pfam Name: NADH:flavin oxidoreductase / NADH oxidase family Pfam Description: NADH:flavin oxidoreductase / NADH oxidase family
  misc_feature (27)..(153): Homolog of NCBI NO: 15223140 NR Description: 12-oxophytodienoate reductase (OPR2); protein id:
  misc_feature (38)..(154): Homolog of NCBI NO: 40645459 NR Description: LEDI-5c protein [Lithospermum erythrorhizon]
  misc_feature (38)..(153): Homolog of NCBI NO: 40645353 NR Description: hypothetical protein [Pisum sativum]
  misc_feature (27)..(153): Homolog of NCBI NO: 40645349 NR Description: hypothetical protein [Pisum sativum]
  misc_feature (38)..(153): Homolog of NCBI NO: 40645351 NR Description: hypothetical protein [Pisum sativum]
  misc_feature (36)..(153): Homolog of NCBI NO: 7449902 NR Description: probable 12-oxophytodienoate reductase (EC
  misc_feature (38)..(153): Homolog of NCBI NO: 40645345 NR Description: hypothetical protein [Pisum sativum]
  misc_feature (34)..(153): Homolog of NCBI NO: 21593388 NR Description: 12-oxophytodienoate reductase (OPR1) [Arabidopsis
  misc_feature (34)..(153): Homolog of NCBI NO: 15223138 NR Description: 12-oxophytodienoate reductase (OPR1)
  misc_feature (33)..(153): Homolog of NCBI NO: 23495288 NR Description: 12-oxophytodienoic acid reductase [Oryza sativa]
SRSKASNRAKLSTELASDRPRANRQGKMVQQQAAKEVIPLLTPYKMGQFELSHRVVLAPLTRCRSYGNVPQPHAAVYYSQRATRGGLLIAEATGVSATAQGFPESPGIWTQEQVEAWKPIVDAVHRKGAIFVCQIWHVGRVSTNELQPNGDAPYLEHG

SEQ ID NO: 17229 - protein, 131 aa, Zea mays subsp. mays
  peptide (1)..(131): Ceres Seq. ID no. 1671515
  misc_feature (12)..(126): Pfam Name: NADH:flavin oxidoreductase / NADH oxidase family Pfam Description: NADH:flavin oxidoreductase / NADH oxidase family
  misc_feature (1)..(126): Homolog of NCBI NO: 15223140 NR Description: 12-oxophytodienoate reductase (OPR2); protein id:
  misc_feature (11)..(127): Homolog of NCBI NO: 40645459 NR Description: LEDI-5c protein [Lithospermum erythrorhizon]
  misc_feature (11)..(126): Homolog of NCBI NO: 40645353 NR Description: hypothetical protein [Pisum sativum]
  misc_feature (1)..(126): Homolog of NCBI NO: 40645349 NR Description: hypothetical protein [Pisum sativum]
  misc_feature (11)..(126): Homolog of NCBI NO: 40645351 NR Description: hypothetical protein [Pisum sativum]
  misc_feature (9)..(126): Homolog of NCBI NO: 7449902 NR Description: probable 12-oxophytodienoate reductase (EC
  misc_feature (11)..(126): Homolog of NCBI NO: 40645345 NR Description: hypothetical protein [Pisum sativum]
  misc_feature (7)..(126): Homolog of NCBI NO: 21593388 NR Description: 12-oxophytodienoate reductase (OPR1) [Arabidopsis
  misc_feature (7)..(126): Homolog of NCBI NO: 15223138 NR Description: 12-oxophytodienoate reductase (OPR1)
  misc_feature (6)..(126): Homolog of NCBI NO: 23495288 NR Description: 12-oxophytodienoic acid reductase [Oryza sativa]
MVQQQAAKEVIPLLTPYKMGQFELSHRVVLAPLTRCRSYGNVPQPHAAVYYSQRATRGGLLIAEATGVSATAQGFPESPGIWTQEQVEAWKPIVDAVHRKGAIFVCQIWHVGRVSTNELQPNGDAPYLEHG

SEQ ID NO: 17230 - protein, 113 aa, Zea mays subsp. mays
  peptide (1)..(113): Ceres Seq. ID no. 1671516
  misc_feature (1)..(108): Pfam Name: NADH:flavin oxidoreductase / NADH oxidase family Pfam Description: NADH:flavin oxidoreductase / NADH oxidase family
  misc_feature (1)..(108): Homolog of NCBI NO: 15223140 NR Description: 12-oxophytodienoate reductase (OPR2); protein id:
  misc_feature (1)..(109): Homolog of NCBI NO: 40645459 NR Description: LEDI-5c protein [Lithospermum erythrorhizon]
  misc_feature (1)..(108): Homolog of NCBI NO: 40645353 NR Description: hypothetical protein [Pisum sativum]
  misc_feature (1)..(108): Homolog of NCBI NO: 40645349 NR Description: hypothetical protein [Pisum sativum]
  misc_feature (1)..(108): Homolog of NCBI NO: 40645351 NR Description: hypothetical protein [Pisum sativum]
  misc_feature (1)..(108): Homolog of NCBI NO: 7449902 NR Description: probable 12-oxophytodienoate reductase (EC
  misc_feature (1)..(108): Homolog of NCBI NO: 40645345 NR Description: hypothetical protein [Pisum sativum]
  misc_feature (1)..(108): Homolog of NCBI NO: 21593388 NR Description: 12-oxophytodienoate reductase (OPR1) [Arabidopsis
  misc_feature (1)..(108): Homolog of NCBI NO: 15223138 NR Description: 12-oxophytodienoate reductase (OPR1)
  misc_feature (1)..(108): Homolog of NCBI NO: 23495288 NR Description: 12-oxophytodienoic acid reductase [Oryza sativa]
MGQFELSHRVVLAPLTRCRSYGNVPQPHAAVYYSQRATRGGLLIAEATGVSATAQGFPESPGIWTQEQVEAWKPIVDAVHRKGAIFVCQIWHVGRVSTNELQPNGDAPYLEHG

SEQ ID NO: 17231 - DNA, 830 bp, Zea mays subsp. mays
  misc_feature (1)..(830): Ceres Seq. ID no. 12417611
  misc_feature: MA Experiment ID: 108504 Result: Up-regulated in Transcription
  misc_feature: MA Experiment 108504 PARAMETER Experiment Name: Zm_Drought_P Parameter: Age (day) Value: 8
  misc_feature: MA Experiment 108504 PARAMETER Experiment Name: Zm_Drought_P Parameter: Organism Value: Zea mays
  misc_feature: MA Experiment 108504 PARAMETER Experiment Name: Zm_Drought_P Parameter: Plant Line Value: 35A19
  misc_feature: MA Experiment 108504 PARAMETER Experiment Name: Zm_Drought_P Parameter: Timepoint (hr) Value: 12
  misc_feature: MA Experiment 108504 PARAMETER Experiment Name: Zm_Drought_P Parameter: Tissue Value: Aerial
  misc_feature: MA Experiment 108504 PARAMETER Experiment Name: Zm_Drought_P Parameter: Treatment Value: Drought vs. No Drought
  misc_feature: MA Experiment ID: 108543 Result: Up-regulated in Transcription
  misc_feature: MA Experiment ID: 108597 Result: Up-regulated in Transcription
  misc_feature: MA Experiment 108597 PARAMETER Experiment Name: Zm_100uM_ABA_P Parameter: Age (day) Value: 9
  misc_feature: MA Experiment 108597 PARAMETER Experiment Name: Zm_100uM_ABA_P Parameter: Organism Value: Zea mays
  misc_feature: MA Experiment 108597 PARAMETER Experiment Name: Zm_100uM_ABA_P Parameter: Plant Line Value: 35A19
  misc_feature: MA Experiment 108597 PARAMETER Experiment Name: Zm_100uM_ABA_P Parameter: Timepoint (hr) Value: 24
  misc_feature: MA Experiment 108597 PARAMETER Experiment Name: Zm_100uM_ABA_P Parameter: Tissue Value: Aerial
  misc_feature: MA Experiment 108597 PARAMETER Experiment Name: Zm_100uM_ABA_P Parameter: Treatment Value: 100uM ABA vs. No Treatment
  misc_feature: MA Experiment ID: 108689 Result: Up-regulated in Transcription
  misc_feature: MA Experiment 108689 PARAMETER Experiment Name: Zm_Drought_Roots_P Parameter: Age (day) Value: 9
  misc_feature: MA Experiment 108689 PARAMETER Experiment Name: Zm_Drought_Roots_P Parameter: Organism Value: Zea mays
  misc_feature: MA Experiment 108689 PARAMETER Experiment Name: Zm_Drought_Roots_P Parameter: Plant Line Value: 35A19
  misc_feature: MA Experiment 108689 PARAMETER Experiment Name: Zm_Drought_Roots_P Parameter: Timepoint (hr) Value: 24
  misc_feature: MA Experiment 108689 PARAMETER Experiment Name: Zm_Drought_Roots_P Parameter: Tissue Value: Roots
  misc_feature: MA Experiment 108689 PARAMETER Experiment Name: Zm_Drought_Roots_P Parameter: Treatment Value: Drought vs. No Drought
accgatcccattccccaggcccaagcgcccatggatcccaagcccgacgccagcgcgcccgccgcggtgccagcggagcacgcggcgtacccgaggctgtcaccggaggacatcgccccgccgccgccgcctgtcgtgccgccgtccggcgccaacccctacgtgctctccgccccgtcgcctaacccgcccgccaagagcgctagggagaatctgagggagatgttcggcatggtggggaagaagttcaacgaggccgcgcgcaagaccgagggcatcgccggcgacgtctggcagcatctgaaaactggacccagcatcactgatactgccatggggaggattgctcagatatccaaggttatatctgagggtgtctacgacaagatatttcagcagacttttgagtgctcgcctgatgagaagctcaacaaggcatatgtgtgctacctatcaacgtcgcatggaccaatcatgggcgtcctgtatctctcgactgtcaagattgcattcggtagcgacagccctgtgaaatatgtgactgaggacaacaaaactgagtcatccttttataaggttgttttaccccttcatcacctgagatcagttactcccacagcaagtcagcaaaaccctgcagagaggtacattcaggtcgtttcagtcgacaaccacgagttctggttcatgggtttcgtgaactatgatagcgctgtaaagaatcttcaggagtctgttcgagttgttcacggggcctagaggttgcccatcacttttcctctatgtggatgtagtatgcccgtgtaaatgtatttgtgcatggcacctgt

SEQ ID NO: 17232 - protein, 252 aa, Zea mays subsp. mays
  peptide (1)..(252): Ceres Seq. ID no. 12417612
  misc_feature (31)..(170): Pfam Name: Ribonuclease (pollen allergen) Pfam Description: Ribonuclease (pollen allergen)
  misc_feature (193)..(247): Homolog of NCBI NO: 15236123 NR Description: putative protein; protein id: At4g40100.1
  misc_feature (31)..(164): Homolog of NCBI NO: 15236123 NR Description: putative protein; protein id: At4g40100.1
  misc_feature (17)..(247): Homolog of NCBI NO: 29788871 NR Description: putative ABA-responsive protein
  misc_feature (112)..(247): Homolog of NCBI NO: 33146631 NR Description: putative FH protein interacting protein FIP1
  misc_feature (49)..(247): Homolog of NCBI NO: 26452129 NR Description: unknown protein [Arabidopsis thaliana]
  misc_feature (49)..(247): Homolog of NCBI NO: 21592789 NR Description: unknown [Arabidopsis thaliana]
  misc_feature (49)..(247): Homolog of NCBI NO: 18399985 NR Description: Expressed protein
  misc_feature (16)..(251): Homolog of NCBI NO: 15217869 NR Description: FH protein interacting protein FIP1
  misc_feature (13)..(247): Homolog of NCBI NO: 34902414 NR Description: Putative FH protein interacting protein FIP1
  misc_feature (3)..(247): Homolog of NCBI NO: 34906818 NR Description: contains EST C91668(E31216)~similar to FH protein
TDPIPQAQAPMDPKPDASAPAAVPAEHAAYPRLSPEDIAPPPPPVVPPSGANPYVLSAPSPNPPAKSARENLREMFGMVGKKFNEAARKTEGIAGDVWQHLKTGPSITDTAMGRIAQISKVISEGVYDKIFQQTFECSPDEKLNKAYVCYLSTSHGPIMGVLYLSTVKIAFGSDSPVKYVTEDNKTESSFYKVVLPLHHLRSVTPTASQQNPAERYIQVVSVDNHEFWFMGFVNYDSAVKNLQESVRVVHGA

SEQ ID NO: 17233 - protein, 242 aa, Zea mays subsp. mays
  peptide (1)..(242): Ceres Seq. ID no. 12417613
  misc_feature (21)..(160): Pfam Name: Ribonuclease (pollen allergen) Pfam Description: Ribonuclease (pollen allergen)
  misc_feature (183)..(237): Homolog of NCBI NO: 15236123 NR Description: putative protein; protein id: At4g40100.1
  misc_feature (21)..(154): Homolog of NCBI NO: 15236123 NR Description: putative protein; protein id: At4g40100.1
  misc_feature (7)..(237): Homolog of NCBI NO: 29788871 NR Description: putative ABA-responsive protein
  misc_feature (102)..(237): Homolog of NCBI NO: 33146631 NR Description: putative FH protein interacting protein FIP1
  misc_feature (39)..(237): Homolog of NCBI NO: 26452129 NR Description: unknown protein [Arabidopsis thaliana]
  misc_feature (39)..(237): Homolog of NCBI NO: 21592789 NR Description: unknown [Arabidopsis thaliana]
  misc_feature (39)..(237): Homolog of NCBI NO: 18399985 NR Description: Expressed protein
  misc_feature (6)..(241): Homolog of NCBI NO: 15217869 NR Description: FH protein interacting protein FIP1
  misc_feature (3)..(237): Homolog of NCBI NO: 34902414 NR Description: Putative FH protein interacting protein FIP1
  misc_feature (1)..(237): Homolog of NCBI NO: 34906818 NR Description: contains EST C91668(E31216)~similar to FH protein
MDPKPDASAPAAVPAEHAAYPRLSPEDIAPPPPPVVPPSGANPYVLSAPSPNPPAKSARENLREMFGMVGKKFNEAARKTEGIAGDVWQHLKTGPSITDTAMGRIAQISKVISEGVYDKIFQQTFECSPDEKLNKAYVCYLSTSHGPIMGVLYLSTVKIAFGSDSPVKYVTEDNKTESSFYKVVLPLHHLRSVTPTASQQNPAERYIQVVSVDNHEFWFMGFVNYDSAVKNLQESVRVVHGA

SEQ ID NO: 17234 - protein, 178 aa, Zea mays subsp. mays
  peptide (1)..(178): Ceres Seq. ID no. 12417614
  misc_feature (1)..(96): Pfam Name: Ribonuclease (pollen allergen) Pfam Description: Ribonuclease (pollen allergen)
  misc_feature (119)..(173): Homolog of NCBI NO: 15236123 NR Description: putative protein; protein id: At4g40100.1
  misc_feature (1)..(90): Homolog of NCBI NO: 15236123 NR Description: putative protein; protein id: At4g40100.1
  misc_feature (1)..(173): Homolog of NCBI NO: 29788871 NR Description: putative ABA-responsive protein
  misc_feature (38)..(173): Homolog of NCBI NO: 33146631 NR Description: putative FH protein interacting protein FIP1
  misc_feature (1)..(173): Homolog of NCBI NO: 26452129 NR Description: unknown protein [Arabidopsis thaliana]
  misc_feature (1)..(173): Homolog of NCBI NO: 21592789 NR Description: unknown [Arabidopsis thaliana]
  misc_feature (1)..(173): Homolog of NCBI NO: 18399985 NR Description: Expressed protein
  misc_feature (1)..(177): Homolog of NCBI NO: 15217869 NR Description: FH protein interacting protein FIP1
  misc_feature (1)..(173): Homolog of NCBI NO: 34902414 NR Description: Putative FH protein interacting protein FIP1
  misc_feature (1)..(173): Homolog of NCBI NO: 34906818 NR Description: contains EST C91668(E31216)~similar to FH protein
MFGMVGKKFNEAARKTEGIAGDVWQHLKTGPSITDTAMGRIAQISKVISEGVYDKIFQQTFECSPDEKLNKAYVCYLSTSHGPIMGVLYLSTVKIAFGSDSPVKYVTEDNKTESSFYKVVLPLHHLRSVTPTASQQNPAERYIQVVSVDNHEFWFMGFVNYDSAVKNLQESVRVVHGA

SEQ ID NO: 17235 - DNA, 2036 bp, Zea mays subsp. mays
  misc_feature (1)..(2036): Ceres Seq. ID no. 12368221
  misc_feature: MA Experiment ID: 108527 Result: Down-regulated in Transcription
  misc_feature: MA Experiment 108527 PARAMETER Experiment Name: Zm_5mM_NO_P Parameter: Age (day) Value: 8
  misc_feature: MA Experiment 108527 PARAMETER Experiment Name: Zm_5mM_NO_P Parameter: Organism Value: Zea mays
  misc_feature: MA Experiment 108527 PARAMETER Experiment Name: Zm_5mM_NO_P Parameter: Plant Line Value: 35A19
  misc_feature: MA Experiment 108527 PARAMETER Experiment Name: Zm_5mM_NO_P Parameter: Timepoint (hr) Value: 6
  misc_feature: MA Experiment 108527 PARAMETER Experiment Name: Zm_5mM_NO_P Parameter: Tissue Value: Aerial
  misc_feature: MA Experiment 108527 PARAMETER Experiment Name: Zm_5mM_NO_P Parameter: Treatment Value: 5mM NO vs. No Treatment
  misc_feature: MA Experiment ID: 108535 Result: Down-regulated in Transcription
  misc_feature: MA Experiment 108535 PARAMETER Experiment Name: Zm_Meristem_P Parameter: Age (day) Value: 8
  misc_feature: MA Experiment 108535 PARAMETER Experiment Name: Zm_Meristem_P Parameter: Organism Value: Zea mays
  misc_feature: MA Experiment 108535 PARAMETER Experiment Name: Zm_Meristem_P Parameter: Plant Line Value: 35A19
  misc_feature: MA Experiment 108535 PARAMETER Experiment Name: Zm_Meristem_P Parameter: Tissue Value: Root Meristem vs. Above Root Meristem
  misc_feature: MA Experiment ID: 108536 Result: Up-regulated in Transcription
  misc_feature: MA Experiment 108536 PARAMETER Experiment Name: Zm_Meristem_P Parameter: Age (day) Value: 8
  misc_feature: MA Experiment 108536 PARAMETER Experiment Name: Zm_Meristem_P Parameter: Organism Value: Zea mays
  misc_feature: MA Experiment 108536 PARAMETER Experiment Name: Zm_Meristem_P Parameter: Plant Line Value: 35A19
  misc_feature: MA Experiment 108536 PARAMETER Experiment Name: Zm_Meristem_P Parameter: Tissue Value: Shoot Meristem vs. Above Shoot Meristem
  misc_feature: MA Experiment ID: 108543 Result: Up-regulated in Transcription
  misc_feature: MA Experiment ID: 108556 Result: Down-regulated in Transcription
  misc_feature: MA Experiment 108556 PARAMETER Experiment Name: Zm_Drought_P Parameter: Age (day) Value: 9
  misc_feature: MA Experiment 108556 PARAMETER Experiment Name: Zm_Drought_P Parameter: Organism Value: Zea mays
  misc_feature: MA Experiment 108556 PARAMETER Experiment Name: Zm_Drought_P Parameter: Plant Line Value: 35A19
  misc_feature: MA Experiment 108556 PARAMETER Experiment Name: Zm_Drought_P Parameter: Timepoint (hr) Value: 24
  misc_feature: MA Experiment 108556 PARAMETER Experiment Name: Zm_Drought_P Parameter: Tissue Value: Aerial
  misc_feature: MA Experiment 108556 PARAMETER Experiment Name: Zm_Drought_P Parameter: Treatment Value: Drought vs. No Drought
  misc_feature: MA Experiment ID: 108559 Result: Down-regulated in Transcription
  misc_feature: MA Experiment 108559 PARAMETER Experiment Name: Zm_5mM_NO_P Parameter: Age (day) Value: 8
  misc_feature: MA Experiment 108559 PARAMETER Experiment Name: Zm_5mM_NO_P Parameter: Organism Value: Zea mays
  misc_feature: MA Experiment 108559 PARAMETER Experiment Name: Zm_5mM_NO_P Parameter: Plant Line Value: 35A19
  misc_feature: MA Experiment 108559 PARAMETER Experiment Name: Zm_5mM_NO_P Parameter: Timepoint (hr) Value: 12
  misc_feature: MA Experiment 108559 PARAMETER Experiment Name: Zm_5mM_NO_P Parameter: Tissue Value: Aerial
  misc_feature: MA Experiment 108559 PARAMETER Experiment Name: Zm_5mM_NO_P Parameter: Treatment Value: 5mM NO vs. No Treatment
  misc_feature: MA Experiment ID: 108597 Result: Down-regulated in Transcription
  misc_feature: MA Experiment 108597 PARAMETER Experiment Name: Zm_100uM_ABA_P Parameter: Age (day) Value: 9
  misc_feature: MA Experiment 108597 PARAMETER Experiment Name: Zm_100uM_ABA_P Parameter: Organism Value: Zea mays
  misc_feature: MA Experiment 108597 PARAMETER Experiment Name: Zm_100uM_ABA_P Parameter: Plant Line Value: 35A19
  misc_feature: MA Experiment 108597 PARAMETER Experiment Name: Zm_100uM_ABA_P Parameter: Timepoint (hr) Value: 24
  misc_feature: MA Experiment 108597 PARAMETER Experiment Name: Zm_100uM_ABA_P Parameter: Tissue Value: Aerial
  misc_feature: MA Experiment 108597 PARAMETER Experiment Name: Zm_100uM_ABA_P Parameter: Treatment Value: 100uM ABA vs. No Treatment
  misc_feature: MA Experiment ID: 20000477 Result: Down-regulated in Transcription
  misc_feature: MA Experiment 20000477 PARAMETER Experiment Name: Zm_5mM_SA_P Parameter: Age (day) Value: 10
  misc_feature: MA Experiment 20000477 PARAMETER Experiment Name: Zm_5mM_SA_P Parameter: Organism Value: Zea mays
  misc_feature: MA Experiment 20000477 PARAMETER Experiment Name: Zm_5mM_SA_P Parameter: Plant Line Value: 35A19
  misc_feature: MA Experiment 20000477 PARAMETER Experiment Name: Zm_5mM_SA_P Parameter: Timepoint (hr) Value: 48
  misc_feature: MA Experiment 20000477 PARAMETER Experiment Name: Zm_5mM_SA_P Parameter: Tissue Value: Aerial
  misc_feature: MA Experiment 20000477 PARAMETER Experiment Name: Zm_5mM_SA_P Parameter: Treatment Value: 5mM SA vs. No Treatment
  misc_feature: MA Experiment ID: 20000478 Result: Down-regulated in Transcription
  misc_feature: MA Experiment 20000478 PARAMETER Experiment Name: Zm_5mM_SA_P Parameter: Age (day) Value: 11
  misc_feature: MA Experiment 20000478 PARAMETER Experiment Name: Zm_5mM_SA_P Parameter: Organism Value: Zea mays
  misc_feature: MA Experiment 20000478 PARAMETER Experiment Name: Zm_5mM_SA_P Parameter: Plant Line Value: 35A19
  misc_feature: MA Experiment 20000478 PARAMETER Experiment Name: Zm_5mM_SA_P Parameter: Timepoint (hr) Value: 72
  misc_feature: MA Experiment 20000478 PARAMETER Experiment Name: Zm_5mM_SA_P Parameter: Tissue Value: Aerial
  misc_feature: MA Experiment 20000478 PARAMETER Experiment Name: Zm_5mM_SA_P Parameter: Treatment Value: 5mM SA vs. No Treatment
  misc_feature: MA Experiment ID: 20000479 Result: Down-regulated in Transcription
  misc_feature: MA Experiment 20000479 PARAMETER Experiment Name: Zm_Drought_P Parameter: Age (day) Value: 10
  misc_feature: MA Experiment 20000479 PARAMETER Experiment Name: Zm_Drought_P Parameter: Organism Value: Zea mays
  misc_feature: MA Experiment 20000479 PARAMETER Experiment Name: Zm_Drought_P Parameter: Plant Line Value: 35A19
  misc_feature: MA Experiment 20000479 PARAMETER Experiment Name: Zm_Drought_P Parameter: Timepoint (hr) Value: 48
  misc_feature: MA Experiment 20000479 PARAMETER Experiment Name: Zm_Drought_P Parameter: Tissue Value: Aerial
  misc_feature: MA Experiment 20000479 PARAMETER Experiment Name: Zm_Drought_P Parameter: Treatment Value: Drought vs. No Drought
  misc_feature: MA Experiment ID: 20000480 Result: Down-regulated in Transcription
  misc_feature: MA Experiment 20000480 PARAMETER Experiment Name: Zm_Drought_P Parameter: Age (day) Value: 11
  misc_feature: MA Experiment 20000480 PARAMETER Experiment Name: Zm_Drought_P Parameter: Organism Value: Zea mays
  misc_feature: MA Experiment 20000480 PARAMETER Experiment Name: Zm_Drought_P Parameter: Plant Line Value: 35A19
  misc_feature: MA Experiment 20000480 PARAMETER Experiment Name: Zm_Drought_P Parameter: Timepoint (hr) Value: 72
  misc_feature: MA Experiment 20000480 PARAMETER Experiment Name: Zm_Drought_P Parameter: Tissue Value: Aerial
  misc_feature: MA Experiment 20000480 PARAMETER Experiment Name: Zm_Drought_P Parameter: Treatment Value: Drought vs. No Drought
  misc_feature: MA Experiment ID: 20000492 Result: Down-regulated in Transcription
  misc_feature: MA Experiment 20000492 PARAMETER Experiment Name: Zm_Hybrid_Seed_Dev_P Parameter: DAP Value: 12
  misc_feature: MA Experiment 20000492 PARAMETER Experiment Name: Zm_Hybrid_Seed_Dev_P Parameter: Organism Value: Zea mays
  misc_feature: MA Experiment 20000492 PARAMETER Experiment Name: Zm_Hybrid_Seed_Dev_P Parameter: Plant Line Value: 35A19
  misc_feature: MA Experiment 20000492 PARAMETER Experiment Name: Zm_Hybrid_Seed_Dev_P Parameter: Tissue Value: Fert Kernel vs. Unfert Floret
  misc_feature: MA Experiment ID: 20000535 Result: Down-regulated in Transcription
  misc_feature: MA Experiment 20000535 PARAMETER Experiment Name: Zm_Hybrid_Seed_Dev_P Parameter: DAP Value: 30 vs. 12
  misc_feature: MA Experiment 20000535 PARAMETER Experiment Name: Zm_Hybrid_Seed_Dev_P Parameter: Organism Value: Zea mays
  misc_feature: MA Experiment 20000535 PARAMETER Experiment Name: Zm_Hybrid_Seed_Dev_P Parameter: Plant Line Value: 35A19
  misc_feature: MA Experiment 20000535 PARAMETER Experiment Name: Zm_Hybrid_Seed_Dev_P Parameter: Tissue Value: Embryo vs. Unfert Floret
gcacgagaccattacctagaacatcctaatcgaaaaaattatgatccttcttttcgtttgttcttatgccattgtttggccacaagcggtggggtatcgatctgaaatagttggacggcatccctgattccaccctgatcgatcccatggatgcccaagacgacgatgagaggccgctgatcatccatcgcctgccactactccaggatgaaagtacttccggattcactagcgacgggacggttgatcttcgcaatcagcctgcccggaagcagagaactgggaactggagagcatgcttcttcatcttaggtgccgagttcgctgaatgtgtggccttcttcgcgatctcaaagaacctggtgacgtacctcacgggcgttctgcacgagagcaacgttgacgccgcgacgactgtgtccacctggatcgggacctcgttcttcacggccgctcgtcggcgcgttcttggccgacacattctgggggcgatactggacgatactggccttcctctccgtgtacgtcacggggatgacggtcctgactgcttcagctcttctcccgctgctcatgggcgcgtcctacagccgtagcgcccaccgcctctccgcgtacctgggcctctacctcgccgctctcggcaccggcggaatcaagccgtgcgtctgcgcgctcggtgccgaccagttcgacgcgtctgaccccgtggagcggcgggccaagggctccttcttcaactggtactacttctccatcaacatcggctccctgctgtccgcgacggtggtcgtctgggtgcaggacaacgttgggtggggagtcgggttcgcgatcccgaccctgctcatgctgtcgggactcgtgctgttcgtcgccggtaggaaggtttacaggtaccagagagtgggagggagccctctgacaagagcctcgcaggtggtggttgctgctgtcaggaactaccgtttggtgctgcctgagcctgacgacagctcggcggccctgctgcatcaggcgcctcccggaaccacggaaggaaattattccacgatgcagcatacgagtcaattcaggttccttgacaaggctgccattgtagcggcatcctccggcgagaaaggagcgacggcaagcccatggcggctctgcacggtctcccaggtcgaggagctgaagacggtgctgcggatgttccccgtgtgggtgtcgatggtgctcttcttcgcggccaccgcgcagatgtcgtccaccttcatcgagcaaggcgagaccatagacaaccgcgtggggccgttcaccgtgccgccggcgtccctctccaccttcgacgtcatcagcgtcatggtctgcatacccatctacgacaaagcgctggtgccgctggcccggcgcgccacgggcaaggaacggggcctgtcgcagctgcagcggctgggcgtcggcctcgcgctgtccgtggccggcatggtgtacgcggcgctgctcgaggccaggcggctgtcgctcgcccgcgcagcggcgggcgggcggccgccgatgtccatcatgtggcaggcgccggcgttcgcggtgctcggcgcgggggaggtgttcgcgaccatcggcatcctcgagttcttctacgaccagtcgcccgacggcatgaagagcctcggcacggcccttgcgcagctcgccgtcgcggcaggcaactacttcaactctgccgtgctcgccgccgtcgccgccgtcaccacgcgcaacggggaggcaggatggatccccgacgacctggacaagggccacctcgactatttcttctggttcatggctgttctcggcgtggtgaacctgctgcacttcctgcattgctccgtcaggtacagaggcagcagcaacaacagcacatactcttcttgagtcttcacacgatctgtgccaagtatatgacaaaatgtcaacaaagagagatgtgcatcgaatttgttcacgaggcacagcaggatgcccgcattctccatttggcgtctccacaataataatgtgtccctgtg

SEQ ID NO: 17236 - protein, 455 aa, Zea mays subsp. mays
  peptide (1)..(455): Ceres Seq. ID no. 12368222
  misc_feature (1)..(383): Pfam Name: POT family Pfam Description: POT family
  misc_feature (1)..(444): Homolog of NCBI NO: 38567969 NR Description: OSJNBa0093F12.10 [Oryza sativa (japonica
  misc_feature (1)..(455): Homolog of NCBI NO: 15237369 NR Description: peptide transporter; protein id: At5g46040.1
  misc_feature (1)..(451): Homolog of NCBI NO: 1076331 NR Description: histidine transport protein - Arabidopsis
  misc_feature (1)..(451): Homolog of NCBI NO: 15226861 NR Description: histidine transport protein (PTR2-B)
  misc_feature (1)..(445): Homolog of NCBI NO: 34906908 NR Description: putative peptide transporter
  misc_feature (1)..(450): Homolog of NCBI NO: 15241147 NR Description: peptide transport protein-like; protein id:
  misc_feature (1)..(445): Homolog of NCBI NO: 4102839 NR Description: LeOPT1 [Lycopersicon esculentum]
  misc_feature (1)..(445): Homolog of NCBI NO: 15076661 NR Description: peptide transporter [Oryza sativa (japonica
  misc_feature (1)..(429): Homolog of NCBI NO: 37530496 NR Description: putative LeOPT1 - oligopeptide transporter
  misc_feature (1)..(455): Homolog of NCBI NO: 37530498 NR Description: putative LeOPT1 - oligopeptide transporter
MTVLTASALLPLLMGASYSRSAHRLSAYLGLYLAALGTGGIKPCVCALGADQFDASDPVERRAKGSFFNWYYFSINIGSLLSATVVVWVQDNVGWGVGFAIPTLLMLSGLVLFVAGRKVYRYQRVGGSPLTRASQVVVAAVRNYRLVLPEPDDSSAALLHQAPPGTTEGNYSTMQHTSQFRFLDKAAIVAASSGEKGATASPWRLCTVSQVEELKTVLRMFPVWVSMVLFFAATAQMSSTFIEQGETIDNRVGPFTVPPASLSTFDVISVMVCIPIYDKALVPLARRATGKERGLSQLQRLGVGLALSVAGMVYAALLEARRLSLARAAAGGRPPMSIMWQAPAFAVLGAGEVFATIGILEFFYDQSPDGMKSLGTALAQLAVAAGNYFNSAVLAAVAAVTTRNGEAGWIPDDLDKGHLDYFFWFMAVLGVVNLLHFLHCSVRYRGSSNNSTYSS

SEQ ID NO: 17237 - protein, 442 aa, Zea mays subsp. mays
  peptide (1)..(442): Ceres Seq. ID no. 12368223
  misc_feature (1)..(370): Pfam Name: POT family Pfam Description: POT family
  misc_feature (1)..(432): Homolog of NCBI NO: 34906908 NR Description: putative peptide transporter
  misc_feature (1)..(437): Homolog of NCBI NO: 15241147 NR Description: peptide transport protein-like; protein id:
  misc_feature (1)..(431): Homolog of NCBI NO: 38567969 NR Description: OSJNBa0093F12.10 [Oryza sativa (japonica
  misc_feature (1)..(442): Homolog of NCBI NO: 15237369 NR Description: peptide transporter; protein id: At5g46040.1
  misc_feature (1)..(438): Homolog of NCBI NO: 1076331 NR Description: histidine transport protein - Arabidopsis
  misc_feature (1)..(438): Homolog of NCBI NO: 15226861 NR Description: histidine transport protein (PTR2-B)
  misc_feature (1)..(432): Homolog of NCBI NO: 4102839 NR Description: LeOPT1 [Lycopersicon esculentum]
  misc_feature (1)..(432): Homolog of NCBI NO: 15076661 NR Description: peptide transporter [Oryza sativa (japonica
  misc_feature (1)..(416): Homolog of NCBI NO: 37530496 NR Description: putative LeOPT1 - oligopeptide transporter
  misc_feature (1)..(442): Homolog of NCBI NO: 37530498 NR Description: putative LeOPT1 - oligopeptide transporter
MGASYSRSAHRLSAYLGLYLAALGTGGIKPCVCALGADQFDASDPVERRAKGSFFNWYYFSINIGSLLSATVVVWVQDNVGWGVGFAIPTLLMLSGLVLFVAGRKVYRYQRVGGSPLTRASQVVVAAVRNYRLVLPEPDDSSAALLHQAPPGTTEGNYSTMQHTSQFRFLDKAAIVAASSGEKGATASPWRLCTVSQVEELKTVLRMFPVWVSMVLFFAATAQMSSTFIEQGETIDNRVGPFTVPPASLSTFDVISVMVCIPIYDKALVPLARRATGKERGLSQLQRLGVGLALSVAGMVYAALLEARRLSLARAAAGGRPPMSIMWQAPAFAVLGAGEVFATIGILEFFYDQSPDGMKSLGTALAQLAVAAGNYFNSAVLAAVAAVTTRNGEAGWIPDDLDKGHLDYFFWFMAVLGVVNLLHFLHCSVRYRGSSNNSTYSS

SEQ ID NO: 17238 - protein, 350 aa, Zea mays subsp. mays
  peptide (1)..(350): Ceres Seq. ID no. 12368224
  misc_feature (1)..(278): Pfam Name: POT family Pfam Description: POT family
  misc_feature (1)..(340): Homolog of NCBI NO: 34906908 NR Description: putative peptide transporter
  misc_feature (1)..(345): Homolog of NCBI NO: 15241147 NR Description: peptide transport protein-like; protein id:
  misc_feature (1)..(339): Homolog of NCBI NO: 38567969 NR Description: OSJNBa0093F12.10 [Oryza sativa (japonica
  misc_feature (1)..(350): Homolog of NCBI NO: 15237369 NR Description: peptide transporter; protein id: At5g46040.1
  misc_feature (1)..(346): Homolog of NCBI NO: 1076331 NR Description: histidine transport protein - Arabidopsis
  misc_feature (1)..(346): Homolog of NCBI NO: 15226861 NR Description: histidine transport protein (PTR2-B)
  misc_feature (1)..(340): Homolog of NCBI NO: 4102839 NR Description: LeOPT1 [Lycopersicon esculentum]
  misc_feature (1)..(340): Homolog of NCBI NO: 15076661 NR Description: peptide transporter [Oryza sativa (japonica
  misc_feature (1)..(324): Homolog of NCBI NO: 37530496 NR Description: putative LeOPT1 - oligopeptide transporter
  misc_feature (1)..(350): Homolog of NCBI NO: 37530498 NR Description: putative LeOPT1 - oligopeptide transporter
MLSGLVLFVAGRKVYRYQRVGGSPLTRASQVVVAAVRNYRLVLPEPDDSSAALLHQAPPGTTEGNYSTMQHTSQFRFLDKAAIVAASSGEKGATASPWRLCTVSQVEELKTVLRMFPVWVSMVLFFAATAQMSSTFIEQGETIDNRVGPFTVPPASLSTFDVISVMVCIPIYDKALVPLARRATGKERGLSQLQRLGVGLALSVAGMVYAALLEARRLSLARAAAGGRPPMSIMWQAPAFAVLGAGEVFATIGILEFFYDQSPDGMKSLGTALAQLAVAAGNYFNSAVLAAVAAVTTRNGEAGWIPDDLDKGHLDYFFWFMAVLGVVNLLHFLHCSVRYRGSSNNSTYSS

SEQ ID NO: 17239 - DNA, 1095 bp, Zea mays subsp. mays
  misc_feature (1)..(1095): Ceres Seq. ID no. 12350695
  misc_feature: MA Experiment ID: 108522 Result: Down-regulated in Transcription
  misc_feature: MA Experiment 108522 PARAMETER Experiment Name: Zm_42deg_Heat_P Parameter: Age (day) Value: 8
  misc_feature: MA Experiment 108522 PARAMETER Experiment Name: Zm_42deg_Heat_P Parameter: Organism Value: Zea mays
  misc_feature: MA Experiment 108522 PARAMETER Experiment Name: Zm_42deg_Heat_P Parameter: Plant Line Value: 35A19
  misc_feature: MA Experiment 108522 PARAMETER Experiment Name: Zm_42deg_Heat_P Parameter: Temperature (deg C) Value: 42 vs. 22
  misc_feature: MA Experiment 108522 PARAMETER Experiment Name: Zm_42deg_Heat_P Parameter: Timepoint (hr) Value: 1
  misc_feature: MA Experiment 108522 PARAMETER Experiment Name: Zm_42deg_Heat_P Parameter: Tissue Value: Aerial
  misc_feature: MA Experiment ID: 108529 Result: Down-regulated in Transcription
  misc_feature: MA Experiment 108529 PARAMETER Experiment Name: Zm_Imbibed_Seeds_P Parameter: Age (day) Value: 5 vs. 2
  misc_feature: MA Experiment 108529 PARAMETER Experiment Name: Zm_Imbibed_Seeds_P Parameter: Organism Value: Zea mays
  misc_feature: MA Experiment 108529 PARAMETER Experiment Name: Zm_Imbibed_Seeds_P Parameter: Plant Line Value: 35A19
  misc_feature: MA Experiment 108529 PARAMETER Experiment Name: Zm_Imbibed_Seeds_P Parameter: Tissue Value: Roots vs. Embryo
  misc_feature: MA Experiment ID: 108535 Result: Up-regulated in Transcription
  misc_feature: MA Experiment 108535 PARAMETER Experiment Name: Zm_Meristem_P Parameter: Age (day) Value: 8
  misc_feature: MA Experiment 108535 PARAMETER Experiment Name: Zm_Meristem_P Parameter: Organism Value: Zea mays
  misc_feature: MA Experiment 108535 PARAMETER Experiment Name: Zm_Meristem_P Parameter: Plant Line Value: 35A19
  misc_feature: MA Experiment 108535 PARAMETER Experiment Name: Zm_Meristem_P Parameter: Tissue Value: Root Meristem vs. Above Root Meristem
  misc_feature: MA Experiment ID: 108536 Result: Down-regulated in Transcription
  misc_feature: MA Experiment 108536 PARAMETER Experiment Name: Zm_Meristem_P Parameter: Age (day) Value: 8
  misc_feature: MA Experiment 108536 PARAMETER Experiment Name: Zm_Meristem_P Parameter: Organism Value: Zea mays
  misc_feature: MA Experiment 108536 PARAMETER Experiment Name: Zm_Meristem_P Parameter: Plant Line Value: 35A19
  misc_feature: MA Experiment 108536 PARAMETER Experiment Name: Zm_Meristem_P Parameter: Tissue Value: Shoot Meristem vs. Above Shoot Meristem
  misc_feature: MA Experiment ID: 108543 Result: Up-regulated in Transcription
  misc_feature: MA Experiment ID: 108687 Result: Down-regulated in Transcription
  misc_feature: MA Experiment 108687 PARAMETER Experiment Name: Zm_Embryos-Flowers__P Parameter: Tissue Value: Embryo vs. Aerial+
  misc_feature: MA Experiment ID: 108689 Result: Down-regulated in Transcription
  misc_feature: MA Experiment 108689 PARAMETER Experiment Name: Zm_Drought_Roots_P Parameter: Age (day) Value: 9
  misc_feature: MA Experiment 108689 PARAMETER Experiment Name: Zm_Drought_Roots_P Parameter: Organism Value: Zea mays
  misc_feature: MA Experiment 108689 PARAMETER Experiment Name: Zm_Drought_Roots_P Parameter: Plant Line Value: 35A19
  misc_feature: MA Experiment 108689 PARAMETER Experiment Name: Zm_Drought_Roots_P Parameter: Timepoint (hr) Value: 24
  misc_feature: MA Experiment 108689 PARAMETER Experiment Name: Zm_Drought_Roots_P Parameter: Tissue Value: Roots
  misc_feature: MA Experiment 108689 PARAMETER Experiment Name: Zm_Drought_Roots_P Parameter: Treatment Value: Drought vs. No Drought
  misc_feature: MA Experiment ID: 20000108 Result: Up-regulated in Transcription
  misc_feature: MA Experiment 20000108 PARAMETER Experiment Name: Zm_Root-Tips_P Parameter: Age (day) Value: 12
  misc_feature: MA Experiment 20000108 PARAMETER Experiment Name: Zm_Root-Tips_P Parameter: Organism Value: Zea mays
  misc_feature: MA Experiment 20000108 PARAMETER Experiment Name: Zm_Root-Tips_P Parameter: Tissue Value: Root tips vs. Root mid region    35
  misc_feature: MA Experiment 20000108 PARAMETER Experiment Name: Zm_Root-Tips_P Parameter: Tissue Value: Root tips vs. Root mid region   Sequence Listing-Misc Features (4)
  misc_feature: MA Experiment ID: 20000477 Result: Down-regulated in Transcription
  misc_feature: MA Experiment 20000477 PARAMETER Experiment Name: Zm_5mM_SA_P Parameter: Age (day) Value: 10
  misc_feature: MA Experiment 20000477 PARAMETER Experiment Name: Zm_5mM_SA_P Parameter: Organism Value: Zea mays
  misc_feature: MA Experiment 20000477 PARAMETER Experiment Name: Zm_5mM_SA_P Parameter: Plant Line Value: 35A19
  misc_feature: MA Experiment 20000477 PARAMETER Experiment Name: Zm_5mM_SA_P Parameter: Timepoint (hr) Value: 48
  misc_feature: MA Experiment 20000477 PARAMETER Experiment Name: Zm_5mM_SA_P Parameter: Tissue Value: Aerial
  misc_feature: MA Experiment 20000477 PARAMETER Experiment Name: Zm_5mM_SA_P Parameter: Treatment Value: 5mM SA vs. No Treatment
  misc_feature: MA Experiment ID: 20000478 Result: Down-regulated in Transcription
  misc_feature: MA Experiment 20000478 PARAMETER Experiment Name: Zm_5mM_SA_P Parameter: Age (day) Value: 11
  misc_feature: MA Experiment 20000478 PARAMETER Experiment Name: Zm_5mM_SA_P Parameter: Organism Value: Zea mays
  misc_feature: MA Experiment 20000478 PARAMETER Experiment Name: Zm_5mM_SA_P Parameter: Plant Line Value: 35A19
  misc_feature: MA Experiment 20000478 PARAMETER Experiment Name: Zm_5mM_SA_P Parameter: Timepoint (hr) Value: 72
  misc_feature: MA Experiment 20000478 PARAMETER Experiment Name: Zm_5mM_SA_P Parameter: Tissue Value: Aerial
  misc_feature: MA Experiment 20000478 PARAMETER Experiment Name: Zm_5mM_SA_P Parameter: Treatment Value: 5mM SA vs. No Treatment
  misc_feature: MA Experiment ID: 20000479 Result: Down-regulated in Transcription
  misc_feature: MA Experiment 20000479 PARAMETER Experiment Name: Zm_Drought_P Parameter: Age (day) Value: 10
  misc_feature: MA Experiment 20000479 PARAMETER Experiment Name: Zm_Drought_P Parameter: Organism Value: Zea mays
  misc_feature: MA Experiment 20000479 PARAMETER Experiment Name: Zm_Drought_P Parameter: Plant Line Value: 35A19
  misc_feature: MA Experiment 20000479 PARAMETER Experiment Name: Zm_Drought_P Parameter: Timepoint (hr) Value: 48
  misc_feature: MA Experiment 20000479 PARAMETER Experiment Name: Zm_Drought_P Parameter: Tissue Value: Aerial
  misc_feature: MA Experiment 20000479 PARAMETER Experiment Name: Zm_Drought_P Parameter: Treatment Value: Drought vs. No Drought
  misc_feature: MA Experiment ID: 20000480 Result: Down-regulated in Transcription
  misc_feature: MA Experiment 20000480 PARAMETER Experiment Name: Zm_Drought_P Parameter: Age (day) Value: 11
  misc_feature: MA Experiment 20000480 PARAMETER Experiment Name: Zm_Drought_P Parameter: Organism Value: Zea mays
  misc_feature: MA Experiment 20000480 PARAMETER Experiment Name: Zm_Drought_P Parameter: Plant Line Value: 35A19
  misc_feature: MA Experiment 20000480 PARAMETER Experiment Name: Zm_Drought_P Parameter: Timepoint (hr) Value: 72
  misc_feature: MA Experiment 20000480 PARAMETER Experiment Name: Zm_Drought_P Parameter: Tissue Value: Aerial
  misc_feature: MA Experiment 20000480 PARAMETER Experiment Name: Zm_Drought_P Parameter: Treatment Value: Drought vs. No Drought
agatgcgctctgcatcttctcccctctggaacacactcccacacagaactagagctccaaggccatggagaaatggagaagacgcaggcacttgctgcttgctgttgcagccgtggccctggtggcagcaataacgctgccgtccgcggaggcgaagctgtccccggactactaccggtcgacgtgcccggacgtggaggcaatcgtgcaggcagtggtggccaagaaggtgaatgagaccttcgtcacagtcccggccacgctcaggctcttcttccacgactgcttcgtcgagggctgtgatgcgtcggtcatcatcgcgtcccgcgacaacgacgccgagaaggacgcgcccgacaacgtgtccctcgctggcgacggcttcgacaccgtggtgcgcgccaaggccgaggtcgagaagaagtgccccggcgtggtctcctgcgccgatatcctcgccatcgccgccagggacgtcgtcaccatgtcgtccggcccccactggaccgtccagcttggccggcttgacgggctcgtctccaaggccggcaacgtcgcgggcaagttgccgggacccaacatgcgcgtcaaggacctcgccgccctgttcgccaagcacaacctcaccacgctcgacatggtcgcgctctcgggagcgcacaccgtcgggttcgcgcactgcacccgcttcgcggaccgcctctaccaccacggcgtcggcgacagcgatggcgcgtcggtggacccgtcgtacaaccctgcgtacgcgcggcagctaatggacgcctgcccgcctggcgtcggcgcagacatcgccgtcaatatggacccaatcacaccgaccgccttcgataacgcctactacgccaacctcgccggcggcctgggattgttcatctcggaccaggcgctgtacagcgacggcgcgtcgcaaccggcggtgagggacttcgctaagaaccagacccgcttcttcgaggcgttcaaggacgccatggtcaagctgggcagtgttggggtgaagaccggccggcacggggagatcaggagtgactgcaccgcattcaactagtagatcgaccacccattcttttg

SEQ ID NO: 17240 - protein, 335 aa, Zea mays subsp. mays
  peptide (1)..(335): Ceres Seq. ID no. 12350696
  misc_feature (48)..(299): Pfam Name: Peroxidase Pfam Description: Peroxidase
  misc_feature (7)..(335): Homolog of NCBI NO: 15235600 NR Description: peroxidase, putative
  misc_feature (11)..(335): Homolog of NCBI NO: 15229646 NR Description: peroxidase, putative; protein id: At3g49960.1
  misc_feature (8)..(332): Homolog of NCBI NO: 13992528 NR Description: peroxidase2 [Medicago sativa]
  misc_feature (8)..(332): Homolog of NCBI NO: 2117624 NR Description: peroxidase (EC 1.11.1.7) 2 precursor - alfalfa
  misc_feature (30)..(332): Homolog of NCBI NO: 4138647 NR Description: peroxidase [Trifolium repens]
  misc_feature (12)..(335): Homolog of NCBI NO: 7433082 NR Description: probable peroxidase (EC 1.11.1.7) (clone PC55) -
  misc_feature (28)..(335): Homolog of NCBI NO: 15241315 NR Description: peroxidase, putative
  misc_feature (9)..(335): Homolog of NCBI NO: 14485511 NR Description: putative peroxidase [Solanum tuberosum]
  misc_feature (11)..(335): Homolog of NCBI NO: 28629828 NR Description: peroxidase 1 [Artemisia annua]
  misc_feature (8)..(335): Homolog of NCBI NO: 15240737 NR Description: peroxidase, putative; protein id: At5g67400.1
MEKWRRRRHLLLAVAAVALVAAITLPSAEAKLSPDYYRSTCPDVEAIVQAVVAKKVNETFVTVPATLRLFFHDCFVEGCDASVIIASRDNDAEKDAPDNVSLAGDGFDTVVRAKAEVEKKCPGVVSCADILAIAARDVVTMSSGPHWTVQLGRLDGLVSKAGNVAGKLPGPNMRVKDLAALFAKHNLTTLDMVALSGAHTVGFAHCTRFADRLYHHGVGDSDGASVDPSYNPAYARQLMDACPPGVGADIAVNMDPITPTAFDNAYYANLAGGLGLFISDQALYSDGASQPAVRDFAKNQTRFFEAFKDAMVKLGSVGVKTGRHGEIRSDCTAFN

SEQ ID NO: 17241 - protein, 195 aa, Zea mays subsp. mays
  peptide (1)..(195): Ceres Seq. ID no. 12350697
  misc_feature (1)..(159): Pfam Name: Peroxidase Pfam Description: Peroxidase
  misc_feature (1)..(195): Homolog of NCBI NO: 15235600 NR Description: peroxidase, putative
  misc_feature (1)..(195): Homolog of NCBI NO: 15229646 NR Description: peroxidase, putative; protein id: At3g49960.1
  misc_feature (1)..(192): Homolog of NCBI NO: 13992528 NR Description: peroxidase2 [Medicago sativa]
  misc_feature (1)..(192): Homolog of NCBI NO: 2117624 NR Description: peroxidase (EC 1.11.1.7) 2 precursor - alfalfa
  misc_feature (1)..(192): Homolog of NCBI NO: 4138647 NR Description: peroxidase [Trifolium repens]
  misc_feature (1)..(195): Homolog of NCBI NO: 7433082 NR Description: probable peroxidase (EC 1.11.1.7) (clone PC55) -
  misc_feature (1)..(195): Homolog of NCBI NO: 15241315 NR Description: peroxidase, putative
  misc_feature (1)..(195): Homolog of NCBI NO: 14485511 NR Description: putative peroxidase [Solanum tuberosum]
  misc_feature (1)..(195): Homolog of NCBI NO: 28629828 NR Description: peroxidase 1 [Artemisia annua]
  misc_feature (1)..(195): Homolog of NCBI NO: 15240737 NR Description: peroxidase, putative; protein id: At5g67400.1
MSSGPHWTVQLGRLDGLVSKAGNVAGKLPGPNMRVKDLAALFAKHNLTTLDMVALSGAHTVGFAHCTRFADRLYHHGVGDSDGASVDPSYNPAYARQLMDACPPGVGADIAVNMDPITPTAFDNAYYANLAGGLGLFISDQALYSDGASQPAVRDFAKNQTRFFEAFKDAMVKLGSVGVKTGRHGEIRSDCTAFN

SEQ ID NO: 17242 - protein, 181 aa, Zea mays subsp. mays
  peptide (1)..(181): Ceres Seq. ID no. 12350698
  misc_feature (3)..(181): Pfam Name: Equine herpesvirus glycoprotein gp2 Pfam Description: Equine herpesvirus glycoprotein gp2
  misc_feature (5)..(181): Homolog of NCBI NO: 28574039 NR Description: Salivary gland secretion 1 CG3047-PA
  misc_feature (1)..(181): Homolog of NCBI NO: 31232507 NR Description: ENSANGP00000004655 [Anopheles gambiae]
  misc_feature (1)..(181): Homolog of NCBI NO: 28574039 NR Description: Salivary gland secretion 1 CG3047-PA
  misc_feature (1)..(181): Homolog of NCBI NO: 31232507 NR Description: ENSANGP00000004655 [Anopheles gambiae]
  misc_feature (1)..(181): Homolog of NCBI NO: 28574039 NR Description: Salivary gland secretion 1 CG3047-PA
  misc_feature (1)..(181): Homolog of NCBI NO: 28574039 NR Description: Salivary gland secretion 1 CG3047-PA
  misc_feature (1)..(181): Homolog of NCBI NO: 31232507 NR Description: ENSANGP00000004655 [Anopheles gambiae]
  misc_feature (1)..(181): Homolog of NCBI NO: 28574039 NR Description: Salivary gland secretion 1 CG3047-PA
  misc_feature (1)..(181): Homolog of NCBI NO: 28574039 NR Description: Salivary gland secretion 1 CG3047-PA
  misc_feature (1)..(181): Homolog of NCBI NO: 28574039 NR Description: Salivary gland secretion 1 CG3047-PA
MRPSSQSRPRSGSSSTTASSRAVMRRSSSRPATTTPRRTRPTTCPSLATASTPWCAPRPRSRRSAPAWSPAPISSPSPPGTSSPCRPAPTGPSSLAGLTGSSPRPATSRASCRDPTCASRTSPPCSPSTTSPRSTWSRSRERTPSGSRTAPASRTASTTTASATAMARRWTRRTTLRTRGS

SEQ ID NO: 17243 - DNA, 1132 bp, Zea mays subsp. mays
  misc_feature (1)..(1132): Ceres Seq. ID no. 12375190
  misc_feature: MA Experiment ID: 108504 Result: Up-regulated in Transcription
  misc_feature: MA Experiment 108504 PARAMETER Experiment Name: Zm_Drought_P Parameter: Age (day) Value: 8
  misc_feature: MA Experiment 108504 PARAMETER Experiment Name: Zm_Drought_P Parameter: Organism Value: Zea mays
  misc_feature: MA Experiment 108504 PARAMETER Experiment Name: Zm_Drought_P Parameter: Plant Line Value: 35A19
  misc_feature: MA Experiment 108504 PARAMETER Experiment Name: Zm_Drought_P Parameter: Timepoint (hr) Value: 12
  misc_feature: MA Experiment 108504 PARAMETER Experiment Name: Zm_Drought_P Parameter: Tissue Value: Aerial
  misc_feature: MA Experiment 108504 PARAMETER Experiment Name: Zm_Drought_P Parameter: Treatment Value: Drought vs. No Drought
  misc_feature: MA Experiment ID: 108522 Result: Up-regulated in Transcription
  misc_feature: MA Experiment 108522 PARAMETER Experiment Name: Zm_42deg_Heat_P Parameter: Age (day) Value: 8
  misc_feature: MA Experiment 108522 PARAMETER Experiment Name: Zm_42deg_Heat_P Parameter: Organism Value: Zea mays
  misc_feature: MA Experiment 108522 PARAMETER Experiment Name: Zm_42deg_Heat_P Parameter: Plant Line Value: 35A19
  misc_feature: MA Experiment 108522 PARAMETER Experiment Name: Zm_42deg_Heat_P Parameter: Temperature (deg C) Value: 42 vs. 22
  misc_feature: MA Experiment 108522 PARAMETER Experiment Name: Zm_42deg_Heat_P Parameter: Timepoint (hr) Value: 1
  misc_feature: MA Experiment 108522 PARAMETER Experiment Name: Zm_42deg_Heat_P Parameter: Tissue Value: Aerial
  misc_feature: MA Experiment ID: 108523 Result: Up-regulated in Transcription
  misc_feature: MA Experiment 108523 PARAMETER Experiment Name: Zm_42deg_Heat_P Parameter: Age (day) Value: 8
  misc_feature: MA Experiment 108523 PARAMETER Experiment Name: Zm_42deg_Heat_P Parameter: Organism Value: Zea mays
  misc_feature: MA Experiment 108523 PARAMETER Experiment Name: Zm_42deg_Heat_P Parameter: Plant Line Value: 35A19
  misc_feature: MA Experiment 108523 PARAMETER Experiment Name: Zm_42deg_Heat_P Parameter: Temperature (deg C) Value: 42 vs. 22
  misc_feature: MA Experiment 108523 PARAMETER Experiment Name: Zm_42deg_Heat_P Parameter: Timepoint (hr) Value: 6
  misc_feature: MA Experiment 108523 PARAMETER Experiment Name: Zm_42deg_Heat_P Parameter: Tissue Value: Aerial
  misc_feature: MA Experiment ID: 108526 Result: Up-regulated in Transcription
  misc_feature: MA Experiment 108526 PARAMETER Experiment Name: Zm_5mM_NO_P Parameter: Age (day) Value: 8
  misc_feature: MA Experiment 108526 PARAMETER Experiment Name: Zm_5mM_NO_P Parameter: Organism Value: Zea mays
  misc_feature: MA Experiment 108526 PARAMETER Experiment Name: Zm_5mM_NO_P Parameter: Plant Line Value: 35A19
  misc_feature: MA Experiment 108526 PARAMETER Experiment Name: Zm_5mM_NO_P Parameter: Timepoint (hr) Value: 1
  misc_feature: MA Experiment 108526 PARAMETER Experiment Name: Zm_5mM_NO_P Parameter: Tissue Value: Aerial
  misc_feature: MA Experiment 108526 PARAMETER Experiment Name: Zm_5mM_NO_P Parameter: Treatment Value: 5mM NO vs. No Treatment
  misc_feature: MA Experiment ID: 108527 Result: Up-regulated in Transcription
  misc_feature: MA Experiment 108527 PARAMETER Experiment Name: Zm_5mM_NO_P Parameter: Age (day) Value: 8
  misc_feature: MA Experiment 108527 PARAMETER Experiment Name: Zm_5mM_NO_P Parameter: Organism Value: Zea mays
  misc_feature: MA Experiment 108527 PARAMETER Experiment Name: Zm_5mM_NO_P Parameter: Plant Line Value: 35A19
  misc_feature: MA Experiment 108527 PARAMETER Experiment Name: Zm_5mM_NO_P Parameter: Timepoint (hr) Value: 6
  misc_feature: MA Experiment 108527 PARAMETER Experiment Name: Zm_5mM_NO_P Parameter: Tissue Value: Aerial
  misc_feature: MA Experiment 108527 PARAMETER Experiment Name: Zm_5mM_NO_P Parameter: Treatment Value: 5mM NO vs. No Treatment
  misc_feature: MA Experiment ID: 108528 Result: Up-regulated in Transcription
  misc_feature: MA Experiment 108528 PARAMETER Experiment Name: Zm_Imbibed_Seeds_P Parameter: Age (day) Value: 5 vs. 2
  misc_feature: MA Experiment 108528 PARAMETER Experiment Name: Zm_Imbibed_Seeds_P Parameter: Organism Value: Zea mays
  misc_feature: MA Experiment 108528 PARAMETER Experiment Name: Zm_Imbibed_Seeds_P Parameter: Plant Line Value: 35A19
  misc_feature: MA Experiment 108528 PARAMETER Experiment Name: Zm_Imbibed_Seeds_P Parameter: Tissue Value: Aerial vs. Embryo
  misc_feature: MA Experiment ID: 108529 Result: Up-regulated in Transcription
  misc_feature: MA Experiment 108529 PARAMETER Experiment Name: Zm_Imbibed_Seeds_P Parameter: Age (day) Value: 5 vs. 2
  misc_feature: MA Experiment 108529 PARAMETER Experiment Name: Zm_Imbibed_Seeds_P Parameter: Organism Value: Zea mays
  misc_feature: MA Experiment 108529 PARAMETER Experiment Name: Zm_Imbibed_Seeds_P Parameter: Plant Line Value: 35A19
  misc_feature: MA Experiment 108529 PARAMETER Experiment Name: Zm_Imbibed_Seeds_P Parameter: Tissue Value: Roots vs. Embryo
  misc_feature: MA Experiment ID: 108530 Result: Up-regulated in Transcription
  misc_feature: MA Experiment 108530 PARAMETER Experiment Name: Zm_Imbibed_Seeds_P Parameter: Age (day) Value: 6 vs. 2
  misc_feature: MA Experiment 108530 PARAMETER Experiment Name: Zm_Imbibed_Seeds_P Parameter: Organism Value: Zea mays
  misc_feature: MA Experiment 108530 PARAMETER Experiment Name: Zm_Imbibed_Seeds_P Parameter: Plant Line Value: 35A19
  misc_feature: MA Experiment 108530 PARAMETER Experiment Name: Zm_Imbibed_Seeds_P Parameter: Tissue Value: Aerial vs. Embryo
  misc_feature: MA Experiment ID: 108539 Result: Up-regulated in Transcription
  misc_feature: MA Experiment 108539 PARAMETER Experiment Name: Zm_20percent_PEG_P Parameter: Age (day) Value: 8
  misc_feature: MA Experiment 108539 PARAMETER Experiment Name: Zm_20percent_PEG_P Parameter: Organism Value: Zea mays
  misc_feature: MA Experiment 108539 PARAMETER Experiment Name: Zm_20percent_PEG_P Parameter: Plant Line Value: 35A19
  misc_feature: MA Experiment 108539 PARAMETER Experiment Name: Zm_20percent_PEG_P Parameter: Timepoint (hr) Value: 1
  misc_feature: MA Experiment 108539 PARAMETER Experiment Name: Zm_20percent_PEG_P Parameter: Tissue Value: Aerial
  misc_feature: MA Experiment 108539 PARAMETER Experiment Name: Zm_20percent_PEG_P Parameter: Treatment Value: 20percent PEG vs. No Treatment
  misc_feature: MA Experiment ID: 108542 Result: Up-regulated in Transcription
  misc_feature: MA Experiment 108542 PARAMETER Experiment Name: Zm_150mM_NaCl_P Parameter: Age (day) Value: 8
  misc_feature: MA Experiment 108542 PARAMETER Experiment Name: Zm_150mM_NaCl_P Parameter: Organism Value: Zea mays
  misc_feature: MA Experiment 108542 PARAMETER Experiment Name: Zm_150mM_NaCl_P Parameter: Plant Line Value: 35A19
  misc_feature: MA Experiment 108542 PARAMETER Experiment Name: Zm_150mM_NaCl_P Parameter: Timepoint (hr) Value: 6
  misc_feature: MA Experiment 108542 PARAMETER Experiment Name: Zm_150mM_NaCl_P Parameter: Tissue Value: Aerial
  misc_feature: MA Experiment 108542 PARAMETER Experiment Name: Zm_150mM_NaCl_P Parameter: Treatment Value: 150mM NaCl vs. No Treatment
  misc_feature: MA Experiment ID: 108543 Result: Down-regulated in Transcription
  misc_feature: MA Experiment ID: 108556 Result: Up-regulated in Transcription
  misc_feature: MA Experiment 108556 PARAMETER Experiment Name: Zm_Drought_P Parameter: Age (day) Value: 9
  misc_feature: MA Experiment 108556 PARAMETER Experiment Name: Zm_Drought_P Parameter: Organism Value: Zea mays
  misc_feature: MA Experiment 108556 PARAMETER Experiment Name: Zm_Drought_P Parameter: Plant Line Value: 35A19
  misc_feature: MA Experiment 108556 PARAMETER Experiment Name: Zm_Drought_P Parameter: Timepoint (hr) Value: 24
  misc_feature: MA Experiment 108556 PARAMETER Experiment Name: Zm_Drought_P Parameter: Tissue Value: Aerial
  misc_feature: MA Experiment 108556 PARAMETER Experiment Name: Zm_Drought_P Parameter: Treatment Value: Drought vs. No Drought
  misc_feature: MA Experiment ID: 108559 Result: Up-regulated in Transcription
  misc_feature: MA Experiment 108559 PARAMETER Experiment Name: Zm_5mM_NO_P Parameter: Age (day) Value: 8
  misc_feature: MA Experiment 108559 PARAMETER Experiment Name: Zm_5mM_NO_P Parameter: Organism Value: Zea mays
  misc_feature: MA Experiment 108559 PARAMETER Experiment Name: Zm_5mM_NO_P Parameter: Plant Line Value: 35A19
  misc_feature: MA Experiment 108559 PARAMETER Experiment Name: Zm_5mM_NO_P Parameter: Timepoint (hr) Value: 12
  misc_feature: MA Experiment 108559 PARAMETER Experiment Name: Zm_5mM_NO_P Parameter: Tissue Value: Aerial
  misc_feature: MA Experiment 108559 PARAMETER Experiment Name: Zm_5mM_NO_P Parameter: Treatment Value: 5mM NO vs. No Treatment
  misc_feature: MA Experiment ID: 108597 Result: Up-regulated in Transcription
  misc_feature: MA Experiment 108597 PARAMETER Experiment Name: Zm_100uM_ABA_P Parameter: Age (day) Value: 9
  misc_feature: MA Experiment 108597 PARAMETER Experiment Name: Zm_100uM_ABA_P Parameter: Organism Value: Zea mays
  misc_feature: MA Experiment 108597 PARAMETER Experiment Name: Zm_100uM_ABA_P Parameter: Plant Line Value: 35A19
  misc_feature: MA Experiment 108597 PARAMETER Experiment Name: Zm_100uM_ABA_P Parameter: Timepoint (hr) Value: 24
  misc_feature: MA Experiment 108597 PARAMETER Experiment Name: Zm_100uM_ABA_P Parameter: Tissue Value: Aerial
  misc_feature: MA Experiment 108597 PARAMETER Experiment Name: Zm_100uM_ABA_P Parameter: Treatment Value: 100uM ABA vs. No Treatment
  misc_feature: MA Experiment ID: 108687 Result: Up-regulated in Transcription
  misc_feature: MA Experiment 108687 PARAMETER Experiment Name: Zm_Embryos-Flowers__P Parameter: Tissue Value: Embryo vs. Aerial+
  misc_feature: MA Experiment ID: 20000477 Result: Up-regulated in Transcription
  misc_feature: MA Experiment 20000477 PARAMETER Experiment Name: Zm_5mM_SA_P Parameter: Age (day) Value: 10
  misc_feature: MA Experiment 20000477 PARAMETER Experiment Name: Zm_5mM_SA_P Parameter: Organism Value: Zea mays
  misc_feature: MA Experiment 20000477 PARAMETER Experiment Name: Zm_5mM_SA_P Parameter: Plant Line Value: 35A19
  misc_feature: MA Experiment 20000477 PARAMETER Experiment Name: Zm_5mM_SA_P Parameter: Timepoint (hr) Value: 48
  misc_feature: MA Experiment 20000477 PARAMETER Experiment Name: Zm_5mM_SA_P Parameter: Tissue Value: Aerial
  misc_feature: MA Experiment 20000477 PARAMETER Experiment Name: Zm_5mM_SA_P Parameter: Treatment Value: 5mM SA vs. No Treatment
  misc_feature: MA Experiment ID: 20000630 Result: Up-regulated in Transcription
  misc_feature: MA Experiment 20000630 PARAMETER Experiment Name: Zm_Herbicide-Treatments_P Parameter: Timepoint (hr) Value: 4
  misc_feature: MA Experiment 20000630 PARAMETER Experiment Name: Zm_Herbicide-Treatments_P Parameter: Tissue Value: Aerial
  misc_feature: MA Experiment 20000630 PARAMETER Experiment Name: Zm_Herbicide-Treatments_P Parameter: Treatment Value: Roundup vs. No Treatment
  misc_feature: MA Experiment ID: 20001610 Result: Up-regulated in Transcription
  misc_feature: MA Experiment 20001610 PARAMETER Experiment Name: Zm_50ppm_KNO3_L-to-H_P Parameter: Age (day) Value: 19
  misc_feature: MA Experiment 20001610 PARAMETER Experiment Name: Zm_50ppm_KNO3_L-to-H_P Parameter: Organism Value: Zea mays
  misc_feature: MA Experiment 20001610 PARAMETER Experiment Name: Zm_50ppm_KNO3_L-to-H_P Parameter: Plant Line Value: 35A19
  misc_feature: MA Experiment 20001610 PARAMETER Experiment Name: Zm_50ppm_KNO3_L-to-H_P Parameter: Timepoint (hr) Value: 2
  misc_feature: MA Experiment 20001610 PARAMETER Experiment Name: Zm_50ppm_KNO3_L-to-H_P Parameter: Tissue Value: Roots
  misc_feature: MA Experiment 20001610 PARAMETER Experiment Name: Zm_50ppm_KNO3_L-to-H_P Parameter: Treatment Value: 50ppm KNO3 vs. 50ppm KCl
gcacgagaccattacctagaacatcctaatcgaaaaacactttcctttccgcggcccctctgctcaccgcactccgttgcctgatggcgtcgccggcggcggggacgccgcccttcctgacgaaaacttacgccatggtggaggactcggccacggacgacacgatctcgtggaacgacaccggcacggccttcgtggtgtggcgccccgctgagttcgcccgtgaccttcttcccaagcacttcaagcacagcaacttctcctcgttcgtccgccagctcaacacctacggattcaagaaggtagtcggggacagatgggagtttgccaacgacggcttccggagaggcgagaagcaccttctcgccggaatacagaggcggaaggggaccggcgccgtggcggcggtaccggtgccgggcataccggcggggataccgttaccgctctcgtccccgcccacgagctctggcggggagccggcggtctcctcgtcgccgccgcgtggctcgacagctggagttagcggcgcggtggccgagctggaggaggagaacgcgcggctgcgacgcgagaatgcgaggctggcgcgggagctggcccgcgcgcggcgcctctgcgacggcgtgcgccagctcatggcgcggtacgacgacgaccaaggcagaggcggagatgaggatccggcggacggcgacgaggggcatggcggcagtggggaaggccccagcggcccagaggtgaagccaatgctgttcggcgtcccaatcggggccaagcggctacgcggtgcgcgtggtgatggagacgatgtagatgacggcgaggacaacgacgaggaaccagatgaagacgacgagaggcaaacggtgcggaagcagggggttaaagcggccaggaggaacgaggcgtcggatctggacgtgctgacgctgtccgtgcgggcggccgcggcggcgaggacgggcggaggatcacgtgaccgcaaaagccccattaccgcccaccccgataggagcctcagcctagggctgaaatgactgacactcgtgtagagtactgtagtatcgattgtagtattgtattgagtgatgctgcacgcttgaattgaatcatctagaaatcaaaattt

SEQ ID NO: 17244 - protein, 318 aa, Zea mays subsp. mays
  peptide (1)..(318): Ceres Seq. ID no. 12375191
  misc_feature (10)..(215): Pfam Name: HSF-type DNA-binding Pfam Description: HSF-type DNA-binding
  misc_feature (10)..(189): Homolog of NCBI NO: 5821136 NR Description: heat shock factor [Nicotiana tabacum]
  misc_feature (1)..(257): Homolog of NCBI NO: 2129612 NR Description: heat shock transcription factor HSF4 -
  misc_feature (1)..(257): Homolog of NCBI NO: 15234583 NR Description: heat shock transcription factor HSF4; protein id:
  misc_feature (10)..(255): Homolog of NCBI NO: 123684 NR Description: HEAT SHOCK FACTOR PROTEIN HSF24 (HEAT SHOCK
  misc_feature (10)..(257): Homolog of NCBI NO: 30697614 NR Description: heat shock transcription factor 6 (HSF6)
  misc_feature (10)..(223): Homolog of NCBI NO: 33591098 NR Description: heat shock factor RHSF2 [Oryza sativa (japonica
  misc_feature (18)..(306): Homolog of NCBI NO: 33591096 NR Description: heat shock factor RHSF1 [Oryza sativa (japonica
  misc_feature (1)..(306): Homolog of NCBI NO: 38344369 NR Description: OSJNBb0032E06.3 [Oryza sativa (japonica
MASPAAGTPPFLTKTYAMVEDSATDDTISWNDTGTAFVVWRPAEFARDLLPKHFKHSNFSSFVRQLNTYGFKKVVGDRWEFANDGFRRGEKHLLAGIQRRKGTGAVAAVPVPGIPAGIPLPLSSPPTSSGGEPAVSSSPPRGSTAGVSGAVAELEEENARLRRENARLARELARARRLCDGVRQLMARYDDDQGRGGDEDPADGDEGHGGSGEGPSGPEVKPMLFGVPIGAKRLRGARGDGDDVDDGEDNDEEPDEDDERQTVRKQGVKAARRNEASDLDVLTLSVRAAAAARTGGGSRDRKSPITAHPDRSLSLGLK

SEQ ID NO: 17245 - protein, 301 aa, Zea mays subsp. mays
  peptide (1)..(301): Ceres Seq. ID no. 12375192
  misc_feature (1)..(198): Pfam Name: HSF-type DNA-binding Pfam Description: HSF-type DNA-binding
  misc_feature (1)..(172): Homolog of NCBI NO: 5821136 NR Description: heat shock factor [Nicotiana tabacum]
  misc_feature (1)..(240): Homolog of NCBI NO: 2129612 NR Description: heat shock transcription factor HSF4 -
  misc_feature (1)..(240): Homolog of NCBI NO: 15234583 NR Description: heat shock transcription factor HSF4; protein id:
  misc_feature (1)..(238): Homolog of NCBI NO: 123684 NR Description: HEAT SHOCK FACTOR PROTEIN HSF24 (HEAT SHOCK
  misc_feature (1)..(240): Homolog of NCBI NO: 30697614 NR Description: heat shock transcription factor 6 (HSF6)
  misc_feature (1)..(206): Homolog of NCBI NO: 33591098 NR Description: heat shock factor RHSF2 [Oryza sativa (japonica
  misc_feature (1)..(289): Homolog of NCBI NO: 33591096 NR Description: heat shock factor RHSF1 [Oryza sativa (japonica
  misc_feature (1)..(289): Homolog of NCBI NO: 38344369 NR Description: OSJNBb0032E06.3 [Oryza sativa (japonica
MVEDSATDDTISWNDTGTAFVVWRPAEFARDLLPKHFKHSNFSSFVRQLNTYGFKKVVGDRWEFANDGFRRGEKHLLAGIQRRKGTGAVAAVPVPGIPAGIPLPLSSPPTSSGGEPAVSSSPPRGSTAGVSGAVAELEEENARLRRENARLARELARARRLCDGVRQLMARYDDDQGRGGDEDPADGDEGHGGSGEGPSGPEVKPMLFGVPIGAKRLRGARGDGDDVDDGEDNDEEPDEDDERQTVRKQGVKAARRNEASDLDVLTLSVRAAAAARTGGGSRDRKSPITAHPDRSLSLGLK

SEQ ID NO: 17246 - DNA, 501 bp, Zea mays subsp. mays
  misc_feature (1)..(501): Ceres Seq. ID no. 4612568
  misc_feature: MA Experiment ID: 108522 Result: Up-regulated in Transcription
  misc_feature: MA Experiment 108522 PARAMETER Experiment Name: Zm_42deg_Heat_P Parameter: Age (day) Value: 8
  misc_feature: MA Experiment 108522 PARAMETER Experiment Name: Zm_42deg_Heat_P Parameter: Organism Value: Zea mays
  misc_feature: MA Experiment 108522 PARAMETER Experiment Name: Zm_42deg_Heat_P Parameter: Plant Line Value: 35A19
  misc_feature: MA Experiment 108522 PARAMETER Experiment Name: Zm_42deg_Heat_P Parameter: Temperature (deg C) Value: 42 vs. 22
  misc_feature: MA Experiment 108522 PARAMETER Experiment Name: Zm_42deg_Heat_P Parameter: Timepoint (hr) Value: 1
  misc_feature: MA Experiment 108522 PARAMETER Experiment Name: Zm_42deg_Heat_P Parameter: Tissue Value: Aerial
  misc_feature: MA Experiment ID: 20000632 Result: Down-regulated in Transcription
  misc_feature: MA Experiment 20000632 PARAMETER Experiment Name: Zm_Herbicide-Treatments_P Parameter: Timepoint (hr) Value: 4
  misc_feature: MA Experiment 20000632 PARAMETER Experiment Name: Zm_Herbicide-Treatments_P Parameter: Tissue Value: Aerial
  misc_feature: MA Experiment 20000632 PARAMETER Experiment Name: Zm_Herbicide-Treatments_P Parameter: Treatment Value: Glean vs. No Treatment
accatcggcttccgcatctccccgcctccacccacggcactcgcaagcagcgctcattagtcactagggttttaaactttccccccgatccgcctcgccgccggcgtcgtcctccgccggaaatccaccaccctacacccagccggagacgactatggtgggtttcggctcgatggcgggctacgggatccagtcgatgctcaaggaaggccaccgccacctctccgggctcgaggaggccgttctcaagaacatcgacgcctgccgcgagctgtccgccattacgcgcacctctctcggcccgaacggaatgaacaaaatggttatcaatcacttggacaagctgtttgtcacaaacgatgctgccaccattgtgaatgagctcgaagttcagcaccctgccgctaagattctggtactggctggtagggctcaacaggaggagattggggatggggccaatctcaccatatcgtttgccggtgaactgcttgagaaggc

SEQ ID NO: 17247 - protein, 115 aa, Zea mays subsp. mays
  peptide (1)..(115): Ceres Seq. ID no. 4612569
  misc_feature (40)..(114): Pfam Name: TCP-1/cpn60 chaperonin family Pfam Description: TCP-1/cpn60 chaperonin family
  misc_feature (11)..(114): Homolog of NCBI NO: 40789055 NR Description: KIAA0002 [Homo sapiens]
  misc_feature (11)..(114): Homolog of NCBI NO: 6005727 NR Description: chaperonin containing TCP1, subunit 8 (theta)
  misc_feature (11)..(114): Homolog of NCBI NO: 1136741 NR Description: KIAA0002 [Homo sapiens]
  misc_feature (11)..(114): Homolog of NCBI NO: 37362194 NR Description: chaperonin containing TCP1, subunit 8 (theta)
  misc_feature (11)..(114): Homolog of NCBI NO: 29791676 NR Description: Similar to chaperonin containing TCP1, subunit 8
  misc_feature (11)..(114): Homolog of NCBI NO: 9988062 NR Description: T-complex protein 1, theta subunit (TCP-1-theta)
  misc_feature (11)..(114): Homolog of NCBI NO: 27924345 NR Description: Similar to chaperonin containing TCP1, subunit 8
  misc_feature (8)..(114): Homolog of NCBI NO: 4959731 NR Description: chaperonin-containing-TCP1 theta subunit
  misc_feature (1)..(114): Homolog of NCBI NO: 18396719 NR Description: putative T-complex protein 1, theta subunit
  misc_feature (1)..(114): Homolog of NCBI NO: 6223641 NR Description: putative T-complex protein 1, theta subunit
MVGFGSMAGYGIQSMLKEGHRHLSGLEEAVLKNIDACRELSAITRTSLGPNGMNKMVINHLDKLFVTNDAATIVNELEVQHPAAKILVLAGRAQQEEIGDGANLTISFAGELLEK

SEQ ID NO: 17248 - protein, 109 aa, Zea mays subsp. mays
  peptide (1)..(109): Ceres Seq. ID no. 4612570
  misc_feature (34)..(108): Pfam Name: TCP-1/cpn60 chaperonin family Pfam Description: TCP-1/cpn60 chaperonin family
  misc_feature (5)..(108): Homolog of NCBI NO: 37362194 NR Description: chaperonin containing TCP1, subunit 8 (theta)
  misc_feature (5)..(108): Homolog of NCBI NO: 29791676 NR Description: Similar to chaperonin containing TCP1, subunit 8
  misc_feature (5)..(108): Homolog of NCBI NO: 9988062 NR Description: T-complex protein 1, theta subunit (TCP-1-theta)
  misc_feature (5)..(108): Homolog of NCBI NO: 27924345 NR Description: Similar to chaperonin containing TCP1, subunit 8
  misc_feature (5)..(108): Homolog of NCBI NO: 1136741 NR Description: KIAA0002 [Homo sapiens]
  misc_feature (5)..(108): Homolog of NCBI NO: 40789055 NR Description: KIAA0002 [Homo sapiens]
  misc_feature (5)..(108): Homolog of NCBI NO: 6005727 NR Description: chaperonin containing TCP1, subunit 8 (theta)
  misc_feature (2)..(108): Homolog of NCBI NO: 4959731 NR Description: chaperonin-containing-TCP1 theta subunit
  misc_feature (1)..(108): Homolog of NCBI NO: 18396719 NR Description: putative T-complex protein 1, theta subunit
  misc_feature (1)..(108): Homolog of NCBI NO: 6223641 NR Description: putative T-complex protein 1, theta subunit
MAGYGIQSMLKEGHRHLSGLEEAVLKNIDACRELSAITRTSLGPNGMNKMVINHLDKLFVTNDAATIVNELEVQHPAAKILVLAGRAQQEEIGDGANLTISFAGELLEK

SEQ ID NO: 17249 - protein, 103 aa, Zea mays subsp. mays
  peptide (1)..(103): Ceres Seq. ID no. 4612571
HRLPHLPASTHGTRKQRSLVTRVLNFPPDPPRRRRRPPPEIHHPTPSRRRLWWVSARWRATGSSRCSRKATATSPGSRRPFSRTSTPAASCPPLRAPLSARTE

SEQ ID NO: 17250 - DNA, 2025 bp, Zea mays subsp. mays
  misc_feature (1)..(2025): Ceres Seq. ID no. 12417568
  misc_feature: MA Experiment ID: 108523 Result: Down-regulated in Transcription
  misc_feature: MA Experiment 108523 PARAMETER Experiment Name: Zm_42deg_Heat_P Parameter: Age (day) Value: 8
  misc_feature: MA Experiment 108523 PARAMETER Experiment Name: Zm_42deg_Heat_P Parameter: Organism Value: Zea mays
  misc_feature: MA Experiment 108523 PARAMETER Experiment Name: Zm_42deg_Heat_P Parameter: Plant Line Value: 35A19
  misc_feature: MA Experiment 108523 PARAMETER Experiment Name: Zm_42deg_Heat_P Parameter: Temperature (deg C) Value: 42 vs. 22
  misc_feature: MA Experiment 108523 PARAMETER Experiment Name: Zm_42deg_Heat_P Parameter: Timepoint (hr) Value: 6
  misc_feature: MA Experiment 108523 PARAMETER Experiment Name: Zm_42deg_Heat_P Parameter: Tissue Value: Aerial
  misc_feature: MA Experiment ID: 108528 Result: Up-regulated in Transcription
  misc_feature: MA Experiment 108528 PARAMETER Experiment Name: Zm_Imbibed_Seeds_P Parameter: Age (day) Value: 5 vs. 2
  misc_feature: MA Experiment 108528 PARAMETER Experiment Name: Zm_Imbibed_Seeds_P Parameter: Organism Value: Zea mays
  misc_feature: MA Experiment 108528 PARAMETER Experiment Name: Zm_Imbibed_Seeds_P Parameter: Plant Line Value: 35A19
  misc_feature: MA Experiment 108528 PARAMETER Experiment Name: Zm_Imbibed_Seeds_P Parameter: Tissue Value: Aerial vs. Embryo
  misc_feature: MA Experiment ID: 108529 Result: Down-regulated in Transcription
  misc_feature: MA Experiment 108529 PARAMETER Experiment Name: Zm_Imbibed_Seeds_P Parameter: Age (day) Value: 5 vs. 2
  misc_feature: MA Experiment 108529 PARAMETER Experiment Name: Zm_Imbibed_Seeds_P Parameter: Organism Value: Zea mays
  misc_feature: MA Experiment 108529 PARAMETER Experiment Name: Zm_Imbibed_Seeds_P Parameter: Plant Line Value: 35A19
  misc_feature: MA Experiment 108529 PARAMETER Experiment Name: Zm_Imbibed_Seeds_P Parameter: Tissue Value: Roots vs. Embryo
  misc_feature: MA Experiment ID: 108536 Result: Down-regulated in Transcription
  misc_feature: MA Experiment 108536 PARAMETER Experiment Name: Zm_Meristem_P Parameter: Age (day) Value: 8
  misc_feature: MA Experiment 108536 PARAMETER Experiment Name: Zm_Meristem_P Parameter: Organism Value: Zea mays
  misc_feature: MA Experiment 108536 PARAMETER Experiment Name: Zm_Meristem_P Parameter: Plant Line Value: 35A19
  misc_feature: MA Experiment 108536 PARAMETER Experiment Name: Zm_Meristem_P Parameter: Tissue Value: Shoot Meristem vs. Above Shoot Meristem
  misc_feature: MA Experiment ID: 108544 Result: Down-regulated in Transcription
  misc_feature: MA Experiment ID: 108545 Result: Up-regulated in Transcription
  misc_feature: MA Experiment 108545 PARAMETER Experiment Name: Zm_Imbibed_Seeds_P Parameter: Age (day) Value: 3 vs. 2
  misc_feature: MA Experiment 108545 PARAMETER Experiment Name: Zm_Imbibed_Seeds_P Parameter: Organism Value: Zea mays
  misc_feature: MA Experiment 108545 PARAMETER Experiment Name: Zm_Imbibed_Seeds_P Parameter: Plant Line Value: 35A19
  misc_feature: MA Experiment 108545 PARAMETER Experiment Name: Zm_Imbibed_Seeds_P Parameter: Tissue Value: Aerial vs. Embryo
  misc_feature: MA Experiment ID: 108546 Result: Down-regulated in Transcription
  misc_feature: MA Experiment 108546 PARAMETER Experiment Name: Zm_Imbibed_Seeds_P Parameter: Age (day) Value: 3 vs. 2
  misc_feature: MA Experiment 108546 PARAMETER Experiment Name: Zm_Imbibed_Seeds_P Parameter: Organism Value: Zea mays
  misc_feature: MA Experiment 108546 PARAMETER Experiment Name: Zm_Imbibed_Seeds_P Parameter: Plant Line Value: 35A19
  misc_feature: MA Experiment 108546 PARAMETER Experiment Name: Zm_Imbibed_Seeds_P Parameter: Tissue Value: Roots vs. Embryo
  misc_feature: MA Experiment ID: 108547 Result: Up-regulated in Transcription
  misc_feature: MA Experiment 108547 PARAMETER Experiment Name: Zm_Imbibed_Seeds_P Parameter: Age (day) Value: 4 vs. 2
  misc_feature: MA Experiment 108547 PARAMETER Experiment Name: Zm_Imbibed_Seeds_P Parameter: Organism Value: Zea mays
  misc_feature: MA Experiment 108547 PARAMETER Experiment Name: Zm_Imbibed_Seeds_P Parameter: Plant Line Value: 35A19
  misc_feature: MA Experiment 108547 PARAMETER Experiment Name: Zm_Imbibed_Seeds_P Parameter: Tissue Value: Aerial vs. Embryo
  misc_feature: MA Experiment ID: 20000477 Result: Down-regulated in Transcription
  misc_feature: MA Experiment 20000477 PARAMETER Experiment Name: Zm_5mM_SA_P Parameter: Age (day) Value: 10
  misc_feature: MA Experiment 20000477 PARAMETER Experiment Name: Zm_5mM_SA_P Parameter: Organism Value: Zea mays
  misc_feature: MA Experiment 20000477 PARAMETER Experiment Name: Zm_5mM_SA_P Parameter: Plant Line Value: 35A19
  misc_feature: MA Experiment 20000477 PARAMETER Experiment Name: Zm_5mM_SA_P Parameter: Timepoint (hr) Value: 48
  misc_feature: MA Experiment 20000477 PARAMETER Experiment Name: Zm_5mM_SA_P Parameter: Tissue Value: Aerial
  misc_feature: MA Experiment 20000477 PARAMETER Experiment Name: Zm_5mM_SA_P Parameter: Treatment Value: 5mM SA vs. No Treatment
  misc_feature: MA Experiment ID: 20000478 Result: Down-regulated in Transcription
  misc_feature: MA Experiment 20000478 PARAMETER Experiment Name: Zm_5mM_SA_P Parameter: Age (day) Value: 11
  misc_feature: MA Experiment 20000478 PARAMETER Experiment Name: Zm_5mM_SA_P Parameter: Organism Value: Zea mays
  misc_feature: MA Experiment 20000478 PARAMETER Experiment Name: Zm_5mM_SA_P Parameter: Plant Line Value: 35A19
  misc_feature: MA Experiment 20000478 PARAMETER Experiment Name: Zm_5mM_SA_P Parameter: Timepoint (hr) Value: 72
  misc_feature: MA Experiment 20000478 PARAMETER Experiment Name: Zm_5mM_SA_P Parameter: Tissue Value: Aerial
  misc_feature: MA Experiment 20000478 PARAMETER Experiment Name: Zm_5mM_SA_P Parameter: Treatment Value: 5mM SA vs. No Treatment
  misc_feature: MA Experiment ID: 20000479 Result: Down-regulated in Transcription
  misc_feature: MA Experiment 20000479 PARAMETER Experiment Name: Zm_Drought_P Parameter: Age (day) Value: 10
  misc_feature: MA Experiment 20000479 PARAMETER Experiment Name: Zm_Drought_P Parameter: Organism Value: Zea mays
  misc_feature: MA Experiment 20000479 PARAMETER Experiment Name: Zm_Drought_P Parameter: Plant Line Value: 35A19
  misc_feature: MA Experiment 20000479 PARAMETER Experiment Name: Zm_Drought_P Parameter: Timepoint (hr) Value: 48
  misc_feature: MA Experiment 20000479 PARAMETER Experiment Name: Zm_Drought_P Parameter: Tissue Value: Aerial
  misc_feature: MA Experiment 20000479 PARAMETER Experiment Name: Zm_Drought_P Parameter: Treatment Value: Drought vs. No Drought
  misc_feature: MA Experiment ID: 20000480 Result: Down-regulated in Transcription
  misc_feature: MA Experiment 20000480 PARAMETER Experiment Name: Zm_Drought_P Parameter: Age (day) Value: 11
  misc_feature: MA Experiment 20000480 PARAMETER Experiment Name: Zm_Drought_P Parameter: Organism Value: Zea mays
  misc_feature: MA Experiment 20000480 PARAMETER Experiment Name: Zm_Drought_P Parameter: Plant Line Value: 35A19
  misc_feature: MA Experiment 20000480 PARAMETER Experiment Name: Zm_Drought_P Parameter: Timepoint (hr) Value: 72
  misc_feature: MA Experiment 20000480 PARAMETER Experiment Name: Zm_Drought_P Parameter: Tissue Value: Aerial
  misc_feature: MA Experiment 20000480 PARAMETER Experiment Name: Zm_Drought_P Parameter: Treatment Value: Drought vs. No Drought
acgccatacaattctcacacgcgcgcgcccaacacactagcctgcaggatcgtcgagcgcgaggcggctgccccgccggccggttcgttcgctctatagcttgagaccgatcctagggccaagacgatatcggcggcgatgatgatggacgcggcgaggatcgtagagtacttcaagggcaagtgcatcctcgtcaccggctcaacagggtttcttggaaagatccttgtggagaagatactgcgggtgcagcctgacgtgcgcaagatttacctgcttgtacgcgcggtcgacgagccatcagcgaagcagcgcgtccaacaagaggtgatagacacggagctgttcggcctgctgagagagaaacacggcaagggcttccagcagttcgtagaggccaaggtcgtcgctttggccggagacatcgtatacgacggcctggggctggaggcagccgtgctggacgcgctggccaaggacgtcgacgtcatcgtcaacatcgcagcaaccaccaacttctacgaaagatacgatgtttcgctggacgtgaacgtgctgggagtgaagcacctgtgcatgttcgccaagcagtgcgcgaggctcaggatgctcatgcacgtctccactgccttcgtctcgggcttcagggagggcctcatcctggagaagcccatcaagcccggcgagtcgctgcgggagggcacgtacctggacgtggacgcggagctgcgcctcgtcaaggaggtgaagaagtcgctggcggcgaacggcgatggcgacggcgacagcacggagcggaaggccatgaaggatctgggcctccggcgggcgcggcacttcgggtggtccaacacgtacgtgttcaccaaggccatgggggaggccgtgctgggccagcagctccggggcggcgacgtccccgtggcggtgatgcggcccagcatcatcaccagcgtccggcgcgacccgctgcccgggtggatgcagggcacccgcaccatcgacagcatcatcatcggctacgccaagcagaacctgtcctgcttcctcgccgacctccgcctcgtcatggacgtcatccccggggacatggtggtcaacgccatgatggcggccgtggtggcgcactcggaggcgttcgcgccgccgctgccgcaggtggtggtgtaccacgccacctcgtcgctgcgcaacccggccacctacgacgtgctctaccagtccggacgccgccatttctacgagaacccgcgcgtcggcaaggacggcagggtcatccccaccagggagatgtacttcttcaccagcatcgccaggttccacctctacatgactctcatctacaaggtgccattagagattctgcaccttgtgaatctgctgctctgtggccttctctcgcggctctacaacgacctcaaccgcaagtacaagtttgtgatgcatctggttgacgtctacggcccattcgccttcttcaaaggatgcttcgatgacataaacctggagcggctaaggctggcaatggcgatgaagacccctgaggatcaaatgttcaatttcgaccctaagaccatcgactgggacgattacttcaccagaatccacatccctggtattctcaagtatgtgtgcaagtgaagccttctttcttcagtctatttgcagcatgcacatgcttcttcttcgccttcttactatcgaaagttaatggctcatattctttatgaaagaaatttataccactctgtttggttgtacctgttctatggatcgaccgggtgttaccaagaaacaaaaataattcgatctctgctagattgatatagttctgtatgggagagactgaggcccctcatatcgtaaatcaatagtgatcgtcaaacgagtgtatgctgtgttaggtggcagccaatatgtatcttgattaattgagaacttgtaatctgtgtcatatgtacgcgtgtcactgtcagtgacaatgaaaagcaaatgtaatatctatttataatggcagtgaaattc

SEQ ID NO: 17251 - protein, 500 aa, Zea mays subsp. mays
  peptide (1)..(500): Ceres Seq. ID no. 12417569
  misc_feature (292)..(498): Pfam Name: Male sterility protein Pfam Description: Male sterility protein
  misc_feature (3)..(498): Homolog of NCBI NO: 16323107 NR Description: AT4g33790/T16L1_280 [Arabidopsis thaliana]
  misc_feature (2)..(498): Homolog of NCBI NO: 5020215 NR Description: acyl CoA reductase [Simmondsia chinensis]
  misc_feature (9)..(500): Homolog of NCBI NO: 15242260 NR Description: male sterility 2-like protein (emb|CAA68191.1)
  misc_feature (3)..(460): Homolog of NCBI NO: 34394121 NR Description: putative fatty acyl coA reductase
  misc_feature (3)..(497): Homolog of NCBI NO: 38346871 NR Description: OSJNBb0002N06.11 [Oryza sativa (japonica
  misc_feature (3)..(497): Homolog of NCBI NO: 38346864 NR Description: OSJNBb0002N06.4 [Oryza sativa (japonica
  misc_feature (3)..(419): Homolog of NCBI NO: 22003086 NR Description: fatty acyl coA reductase [Triticum aestivum]
  misc_feature (3)..(499): Homolog of NCBI NO: 35215152 NR Description: putative fatty acyl coA reductase
  misc_feature (8)..(500): Homolog of NCBI NO: 22003082 NR Description: fatty acyl coA reductase [Triticum aestivum]
  misc_feature (7)..(498): Homolog of NCBI NO: 22003090 NR Description: fatty acyl coA reductase [Triticum aestivum]
MMMDAARIVEYFKGKCILVTGSTGFLGKILVEKILRVQPDVRKIYLLVRAVDEPSAKQRVQQEVIDTELFGLLREKHGKGFQQFVEAKVVALAGDIVYDGLGLEAAVLDALAKDVDVIVNIAATTNFYERYDVSLDVNVLGVKHLCMFAKQCARLRMLMHVSTAFVSGFREGLILEKPIKPGESLREGTYLDVDAELRLVKEVKKSLAANGDGDGDSTERKAMKDLGLRRARHFGWSNTYVFTKAMGEAVLGQQLRGGDVPVAVMRPSIITSVRRDPLPGWMQGTRTIDSIIIGYAKQNLSCFLADLRLVMDVIPGDMVVNAMMAAVVAHSEAFAPPLPQVVVYHATSSLRNPATYDVLYQSGRRHFYENPRVGKDGRVIPTREMYFFTSIARFHLYMTLIYKVPLEILHLVNLLLCGLLSRLYNDLNRKYKFVMHLVDVYGPFAFFKGCFDDINLERLRLAMAMKTPEDQMFNFDPKTIDWDDYFTRIHIPGILKYVCK

SEQ ID NO: 17252 - protein, 499 aa, Zea mays subsp. mays
  peptide (1)..(499): Ceres Seq. ID no. 12417570
  misc_feature (291)..(497): Pfam Name: Male sterility protein Pfam Description: Male sterility protein
  misc_feature (2)..(497): Homolog of NCBI NO: 16323107 NR Description: AT4g33790/T16L1_280 [Arabidopsis thaliana]
  misc_feature (1)..(497): Homolog of NCBI NO: 5020215 NR Description: acyl CoA reductase [Simmondsia chinensis]
  misc_feature (8)..(499): Homolog of NCBI NO: 15242260 NR Description: male sterility 2-like protein (emb|CAA68191.1)
  misc_feature (2)..(459): Homolog of NCBI NO: 34394121 NR Description: putative fatty acyl coA reductase
  misc_feature (2)..(496): Homolog of NCBI NO: 38346871 NR Description: OSJNBb0002N06.11 [Oryza sativa (japonica
  misc_feature (2)..(496): Homolog of NCBI NO: 38346864 NR Description: OSJNBb0002N06.4 [Oryza sativa (japonica
  misc_feature (2)..(418): Homolog of NCBI NO: 22003086 NR Description: fatty acyl coA reductase [Triticum aestivum]
  misc_feature (2)..(498): Homolog of NCBI NO: 35215152 NR Description: putative fatty acyl coA reductase
  misc_feature (7)..(499): Homolog of NCBI NO: 22003082 NR Description: fatty acyl coA reductase [Triticum aestivum]
  misc_feature (6)..(497): Homolog of NCBI NO: 22003090 NR Description: fatty acyl coA reductase [Triticum aestivum]
MMDAARIVEYFKGKCILVTGSTGFLGKILVEKILRVQPDVRKIYLLVRAVDEPSAKQRVQQEVIDTELFGLLREKHGKGFQQFVEAKVVALAGDIVYDGLGLEAAVLDALAKDVDVIVNIAATTNFYERYDVSLDVNVLGVKHLCMFAKQCARLRMLMHVSTAFVSGFREGLILEKPIKPGESLREGTYLDVDAELRLVKEVKKSLAANGDGDGDSTERKAMKDLGLRRARHFGWSNTYVFTKAMGEAVLGQQLRGGDVPVAVMRPSIITSVRRDPLPGWMQGTRTIDSIIIGYAKQNLSCFLADLRLVMDVIPGDMVVNAMMAAVVAHSEAFAPPLPQVVVYHATSSLRNPATYDVLYQSGRRHFYENPRVGKDGRVIPTREMYFFTSIARFHLYMTLIYKVPLEILHLVNLLLCGLLSRLYNDLNRKYKFVMHLVDVYGPFAFFKGCFDDINLERLRLAMAMKTPEDQMFNFDPKTIDWDDYFTRIHIPGILKYVCK

SEQ ID NO: 17253 - protein, 498 aa, Zea mays subsp. mays
  peptide (1)..(498): Ceres Seq. ID no. 12417571
  misc_feature (290)..(496): Pfam Name: Male sterility protein Pfam Description: Male sterility protein
  misc_feature (1)..(496): Homolog of NCBI NO: 16323107 NR Description: AT4g33790/T16L1_280 [Arabidopsis thaliana]
  misc_feature (1)..(496): Homolog of NCBI NO: 5020215 NR Description: acyl CoA reductase [Simmondsia chinensis]
  misc_feature (7)..(498): Homolog of NCBI NO: 15242260 NR Description: male sterility 2-like protein (emb|CAA68191.1)
  misc_feature (1)..(458): Homolog of NCBI NO: 34394121 NR Description: putative fatty acyl coA reductase
  misc_feature (1)..(495): Homolog of NCBI NO: 38346871 NR Description: OSJNBb0002N06.11 [Oryza sativa (japonica
  misc_feature (1)..(495): Homolog of NCBI NO: 38346864 NR Description: OSJNBb0002N06.4 [Oryza sativa (japonica
  misc_feature (1)..(417): Homolog of NCBI NO: 22003086 NR Description: fatty acyl coA reductase [Triticum aestivum]
  misc_feature (1)..(497): Homolog of NCBI NO: 35215152 NR Description: putative fatty acyl coA reductase
  misc_feature (6)..(498): Homolog of NCBI NO: 22003082 NR Description: fatty acyl coA reductase [Triticum aestivum]
  misc_feature (5)..(496): Homolog of NCBI NO: 22003090 NR Description: fatty acyl coA reductase [Triticum aestivum]
MDAARIVEYFKGKCILVTGSTGFLGKILVEKILRVQPDVRKIYLLVRAVDEPSAKQRVQQEVIDTELFGLLREKHGKGFQQFVEAKVVALAGDIVYDGLGLEAAVLDALAKDVDVIVNIAATTNFYERYDVSLDVNVLGVKHLCMFAKQCARLRMLMHVSTAFVSGFREGLILEKPIKPGESLREGTYLDVDAELRLVKEVKKSLAANGDGDGDSTERKAMKDLGLRRARHFGWSNTYVFTKAMGEAVLGQQLRGGDVPVAVMRPSIITSVRRDPLPGWMQGTRTIDSIIIGYAKQNLSCFLADLRLVMDVIPGDMVVNAMMAAVVAHSEAFAPPLPQVVVYHATSSLRNPATYDVLYQSGRRHFYENPRVGKDGRVIPTREMYFFTSIARFHLYMTLIYKVPLEILHLVNLLLCGLLSRLYNDLNRKYKFVMHLVDVYGPFAFFKGCFDDINLERLRLAMAMKTPEDQMFNFDPKTIDWDDYFTRIHIPGILKYVCK

SEQ ID NO: 17254 - DNA, 2007 bp, Zea mays subsp. mays
  misc_feature (1)..(2007): Ceres Seq. ID no. 12417447
  misc_feature: MA Experiment ID: 108529 Result: Down-regulated in Transcription
  misc_feature: MA Experiment 108529 PARAMETER Experiment Name: Zm_Imbibed_Seeds_P Parameter: Age (day) Value: 5 vs. 2
  misc_feature: MA Experiment 108529 PARAMETER Experiment Name: Zm_Imbibed_Seeds_P Parameter: Organism Value: Zea mays
  misc_feature: MA Experiment 108529 PARAMETER Experiment Name: Zm_Imbibed_Seeds_P Parameter: Plant Line Value: 35A19
  misc_feature: MA Experiment 108529 PARAMETER Experiment Name: Zm_Imbibed_Seeds_P Parameter: Tissue Value: Roots vs. Embryo
  misc_feature: MA Experiment ID: 108534 Result: Up-regulated in Transcription
  misc_feature: MA Experiment 108534 PARAMETER Experiment Name: Zm_4deg_Cold_P Parameter: Age (hr) Value: 8
  misc_feature: MA Experiment 108534 PARAMETER Experiment Name: Zm_4deg_Cold_P Parameter: Organism Value: Zea mays
  misc_feature: MA Experiment 108534 PARAMETER Experiment Name: Zm_4deg_Cold_P Parameter: Plant Line Value: 35A19
  misc_feature: MA Experiment 108534 PARAMETER Experiment Name: Zm_4deg_Cold_P Parameter: Temperature (deg C) Value: 4 vs. 22
  misc_feature: MA Experiment 108534 PARAMETER Experiment Name: Zm_4deg_Cold_P Parameter: Timepoint (hr) Value: 6
  misc_feature: MA Experiment 108534 PARAMETER Experiment Name: Zm_4deg_Cold_P Parameter: Tissue Value: Aerial
  misc_feature: MA Experiment ID: 108535 Result: Down-regulated in Transcription
  misc_feature: MA Experiment 108535 PARAMETER Experiment Name: Zm_Meristem_P Parameter: Age (day) Value: 8
  misc_feature: MA Experiment 108535 PARAMETER Experiment Name: Zm_Meristem_P Parameter: Organism Value: Zea mays
  misc_feature: MA Experiment 108535 PARAMETER Experiment Name: Zm_Meristem_P Parameter: Plant Line Value: 35A19
  misc_feature: MA Experiment 108535 PARAMETER Experiment Name: Zm_Meristem_P Parameter: Tissue Value: Root Meristem vs. Above Root Meristem
  misc_feature: MA Experiment ID: 108546 Result: Down-regulated in Transcription
  misc_feature: MA Experiment 108546 PARAMETER Experiment Name: Zm_Imbibed_Seeds_P Parameter: Age (day) Value: 3 vs. 2
  misc_feature: MA Experiment 108546 PARAMETER Experiment Name: Zm_Imbibed_Seeds_P Parameter: Organism Value: Zea mays
  misc_feature: MA Experiment 108546 PARAMETER Experiment Name: Zm_Imbibed_Seeds_P Parameter: Plant Line Value: 35A19
  misc_feature: MA Experiment 108546 PARAMETER Experiment Name: Zm_Imbibed_Seeds_P Parameter: Tissue Value: Roots vs. Embryo
  misc_feature: MA Experiment ID: 20000478 Result: Down-regulated in Transcription
  misc_feature: MA Experiment 20000478 PARAMETER Experiment Name: Zm_5mM_SA_P Parameter: Age (day) Value: 11
  misc_feature: MA Experiment 20000478 PARAMETER Experiment Name: Zm_5mM_SA_P Parameter: Organism Value: Zea mays
  misc_feature: MA Experiment 20000478 PARAMETER Experiment Name: Zm_5mM_SA_P Parameter: Plant Line Value: 35A19
  misc_feature: MA Experiment 20000478 PARAMETER Experiment Name: Zm_5mM_SA_P Parameter: Timepoint (hr) Value: 72
  misc_feature: MA Experiment 20000478 PARAMETER Experiment Name: Zm_5mM_SA_P Parameter: Tissue Value: Aerial
  misc_feature: MA Experiment 20000478 PARAMETER Experiment Name: Zm_5mM_SA_P Parameter: Treatment Value: 5mM SA vs. No Treatment
  misc_feature: MA Experiment ID: 20000479 Result: Down-regulated in Transcription
  misc_feature: MA Experiment 20000479 PARAMETER Experiment Name: Zm_Drought_P Parameter: Age (day) Value: 10
  misc_feature: MA Experiment 20000479 PARAMETER Experiment Name: Zm_Drought_P Parameter: Organism Value: Zea mays
  misc_feature: MA Experiment 20000479 PARAMETER Experiment Name: Zm_Drought_P Parameter: Plant Line Value: 35A19
  misc_feature: MA Experiment 20000479 PARAMETER Experiment Name: Zm_Drought_P Parameter: Timepoint (hr) Value: 48
  misc_feature: MA Experiment 20000479 PARAMETER Experiment Name: Zm_Drought_P Parameter: Tissue Value: Aerial
  misc_feature: MA Experiment 20000479 PARAMETER Experiment Name: Zm_Drought_P Parameter: Treatment Value: Drought vs. No Drought
  misc_feature: MA Experiment ID: 20000480 Result: Down-regulated in Transcription
  misc_feature: MA Experiment 20000480 PARAMETER Experiment Name: Zm_Drought_P Parameter: Age (day) Value: 11
  misc_feature: MA Experiment 20000480 PARAMETER Experiment Name: Zm_Drought_P Parameter: Organism Value: Zea mays
  misc_feature: MA Experiment 20000480 PARAMETER Experiment Name: Zm_Drought_P Parameter: Plant Line Value: 35A19
  misc_feature: MA Experiment 20000480 PARAMETER Experiment Name: Zm_Drought_P Parameter: Timepoint (hr) Value: 72
  misc_feature: MA Experiment 20000480 PARAMETER Experiment Name: Zm_Drought_P Parameter: Tissue Value: Aerial
  misc_feature: MA Experiment 20000480 PARAMETER Experiment Name: Zm_Drought_P Parameter: Treatment Value: Drought vs. No Drought
  misc_feature: MA Experiment ID: 20000532 Result: Up-regulated in Transcription
  misc_feature: MA Experiment 20000532 PARAMETER Experiment Name: Zm_0.001percent_MeJA_P Parameter: Age (day) Value: 10
  misc_feature: MA Experiment 20000532 PARAMETER Experiment Name: Zm_0.001percent_MeJA_P Parameter: Organism Value: Zea mays
  misc_feature: MA Experiment 20000532 PARAMETER Experiment Name: Zm_0.001percent_MeJA_P Parameter: Plant Line Value: 35A19
  misc_feature: MA Experiment 20000532 PARAMETER Experiment Name: Zm_0.001percent_MeJA_P Parameter: Timepoint (hr) Value: 48
  misc_feature: MA Experiment 20000532 PARAMETER Experiment Name: Zm_0.001percent_MeJA_P Parameter: Tissue Value: Aerial
  misc_feature: MA Experiment 20000532 PARAMETER Experiment Name: Zm_0.001percent_MeJA_P Parameter: Treatment Value: 0.001percent MeJA vs. No Treatment
  misc_feature: MA Experiment ID: 20000533 Result: Up-regulated in Transcription
  misc_feature: MA Experiment 20000533 PARAMETER Experiment Name: Zm_0.001percent_MeJA_P Parameter: Age (day) Value: 11
  misc_feature: MA Experiment 20000533 PARAMETER Experiment Name: Zm_0.001percent_MeJA_P Parameter: Organism Value: Zea mays
  misc_feature: MA Experiment 20000533 PARAMETER Experiment Name: Zm_0.001percent_MeJA_P Parameter: Plant Line Value: 35A19
  misc_feature: MA Experiment 20000533 PARAMETER Experiment Name: Zm_0.001percent_MeJA_P Parameter: Timepoint (hr) Value: 72
  misc_feature: MA Experiment 20000533 PARAMETER Experiment Name: Zm_0.001percent_MeJA_P Parameter: Tissue Value: Aerial
  misc_feature: MA Experiment 20000533 PARAMETER Experiment Name: Zm_0.001percent_MeJA_P Parameter: Treatment Value: 0.001percent MeJA vs. No Treatment
gcacgagaccattacctagaacatccaatcaaaaaagcatgtctcgcgggtcctgccgtctcgtcgccactactgactactgaggagaggagcatggccctgactaacgtcttcgtcgtcctcctgagtaccgcattggctgtgctccccttctcccctgccgatgccggcgtggtgggcgtgagctacggccgattagggaacgacctgccgggcacggcttcggtggtaaagctgctgaagaagagcggcatcacctcggtgaggctctacgacgccaactcaaaggtgctcaaggccctggccaacaccgggatcacggtgatggtaatgctacccaacgacaagctcgccgcggcggccgcggacccgtcgagcgcgcgacggtgggtgcggaggaacgtggcggcgtactaccccgccacgcacatccacgccgtcgccgtcgggaacgaggtgttcgaggaggccaagaacctgaccgggcagctcgtcccggccatgtccaacgtgcacgacgcgctggtgaagcttggcctggacggggccgtgaaggtctcgacgccgatcgcgttcaccgcgctccaggagtcgtggccgccgtccgcgggcaggttccgggacgacatcgcgcggtcggtgatgaagcccatgatcgatttcctggagcggaccgggtcgtacctcaccgtgaacgcctacccgttcttcgcgtacgccgaggagccagacaagatctccctcgactacgccctggggaactccaacgccaccggcgtgcgcgaccccgtgaccgggctcgtgtaccacagcctcctggacgcccagctcgacgccacgtacttcgcgatggagaagctggggacgtccagatccagtgcgcgggggccaaattccgtggcgccagcagcgcacgtttcggagagcgggtgcgccttccggcggcaaacccaaacgcggcggcaggccgcggccacgcccacgcggcggcgggaggcgtttggagttggagcaggctggaggtgaagcggcttcggtagccaacgcgcaagcgtacaacaactacctgatcaagcgcgtgctgtccggtgacacgggcaccccgtaccaccccgacgccgacatggacgtctacatcttctccctcttcaacgagaaccagaagggcgacggggcggacgacgtcgagcagcacttcgggctgttctacccgaaccggacgaaggtgtacgagttcgacttccggggcggcgcgctggtggccagctggtgcgtggcgaacgcgtccgccggggacgcgcggctgcaggcggcgctggagtacgcgtgcggccacggcgccgactgcggcgccatccagcccggcgcgccgtgcttcgagcccgacaccaggctcgcgcacgcctcgtatgcgttcaacagctactaccagcgcaacggccggggccaaggcggcgtgcgacttcgacggcgccgcctacgtcgtgtatcacgaaccagctggcacctgtgacccgaacgtgagctggtgcgtggcgaatgcggcggccggcgacgcgcggctgctggcagcgctgaactacgcgtgtgccaacggcgcggactgcggcgccatacagcccggcggagcgtgcttcgagcccaacaccgtggtcgcccacgcctcgtacgcgttcaacagctactaccagcggaaggggcggggcagcgggacgtgcgacttcgccggagccggttccgtggtctaccacgcgccaaagattattgggaagtgcgtcctcccgtcgaaagcttggattcaagaaacaacaacagtcaagtctagaggattcaagacaagttcggtttaacctcgtactaggaacgtagaataatgtaaacattggcatctgcacatcaggataactgatgtctttgtgttgctttgcttttcggacactcatgaaccatcgttcctgtttcctgaggcggatctcctgctaggtttggttcccggcttctggcttt

SEQ ID NO: 17255 - protein, 341 aa, Zea mays subsp. mays
  peptide (1)..(341): Ceres Seq. ID no. 12417448
  misc_feature (59)..(288): Pfam Name: Glycosyl hydrolases family 17 Pfam Description: Glycosyl hydrolases family 17
  misc_feature (32)..(288): Homolog of NCBI NO: 11279331 NR Description: beta-1,3-glucanase (EC 3.2.1.-) precursor
  misc_feature (41)..(287): Homolog of NCBI NO: 25316444 NR Description: probable beta-1,3-glucanase [imported] -
  misc_feature (41)..(287): Homolog of NCBI NO: 30678225 NR Description: glycosyl hydrolase family 17 [Arabidopsis
  misc_feature (52)..(288): Homolog of NCBI NO: 11071974 NR Description: elicitor inducible beta-1,3-glucanase Nt-SubE76
  misc_feature (88)..(293): Homolog of NCBI NO: 33146691 NR Description: putative beta-1,3-glucanase precursor
  misc_feature (32)..(309): Homolog of NCBI NO: 34394950 NR Description: putative beta-1,3-glucanase
  misc_feature (34)..(310): Homolog of NCBI NO: 34394953 NR Description: putative beta-1,3-glucanase
  misc_feature (32)..(310): Homolog of NCBI NO: 40253222 NR Description: putative beta-1,3-glucanase (EC 3.2.1.-)
  misc_feature (24)..(337): Homolog of NCBI NO: 34394955 NR Description: putative beta-1,3-glucanase
  misc_feature (32)..(310): Homolog of NCBI NO: 34394937 NR Description: putative beta-1,3-glucanase
ARDHYLEHPIKKACLAGPAVSSPLLTTEERSMALTNVFVVLLSTALAVLPFSPADAGVVGVSYGRLGNDLPGTASVVKLLKKSGITSVRLYDANSKVLKALANTGITVMVMLPNDKLAAAAADPSSARRWVRRNVAAYYPATHIHAVAVGNEVFEEAKNLTGQLVPAMSNVHDALVKLGLDGAVKVSTPIAFTALQESWPPSAGRFRDDIARSVMKPMIDFLERTGSYLTVNAYPFFAYAEEPDKISLDYALGNSNATGVRDPVTGLVYHSLLDAQLDATYFAMEKLGTSRSSARGPNSVAPAAHVSESGCAFRRQTQTRRQAAATPTRRREAFGVGAGWR

SEQ ID NO: 17256 - protein, 310 aa, Zea mays subsp. mays
  peptide (1)..(310): Ceres Seq. ID no. 12417449
  misc_feature (28)..(257): Pfam Name: Glycosyl hydrolases family 17 Pfam Description: Glycosyl hydrolases family 17
  misc_feature (1)..(257): Homolog of NCBI NO: 11279331 NR Description: beta-1,3-glucanase (EC 3.2.1.-) precursor
  misc_feature (10)..(256): Homolog of NCBI NO: 25316444 NR Description: probable beta-1,3-glucanase [imported] -
  misc_feature (10)..(256): Homolog of NCBI NO: 30678225 NR Description: glycosyl hydrolase family 17 [Arabidopsis
  misc_feature (21)..(257): Homolog of NCBI NO: 11071974 NR Description: elicitor inducible beta-1,3-glucanase Nt-SubE76
  misc_feature (57)..(262): Homolog of NCBI NO: 33146691 NR Description: putative beta-1,3-glucanase precursor
  misc_feature (1)..(278): Homolog of NCBI NO: 34394950 NR Description: putative beta-1,3-glucanase
  misc_feature (3)..(279): Homolog of NCBI NO: 34394953 NR Description: putative beta-1,3-glucanase
  misc_feature (1)..(279): Homolog of NCBI NO: 40253222 NR Description: putative beta-1,3-glucanase (EC 3.2.1.-)
  misc_feature (1)..(306): Homolog of NCBI NO: 34394955 NR Description: putative beta-1,3-glucanase
  misc_feature (1)..(279): Homolog of NCBI NO: 34394937 NR Description: putative beta-1,3-glucanase
MALTNVFVVLLSTALAVLPFSPADAGVVGVSYGRLGNDLPGTASVVKLLKKSGITSVRLYDANSKVLKALANTGITVMVMLPNDKLAAAAADPSSARRWVRRNVAAYYPATHIHAVAVGNEVFEEAKNLTGQLVPAMSNVHDALVKLGLDGAVKVSTPIAFTALQESWPPSAGRFRDDIARSVMKPMIDFLERTGSYLTVNAYPFFAYAEEPDKISLDYALGNSNATGVRDPVTGLVYHSLLDAQLDATYFAMEKLGTSRSSARGPNSVAPAAHVSESGCAFRRQTQTRRQAAATPTRRREAFGVGAGWR

SEQ ID NO: 17257 - protein, 233 aa, Zea mays subsp. mays
  peptide (1)..(233): Ceres Seq. ID no. 12417450
  misc_feature (1)..(180): Pfam Name: Glycosyl hydrolases family 17 Pfam Description: Glycosyl hydrolases family 17
  misc_feature (1)..(180): Homolog of NCBI NO: 11279331 NR Description: beta-1,3-glucanase (EC 3.2.1.-) precursor
  misc_feature (1)..(179): Homolog of NCBI NO: 25316444 NR Description: probable beta-1,3-glucanase [imported] -
  misc_feature (1)..(179): Homolog of NCBI NO: 30678225 NR Description: glycosyl hydrolase family 17 [Arabidopsis
  misc_feature (1)..(180): Homolog of NCBI NO: 11071974 NR Description: elicitor inducible beta-1,3-glucanase Nt-SubE76
  misc_feature (1)..(185): Homolog of NCBI NO: 33146691 NR Description: putative beta-1,3-glucanase precursor
  misc_feature (1)..(201): Homolog of NCBI NO: 34394950 NR Description: putative beta-1,3-glucanase
  misc_feature (1)..(202): Homolog of NCBI NO: 34394953 NR Description: putative beta-1,3-glucanase
  misc_feature (1)..(202): Homolog of NCBI NO: 40253222 NR Description: putative beta-1,3-glucanase (EC 3.2.1.-)
  misc_feature (1)..(229): Homolog of NCBI NO: 34394955 NR Description: putative beta-1,3-glucanase
  misc_feature (1)..(202): Homolog of NCBI NO: 34394937 NR Description: putative beta-1,3-glucanase
MVMLPNDKLAAAAADPSSARRWVRRNVAAYYPATHIHAVAVGNEVFEEAKNLTGQLVPAMSNVHDALVKLGLDGAVKVSTPIAFTALQESWPPSAGRFRDDIARSVMKPMIDFLERTGSYLTVNAYPFFAYAEEPDKISLDYALGNSNATGVRDPVTGLVYHSLLDAQLDATYFAMEKLGTSRSSARGPNSVAPAAHVSESGCAFRRQTQTRRQAAATPTRRREAFGVGAGWR

SEQ ID NO: 17258 - DNA, 2041 bp, Zea mays subsp. mays
  misc_feature (1)..(2041): Ceres Seq. ID no. 12362393
  misc_feature: MA Experiment ID: 108527 Result: Down-regulated in Transcription
  misc_feature: MA Experiment 108527 PARAMETER Experiment Name: Zm_5mM_NO_P Parameter: Age (day) Value: 8
  misc_feature: MA Experiment 108527 PARAMETER Experiment Name: Zm_5mM_NO_P Parameter: Organism Value: Zea mays
  misc_feature: MA Experiment 108527 PARAMETER Experiment Name: Zm_5mM_NO_P Parameter: Plant Line Value: 35A19
  misc_feature: MA Experiment 108527 PARAMETER Experiment Name: Zm_5mM_NO_P Parameter: Timepoint (hr) Value: 6
  misc_feature: MA Experiment 108527 PARAMETER Experiment Name: Zm_5mM_NO_P Parameter: Tissue Value: Aerial
  misc_feature: MA Experiment 108527 PARAMETER Experiment Name: Zm_5mM_NO_P Parameter: Treatment Value: 5mM NO vs. No Treatment
  misc_feature: MA Experiment ID: 108535 Result: Down-regulated in Transcription
  misc_feature: MA Experiment 108535 PARAMETER Experiment Name: Zm_Meristem_P Parameter: Age (day) Value: 8
  misc_feature: MA Experiment 108535 PARAMETER Experiment Name: Zm_Meristem_P Parameter: Organism Value: Zea mays
  misc_feature: MA Experiment 108535 PARAMETER Experiment Name: Zm_Meristem_P Parameter: Plant Line Value: 35A19
  misc_feature: MA Experiment 108535 PARAMETER Experiment Name: Zm_Meristem_P Parameter: Tissue Value: Root Meristem vs. Above Root Meristem
  misc_feature: MA Experiment ID: 20000480 Result: Down-regulated in Transcription
  misc_feature: MA Experiment 20000480 PARAMETER Experiment Name: Zm_Drought_P Parameter: Age (day) Value: 11
  misc_feature: MA Experiment 20000480 PARAMETER Experiment Name: Zm_Drought_P Parameter: Organism Value: Zea mays
  misc_feature: MA Experiment 20000480 PARAMETER Experiment Name: Zm_Drought_P Parameter: Plant Line Value: 35A19
  misc_feature: MA Experiment 20000480 PARAMETER Experiment Name: Zm_Drought_P Parameter: Timepoint (hr) Value: 72
  misc_feature: MA Experiment 20000480 PARAMETER Experiment Name: Zm_Drought_P Parameter: Tissue Value: Aerial
  misc_feature: MA Experiment 20000480 PARAMETER Experiment Name: Zm_Drought_P Parameter: Treatment Value: Drought vs. No Drought
  misc_feature: MA Experiment ID: 20000492 Result: Down-regulated in Transcription
  misc_feature: MA Experiment 20000492 PARAMETER Experiment Name: Zm_Hybrid_Seed_Dev_P Parameter: DAP Value: 12
  misc_feature: MA Experiment 20000492 PARAMETER Experiment Name: Zm_Hybrid_Seed_Dev_P Parameter: Organism Value: Zea mays
  misc_feature: MA Experiment 20000492 PARAMETER Experiment Name: Zm_Hybrid_Seed_Dev_P Parameter: Plant Line Value: 35A19
  misc_feature: MA Experiment 20000492 PARAMETER Experiment Name: Zm_Hybrid_Seed_Dev_P Parameter: Tissue Value: Fert Kernel vs. Unfert Floret
  misc_feature: MA Experiment ID: 20000535 Result: Down-regulated in Transcription
  misc_feature: MA Experiment 20000535 PARAMETER Experiment Name: Zm_Hybrid_Seed_Dev_P Parameter: DAP Value: 30 vs. 12
  misc_feature: MA Experiment 20000535 PARAMETER Experiment Name: Zm_Hybrid_Seed_Dev_P Parameter: Organism Value: Zea mays
  misc_feature: MA Experiment 20000535 PARAMETER Experiment Name: Zm_Hybrid_Seed_Dev_P Parameter: Plant Line Value: 35A19
  misc_feature: MA Experiment 20000535 PARAMETER Experiment Name: Zm_Hybrid_Seed_Dev_P Parameter: Tissue Value: Embryo vs. Unfert Floret
gcacgagaccattacctagaacatcctaatcaaaaagctgtctaccctcaccaactcctacctcccgagacaaattccgaggtcgacacaagaaaagggaaagaaccacaggtaattgccttcctgtgtcgggattgtagctccaatccactccgcgccggccgggtgcgctgccatccggatcagacgccctcgcatctctcgcccttccggcatcgtatcccctgggcggcagcggagtaaagatccgacccgcttgggattgtttgcttctcctttttgcggtgcgccgctggactccagtgctgcacatgctcgacgacggtgctgagctcctgcaatggcccgaagaaatgccggcgcaatgcagcgggagggttcggcggggtcggttaaggactggtcggaattcgacccttcgccgtctcccaagctggcgtactcgcagtcctacgtcgccatgagagggctgttgacgtcggtggcttctctggaccctgtcctgacgtcgagcagcctcaagtctctgtgggcagccttgtcatcgcacaggcacgctcggtccttggagaggccaaagtacaaggggatgaactggaagaggcccatgttccacctgcttgtgtgcttcttagtgggagttttcattggattcacaccactcttctctctcgatttatccagtaacatagattctgaaaacgagacgcttccgtttgacggggatgtggttaacagacagatgctggaacttaaaagtacaaggttggagccgattgtggctgcggcagagactgaagccgcccaagaacaacaggttgatgagagtcctccagttcctgcgatgctggatgatgaggcggacttcattgaagcgtcacatgtccaaccttctgttaatgattctgacattggtgcaaagaagcagctgataattgtgacaacaacttctgttcgaccacatcaggcttattacttgaaccgcctggctcatgttttaaaaaatgtaccacctcctcttctgtggattgtggcggaatggccgtatcagtcccgtgaaacagcggagatcctgaggtcttctggggttatgtacagacatcttatctgcaatcggaacagtacaaatataaggaagattattgtctgccaaaagaacaatgcaatttttcatatcaagaagcaccgtttagatggtatagtacattttgctgatgaggagcgagtgtactcagttgatttatttgaagacatgcgaaaaatcaggcgctttggtacgtggccagtagcgacacatgttggagccaggtacaaggtggttttggaagggcctgtctgtaggggtaatcaagtcactggatggcatacaaacaagagagggggtgtacctcgtcggtttccaattggtttctctggttttgcttttaacagcactatactttgggatccccagaggtggaacagccccactttagagtctattatactccattcaggtggcagaggtggcttgcaggagtcaagattcatcgagaagcttgtcgaggacgagactcagatggaaggcctcgcagacaactgcactcgggttatggtctggaatttggacttggaacctccacagctgaattaccctactagctggcagctgcagaagaacctagacatcgtcgtgccaataacataaaccgcgatgctgctgctgccctttttgttcgcgcctcctagtgagtgtggtggaatgatgacgacaatgcccatgccttcctgaacttggtagcgtccaggatcacgcgaagctgctctgccaagacctggttcgaataatgtggtactagtaacaacagttggaaagcgaagaagcctgcctgacaaaaggaaaaattctttctccccccgttgcgctgcattaccaatgatcctcaacatagataggcttgtatatttcttttccttccatttttcgattattcctgttcgttacatataccatgcatacatacatacatacataaatacatatacaccttcattcattcat

SEQ ID NO: 17259 - protein, 448 aa, Zea mays subsp. mays
  peptide (1)..(448): Ceres Seq. ID no. 12362394
  misc_feature (216)..(432): Pfam Name: Glycosyltransferase family 43 Pfam Description: Glycosyltransferase family 43
  misc_feature (157)..(376): Homolog of NCBI NO: 6693039 NR Description: T22C5.4 [Arabidopsis thaliana]
  misc_feature (164)..(448): Homolog of NCBI NO: 37532274 NR Description: putative glycosyltransferase
  misc_feature (157)..(432): Homolog of NCBI NO: 5668771 NR Description: Contains similarity to gb|D88035 glycoprotein
  misc_feature (157)..(445): Homolog of NCBI NO: 18396409 NR Description: expressed protein
  misc_feature (190)..(448): Homolog of NCBI NO: 32968172 NR Description: beta3-glucuronyltransferase [Lycopersicon
  misc_feature (126)..(448): Homolog of NCBI NO: 32879545 NR Description: beta3-glucuronyltransferase [Zea mays]
  misc_feature (93)..(444): Homolog of NCBI NO: 32968189 NR Description: beta3-glucuronyltransferase [Triticum aestivum]
  misc_feature (74)..(443): Homolog of NCBI NO: 31979311 NR Description: galactosylgalactosylxylosylprotein
  misc_feature (90)..(442): Homolog of NCBI NO: 31979313 NR Description: galactosylgalactosylxylosylprotein
  misc_feature (1)..(448): Homolog of NCBI NO: 34911082 NR Description: P0485G01.28 [Oryza sativa (japonica
MARRNAGAMQREGSAGSVKDWSEFDPSPSPKLAYSQSYVAMRGLLTSVASLDPVLTSSSLKSLWAALSSHRHARSLERPKYKGMNWKRPMFHLLVCFLVGVFIGFTPLFSLDLSSNIDSENETLPFDGDVVNRQMLELKSTRLEPIVAAAETEAAQEQQVDESPPVPAMLDDEADFIEASHVQPSVNDSDIGAKKQLIIVTTTSVRPHQAYYLNRLAHVLKNVPPPLLWIVAEWPYQSRETAEILRSSGVMYRHLICNRNSTNIRKIIVCQKNNAIFHIKKHRLDGIVHFADEERVYSVDLFEDMRKIRRFGTWPVATHVGARYKVVLEGPVCRGNQVTGWHTNKRGGVPRRFPIGFSGFAFNSTILWDPQRWNSPTLESIILHSGGRGGLQESRFIEKLVEDETQMEGLADNCTRVMVWNLDLEPPQLNYPTSWQLQKNLDIVVPIT

SEQ ID NO: 17260 - protein, 440 aa, Zea mays subsp. mays
  peptide (1)..(440): Ceres Seq. ID no. 12362395
  misc_feature (208)..(424): Pfam Name: Glycosyltransferase family 43 Pfam Description: Glycosyltransferase family 43
  misc_feature (149)..(368): Homolog of NCBI NO: 6693039 NR Description: T22C5.4 [Arabidopsis thaliana]
  misc_feature (156)..(440): Homolog of NCBI NO: 37532274 NR Description: putative glycosyltransferase
  misc_feature (149)..(424): Homolog of NCBI NO: 5668771 NR Description: Contains similarity to gb|D88035 glycoprotein
  misc_feature (149)..(437): Homolog of NCBI NO: 18396409 NR Description: expressed protein
  misc_feature (182)..(440): Homolog of NCBI NO: 32968172 NR Description: beta3-glucuronyltransferase [Lycopersicon
  misc_feature (118)..(440): Homolog of NCBI NO: 32879545 NR Description: beta3-glucuronyltransferase [Zea mays]
  misc_feature (85)..(436): Homolog of NCBI NO: 32968189 NR Description: beta3-glucuronyltransferase [Triticum aestivum]
  misc_feature (66)..(435): Homolog of NCBI NO: 31979311 NR Description: galactosylgalactosylxylosylprotein
  misc_feature (82)..(434): Homolog of NCBI NO: 31979313 NR Description: galactosylgalactosylxylosylprotein
  misc_feature (1)..(440): Homolog of NCBI NO: 34911082 NR Description: P0485G01.28 [Oryza sativa (japonica
MQREGSAGSVKDWSEFDPSPSPKLAYSQSYVAMRGLLTSVASLDPVLTSSSLKSLWAALSSHRHARSLERPKYKGMNWKRPMFHLLVCFLVGVFIGFTPLFSLDLSSNIDSENETLPFDGDVVNRQMLELKSTRLEPIVAAAETEAAQEQQVDESPPVPAMLDDEADFIEASHVQPSVNDSDIGAKKQLIIVTTTSVRPHQAYYLNRLAHVLKNVPPPLLWIVAEWPYQSRETAEILRSSGVMYRHLICNRNSTNIRKIIVCQKNNAIFHIKKHRLDGIVHFADEERVYSVDLFEDMRKIRRFGTWPVATHVGARYKVVLEGPVCRGNQVTGWHTNKRGGVPRRFPIGFSGFAFNSTILWDPQRWNSPTLESIILHSGGRGGLQESRFIEKLVEDETQMEGLADNCTRVMVWNLDLEPPQLNYPTSWQLQKNLDIVVPIT

SEQ ID NO: 17261 - protein, 408 aa, Zea mays subsp. mays
  peptide (1)..(408): Ceres Seq. ID no. 12362396
  misc_feature (176)..(392): Pfam Name: Glycosyltransferase family 43 Pfam Description: Glycosyltransferase family 43
  misc_feature (117)..(336): Homolog of NCBI NO: 6693039 NR Description: T22C5.4 [Arabidopsis thaliana]
  misc_feature (124)..(408): Homolog of NCBI NO: 37532274 NR Description: putative glycosyltransferase
  misc_feature (117)..(392): Homolog of NCBI NO: 5668771 NR Description: Contains similarity to gb|D88035 glycoprotein
  misc_feature (117)..(405): Homolog of NCBI NO: 18396409 NR Description: expressed protein
  misc_feature (150)..(408): Homolog of NCBI NO: 32968172 NR Description: beta3-glucuronyltransferase [Lycopersicon
  misc_feature (86)..(408): Homolog of NCBI NO: 32879545 NR Description: beta3-glucuronyltransferase [Zea mays]
  misc_feature (53)..(404): Homolog of NCBI NO: 32968189 NR Description: beta3-glucuronyltransferase [Triticum aestivum]
  misc_feature (34)..(403): Homolog of NCBI NO: 31979311 NR Description: galactosylgalactosylxylosylprotein
  misc_feature (50)..(402): Homolog of NCBI NO: 31979313 NR Description: galactosylgalactosylxylosylprotein
  misc_feature (1)..(408): Homolog of NCBI NO: 34911082 NR Description: P0485G01.28 [Oryza sativa (japonica
MRGLLTSVASLDPVLTSSSLKSLWAALSSHRHARSLERPKYKGMNWKRPMFHLLVCFLVGVFIGFTPLFSLDLSSNIDSENETLPFDGDVVNRQMLELKSTRLEPIVAAAETEAAQEQQVDESPPVPAMLDDEADFIEASHVQPSVNDSDIGAKKQLIIVTTTSVRPHQAYYLNRLAHVLKNVPPPLLWIVAEWPYQSRETAEILRSSGVMYRHLICNRNSTNIRKIIVCQKNNAIFHIKKHRLDGIVHFADEERVYSVDLFEDMRKIRRFGTWPVATHVGARYKVVLEGPVCRGNQVTGWHTNKRGGVPRRFPIGFSGFAFNSTILWDPQRWNSPTLESIILHSGGRGGLQESRFIEKLVEDETQMEGLADNCTRVMVWNLDLEPPQLNYPTSWQLQKNLDIVVPIT

SEQ ID NO: 17262 - DNA, 472 bp, Zea mays subsp. mays
  misc_feature (1)..(472): Ceres Seq. ID no. 1671642
  misc_feature: MA Experiment ID: 108527 Result: Up-regulated in Transcription
  misc_feature: MA Experiment 108527 PARAMETER Experiment Name: Zm_5mM_NO_P Parameter: Age (day) Value: 8
  misc_feature: MA Experiment 108527 PARAMETER Experiment Name: Zm_5mM_NO_P Parameter: Organism Value: Zea mays
  misc_feature: MA Experiment 108527 PARAMETER Experiment Name: Zm_5mM_NO_P Parameter: Plant Line Value: 35A19
  misc_feature: MA Experiment 108527 PARAMETER Experiment Name: Zm_5mM_NO_P Parameter: Timepoint (hr) Value: 6
  misc_feature: MA Experiment 108527 PARAMETER Experiment Name: Zm_5mM_NO_P Parameter: Tissue Value: Aerial
  misc_feature: MA Experiment 108527 PARAMETER Experiment Name: Zm_5mM_NO_P Parameter: Treatment Value: 5mM NO vs. No Treatment
  misc_feature: MA Experiment ID: 108559 Result: Up-regulated in Transcription
  misc_feature: MA Experiment 108559 PARAMETER Experiment Name: Zm_5mM_NO_P Parameter: Age (day) Value: 8
  misc_feature: MA Experiment 108559 PARAMETER Experiment Name: Zm_5mM_NO_P Parameter: Organism Value: Zea mays
  misc_feature: MA Experiment 108559 PARAMETER Experiment Name: Zm_5mM_NO_P Parameter: Plant Line Value: 35A19
  misc_feature: MA Experiment 108559 PARAMETER Experiment Name: Zm_5mM_NO_P Parameter: Timepoint (hr) Value: 12
  misc_feature: MA Experiment 108559 PARAMETER Experiment Name: Zm_5mM_NO_P Parameter: Tissue Value: Aerial
  misc_feature: MA Experiment 108559 PARAMETER Experiment Name: Zm_5mM_NO_P Parameter: Treatment Value: 5mM NO vs. No Treatment
  misc_feature: MA Experiment ID: 108597 Result: Up-regulated in Transcription
  misc_feature: MA Experiment 108597 PARAMETER Experiment Name: Zm_100uM_ABA_P Parameter: Age (day) Value: 9
  misc_feature: MA Experiment 108597 PARAMETER Experiment Name: Zm_100uM_ABA_P Parameter: Organism Value: Zea mays
  misc_feature: MA Experiment 108597 PARAMETER Experiment Name: Zm_100uM_ABA_P Parameter: Plant Line Value: 35A19
  misc_feature: MA Experiment 108597 PARAMETER Experiment Name: Zm_100uM_ABA_P Parameter: Timepoint (hr) Value: 24
  misc_feature: MA Experiment 108597 PARAMETER Experiment Name: Zm_100uM_ABA_P Parameter: Tissue Value: Aerial
  misc_feature: MA Experiment 108597 PARAMETER Experiment Name: Zm_100uM_ABA_P Parameter: Treatment Value: 100uM ABA vs. No Treatment
  misc_feature: MA Experiment ID: 108689 Result: Up-regulated in Transcription
  misc_feature: MA Experiment 108689 PARAMETER Experiment Name: Zm_Drought_Roots_P Parameter: Age (day) Value: 9
  misc_feature: MA Experiment 108689 PARAMETER Experiment Name: Zm_Drought_Roots_P Parameter: Organism Value: Zea mays
  misc_feature: MA Experiment 108689 PARAMETER Experiment Name: Zm_Drought_Roots_P Parameter: Plant Line Value: 35A19
  misc_feature: MA Experiment 108689 PARAMETER Experiment Name: Zm_Drought_Roots_P Parameter: Timepoint (hr) Value: 24
  misc_feature: MA Experiment 108689 PARAMETER Experiment Name: Zm_Drought_Roots_P Parameter: Tissue Value: Roots
  misc_feature: MA Experiment 108689 PARAMETER Experiment Name: Zm_Drought_Roots_P Parameter: Treatment Value: Drought vs. No Drought
  misc_feature: MA Experiment ID: 20000477 Result: Up-regulated in Transcription
  misc_feature: MA Experiment 20000477 PARAMETER Experiment Name: Zm_5mM_SA_P Parameter: Age (day) Value: 10
  misc_feature: MA Experiment 20000477 PARAMETER Experiment Name: Zm_5mM_SA_P Parameter: Organism Value: Zea mays
  misc_feature: MA Experiment 20000477 PARAMETER Experiment Name: Zm_5mM_SA_P Parameter: Plant Line Value: 35A19
  misc_feature: MA Experiment 20000477 PARAMETER Experiment Name: Zm_5mM_SA_P Parameter: Timepoint (hr) Value: 48
  misc_feature: MA Experiment 20000477 PARAMETER Experiment Name: Zm_5mM_SA_P Parameter: Tissue Value: Aerial
  misc_feature: MA Experiment 20000477 PARAMETER Experiment Name: Zm_5mM_SA_P Parameter: Treatment Value: 5mM SA vs. No Treatment
  misc_feature: MA Experiment ID: 20000478 Result: Up-regulated in Transcription
  misc_feature: MA Experiment 20000478 PARAMETER Experiment Name: Zm_5mM_SA_P Parameter: Age (day) Value: 11
  misc_feature: MA Experiment 20000478 PARAMETER Experiment Name: Zm_5mM_SA_P Parameter: Organism Value: Zea mays
  misc_feature: MA Experiment 20000478 PARAMETER Experiment Name: Zm_5mM_SA_P Parameter: Plant Line Value: 35A19
  misc_feature: MA Experiment 20000478 PARAMETER Experiment Name: Zm_5mM_SA_P Parameter: Timepoint (hr) Value: 72
  misc_feature: MA Experiment 20000478 PARAMETER Experiment Name: Zm_5mM_SA_P Parameter: Tissue Value: Aerial
  misc_feature: MA Experiment 20000478 PARAMETER Experiment Name: Zm_5mM_SA_P Parameter: Treatment Value: 5mM SA vs. No Treatment
  misc_feature: MA Experiment ID: 20000480 Result: Up-regulated in Transcription
  misc_feature: MA Experiment 20000480 PARAMETER Experiment Name: Zm_Drought_P Parameter: Age (day) Value: 11
  misc_feature: MA Experiment 20000480 PARAMETER Experiment Name: Zm_Drought_P Parameter: Organism Value: Zea mays
  misc_feature: MA Experiment 20000480 PARAMETER Experiment Name: Zm_Drought_P Parameter: Plant Line Value: 35A19
  misc_feature: MA Experiment 20000480 PARAMETER Experiment Name: Zm_Drought_P Parameter: Timepoint (hr) Value: 72
  misc_feature: MA Experiment 20000480 PARAMETER Experiment Name: Zm_Drought_P Parameter: Tissue Value: Aerial
  misc_feature: MA Experiment 20000480 PARAMETER Experiment Name: Zm_Drought_P Parameter: Treatment Value: Drought vs. No Drought
aacttaaccactactccgcatctactgacgccgccgcgcaaggggcccgggtacgccacgccgctggaggccatggagaagggccccagggagaagctcgtctacgtcacctgcgtctacaacggcactggaattaacaagccggattaccttgcgacggtggatttggatcccagctctcctacatactcccaggtgatccacaggctcccggtcacccacatcggcgacgagctgcatcactctggctggaactcctgcagctcctgcyacggtgacccatcggccaagcgccgcttcctgatcctgccttccttgctgtcaggccgtgtgtatgtcgtcgacacagcgacagacccaagggcgccatccttgcataaggtggttgagtctgaggacattgctgagaatactgggcttgggttcccttcacacgtctcattgccttgcgtctggcgacattatgatttct

SEQ ID NO: 17263 - protein, 157 aa, Zea mays subsp. mays
  peptide (1)..(157): Ceres Seq. ID no. 1671643
  misc_feature (15)..(147): Pfam Name: 56kDa selenium binding protein (SBP56) Pfam Description: 56kDa selenium binding protein (SBP56)
  misc_feature (13)..(147): Homolog of NCBI NO: 15485720 NR Description: selenium binding protein [Medicago sativa]
  misc_feature (25)..(147): Homolog of NCBI NO: 13560275 NR Description: putative selenium binding protein [Oryza sativa]
  misc_feature (15)..(147): Homolog of NCBI NO: 34906970 NR Description: putative selenium binding protein
  misc_feature (91)..(91): Xaa is any aa, unknown or other
NLTTTPHLLTPPRKGPGYATPLEAMEKGPREKLVYVTCVYNGTGINKPDYLATVDLDPSSPTYSQVIHRLPVTHIGDELHHSGWNSCSSCXGDPSAKRRFLILPSLLSGRVYVVDTATDPRAPSLHKVVESEDIAENTGLGFPSHVSLPCVWRHYDF

SEQ ID NO: 17264 - protein, 133 aa, Zea mays subsp. mays
  peptide (1)..(133): Ceres Seq. ID no. 1671644
  misc_feature (1)..(123): Pfam Name: 56kDa selenium binding protein (SBP56) Pfam Description: 56kDa selenium binding protein (SBP56)
  misc_feature (1)..(123): Homolog of NCBI NO: 15485720 NR Description: selenium binding protein [Medicago sativa]
  misc_feature (1)..(123): Homolog of NCBI NO: 13560275 NR Description: putative selenium binding protein [Oryza sativa]
  misc_feature (1)..(123): Homolog of NCBI NO: 34906970 NR Description: putative selenium binding protein
  misc_feature (67)..(67): Xaa is any aa, unknown or other
MEKGPREKLVYVTCVYNGTGINKPDYLATVDLDPSSPTYSQVIHRLPVTHIGDELHHSGWNSCSSCXGDPSAKRRFLILPSLLSGRVYVVDTATDPRAPSLHKVVESEDIAENTGLGFPSHVSLPCVWRHYDF

SEQ ID NO: 17265 - DNA, 1851 bp, Zea mays subsp. mays
  misc_feature (1)..(1851): Ceres Seq. ID no. 12361706
  misc_feature: MA Experiment ID: 108545 Result: Up-regulated in Transcription
  misc_feature: MA Experiment 108545 PARAMETER Experiment Name: Zm_Imbibed_Seeds_P Parameter: Age (day) Value: 3 vs. 2
  misc_feature: MA Experiment 108545 PARAMETER Experiment Name: Zm_Imbibed_Seeds_P Parameter: Organism Value: Zea mays
  misc_feature: MA Experiment 108545 PARAMETER Experiment Name: Zm_Imbibed_Seeds_P Parameter: Plant Line Value: 35A19
  misc_feature: MA Experiment 108545 PARAMETER Experiment Name: Zm_Imbibed_Seeds_P Parameter: Tissue Value: Aerial vs. Embryo
  misc_feature: MA Experiment ID: 108597 Result: Down-regulated in Transcription
  misc_feature: MA Experiment 108597 PARAMETER Experiment Name: Zm_100uM_ABA_P Parameter: Age (day) Value: 9
  misc_feature: MA Experiment 108597 PARAMETER Experiment Name: Zm_100uM_ABA_P Parameter: Organism Value: Zea mays
  misc_feature: MA Experiment 108597 PARAMETER Experiment Name: Zm_100uM_ABA_P Parameter: Plant Line Value: 35A19
  misc_feature: MA Experiment 108597 PARAMETER Experiment Name: Zm_100uM_ABA_P Parameter: Timepoint (hr) Value: 24
  misc_feature: MA Experiment 108597 PARAMETER Experiment Name: Zm_100uM_ABA_P Parameter: Tissue Value: Aerial
  misc_feature: MA Experiment 108597 PARAMETER Experiment Name: Zm_100uM_ABA_P Parameter: Treatment Value: 100uM ABA vs. No Treatment
  misc_feature: MA Experiment ID: 108687 Result: Down-regulated in Transcription
  misc_feature: MA Experiment 108687 PARAMETER Experiment Name: Zm_Embryos-Flowers__P Parameter: Tissue Value: Embryo vs. Aerial+
  misc_feature: MA Experiment ID: 20000477 Result: Down-regulated in Transcription
  misc_feature: MA Experiment 20000477 PARAMETER Experiment Name: Zm_5mM_SA_P Parameter: Age (day) Value: 10
  misc_feature: MA Experiment 20000477 PARAMETER Experiment Name: Zm_5mM_SA_P Parameter: Organism Value: Zea mays
  misc_feature: MA Experiment 20000477 PARAMETER Experiment Name: Zm_5mM_SA_P Parameter: Plant Line Value: 35A19
  misc_feature: MA Experiment 20000477 PARAMETER Experiment Name: Zm_5mM_SA_P Parameter: Timepoint (hr) Value: 48
  misc_feature: MA Experiment 20000477 PARAMETER Experiment Name: Zm_5mM_SA_P Parameter: Tissue Value: Aerial
  misc_feature: MA Experiment 20000477 PARAMETER Experiment Name: Zm_5mM_SA_P Parameter: Treatment Value: 5mM SA vs. No Treatment
  misc_feature: MA Experiment ID: 20000478 Result: Down-regulated in Transcription
  misc_feature: MA Experiment 20000478 PARAMETER Experiment Name: Zm_5mM_SA_P Parameter: Age (day) Value: 11
  misc_feature: MA Experiment 20000478 PARAMETER Experiment Name: Zm_5mM_SA_P Parameter: Organism Value: Zea mays
  misc_feature: MA Experiment 20000478 PARAMETER Experiment Name: Zm_5mM_SA_P Parameter: Plant Line Value: 35A19
  misc_feature: MA Experiment 20000478 PARAMETER Experiment Name: Zm_5mM_SA_P Parameter: Timepoint (hr) Value: 72
  misc_feature: MA Experiment 20000478 PARAMETER Experiment Name: Zm_5mM_SA_P Parameter: Tissue Value: Aerial
  misc_feature: MA Experiment 20000478 PARAMETER Experiment Name: Zm_5mM_SA_P Parameter: Treatment Value: 5mM SA vs. No Treatment
  misc_feature: MA Experiment ID: 20000480 Result: Down-regulated in Transcription
  misc_feature: MA Experiment 20000480 PARAMETER Experiment Name: Zm_Drought_P Parameter: Age (day) Value: 11
  misc_feature: MA Experiment 20000480 PARAMETER Experiment Name: Zm_Drought_P Parameter: Organism Value: Zea mays
  misc_feature: MA Experiment 20000480 PARAMETER Experiment Name: Zm_Drought_P Parameter: Plant Line Value: 35A19
  misc_feature: MA Experiment 20000480 PARAMETER Experiment Name: Zm_Drought_P Parameter: Timepoint (hr) Value: 72
  misc_feature: MA Experiment 20000480 PARAMETER Experiment Name: Zm_Drought_P Parameter: Tissue Value: Aerial
  misc_feature: MA Experiment 20000480 PARAMETER Experiment Name: Zm_Drought_P Parameter: Treatment Value: Drought vs. No Drought
  misc_feature: MA Experiment ID: 20000487 Result: Down-regulated in Transcription
  misc_feature: MA Experiment 20000487 PARAMETER Experiment Name: Zm_50mM_NH4NO3_L_to_H_P Parameter: Organism Value: Zea mays
  misc_feature: MA Experiment 20000487 PARAMETER Experiment Name: Zm_50mM_NH4NO3_L_to_H_P Parameter: Timepoint (hr) Value: 4
  misc_feature: MA Experiment 20000487 PARAMETER Experiment Name: Zm_50mM_NH4NO3_L_to_H_P Parameter: Tissue Value: Leaves
  misc_feature: MA Experiment 20000487 PARAMETER Experiment Name: Zm_50mM_NH4NO3_L_to_H_P Parameter: Treatment Value: 50mM NH4NO3 vs. 100mM Mannitol
  misc_feature: MA Experiment ID: 20000492 Result: Up-regulated in Transcription
  misc_feature: MA Experiment 20000492 PARAMETER Experiment Name: Zm_Hybrid_Seed_Dev_P Parameter: DAP Value: 12
  misc_feature: MA Experiment 20000492 PARAMETER Experiment Name: Zm_Hybrid_Seed_Dev_P Parameter: Organism Value: Zea mays
  misc_feature: MA Experiment 20000492 PARAMETER Experiment Name: Zm_Hybrid_Seed_Dev_P Parameter: Plant Line Value: 35A19
  misc_feature: MA Experiment 20000492 PARAMETER Experiment Name: Zm_Hybrid_Seed_Dev_P Parameter: Tissue Value: Fert Kernel vs. Unfert Floret
  misc_feature: MA Experiment ID: 20000632 Result: Down-regulated in Transcription
  misc_feature: MA Experiment 20000632 PARAMETER Experiment Name: Zm_Herbicide-Treatments_P Parameter: Timepoint (hr) Value: 4
  misc_feature: MA Experiment 20000632 PARAMETER Experiment Name: Zm_Herbicide-Treatments_P Parameter: Tissue Value: Aerial
  misc_feature: MA Experiment 20000632 PARAMETER Experiment Name: Zm_Herbicide-Treatments_P Parameter: Treatment Value: Glean vs. No Treatment
acttttgaaaatagttttgtgctctcaaggcaaaagagcacacttgactcttgctcgcctctctcactcactctctcactcaagctccagtcacacactctctctagctctctgccactccgtccattgggctggactggactggaggcatggccattccattgctagctccagcgcgctccaacggcagcaggccgctggcgctggcgctggtgctcgtcgccgcggccgcgctgtgccgtccgggtgcttgcgacgacggagccgccgccgccgcggacaggatcaggcggctcccgggggagccggaggtgagcttcgcccagtactcgggctacgtcgccgtggacagcggcggcggcaagcgcgccctgttctactacttcgtggaggccgacgtcgtggaccccgcctccaagcctctcgtcctctggctcaacggcgggcctgggtgctcgtccctgggcgtaggcgccttctcagagaacgggccgttcaggcctagtggccaggtgctggtcaagaacgaatacagctggaacaaagaggccaatgtgatatacctggagacgccggctggtgttggctactcctactctgctgatgctgcttactaccagggcgtggatgacaagatgacagccatggacaacatggtgttcctgcaaaggtggctccaaaagttcccacagtacaagggcagagacctctacatcgctggagagagctacgcagggcactacatcccgcaactcgcggaggccatggtggagttcaacaagaaggacaggatcttcaacctcagaggcgtcgctctgggcaaccctgtgctggaattcgcgacggacttcaacgcccgcgccgagtacttctggtcgcacggcctcatctccgacgccacctaccgcgtgttcacctccgcctgcaactactcccgctacgtcaccgagtactacggcggctcgctgtcgccgctgtgcgcccgggtgatgaaccaggtgacgcgcgagaccagccgcttcgtcgacaagtacgacgtcacgctcgacgtctgcctctcgtcggtgctctctcagtccaagatcctctcgccgcacgagcaggtcgggcagcggatcgacgtgtgcgtggaggacgagacggtgaggtacctcaaccgccgggacgtgcaggcggcgctgcacgcgaggctcgtcggcgtcgacaagtgggcggtctgcagcagcgttctcgagtacgagctgctcaacctgcagatcccgaccatcaacgtcgtcggatcgctcgtgaaatcgggcatccgagtgctcgtttacagcggcgaccaggactcggtgatccctctgacgggcagccggacgctggtgcagaacctggcgcgcgacatgggcctcaagaccaccaccccgtaccgggtgtggttcgaagggcagcaggtcggaggatggacgcaggtgtacggaggcggcgcgctgtccttcgccaccatcaggggcgcctcccacgaggcgcccttctcgcagcccgggcgctcgctcgttctcttcagggcgttcctgcagggccagcctctgcctgaaaccttctcgtgatcagggtgctcgatgcagctccttctgcaggtggggtggggggttttgcactgtagtaatctgtaaggaggtgtttggtgtgtctgcctcctggctcctgctagctgatgatactagtggtttggtttggcgccgcggtaggagtaggagcgagcgagcggccggcgctgttcgaggtctgtgctccgtgtttctacagcgtccgtccatggctcggcaattgcctaaagaagcggaaaggatttgtccctcgtttcgt

SEQ ID NO: 17266 - protein, 480 aa, Zea mays subsp. mays
  peptide (1)..(480): Ceres Seq. ID no. 12361707
  misc_feature (50)..(472): Pfam Name: Serine carboxypeptidase Pfam Description: Serine carboxypeptidase
  misc_feature (44)..(309): Homolog of NCBI NO: 28393789 NR Description: putative serine carboxypeptidase II [Arabidopsis
  misc_feature (44)..(476): Homolog of NCBI NO: 15224454 NR Description: putative serine carboxypeptidase II; protein id:
  misc_feature (44)..(476): Homolog of NCBI NO: 15238327 NR Description: serine carboxypeptidase-II like; protein id:
  misc_feature (44)..(476): Homolog of NCBI NO: 15238328 NR Description: serine carboxypeptidase II-like
  misc_feature (24)..(476): Homolog of NCBI NO: 15218514 NR Description: serine carboxypeptidase II, putative; protein id:
  misc_feature (43)..(479): Homolog of NCBI NO: 25289793 NR Description: probable serine carboxypeptidase II
  misc_feature (43)..(479): Homolog of NCBI NO: 30685740 NR Description: serine carboxypeptidase -related [Arabidopsis
  misc_feature (24)..(479): Homolog of NCBI NO: 38347156 NR Description: OSJNBa0039C07.2 [Oryza sativa (japonica
  misc_feature (43)..(479): Homolog of NCBI NO: 25289785 NR Description: probable serine carboxypeptidase II
  misc_feature (43)..(479): Homolog of NCBI NO: 18396647 NR Description: serine carboxypeptidase II, putative
MAIPLLAPARSNGSRPLALALVLVAAAALCRPGACDDGAAAAADRIRRLPGEPEVSFAQYSGYVAVDSGGGKRALFYYFVEADVVDPASKPLVLWLNGGPGCSSLGVGAFSENGPFRPSGQVLVKNEYSWNKEANVIYLETPAGVGYSYSADAAYYQGVDDKMTAMDNMVFLQRWLQKFPQYKGRDLYIAGESYAGHYIPQLAEAMVEFNKKDRIFNLRGVALGNPVLEFATDFNARAEYFWSHGLISDATYRVFTSACNYSRYVTEYYGGSLSPLCARVMNQVTRETSRFVDKYDVTLDVCLSSVLSQSKILSPHEQVGQRIDVCVEDETVRYLNRRDVQAALHARLVGVDKWAVCSSVLEYELLNLQIPTINVVGSLVKSGIRVLVYSGDQDSVIPLTGSRTLVQNLARDMGLKTTTPYRVWFEGQQVGGWTQVYGGGALSFATIRGASHEAPFSQPGRSLVLFRAFLQGQPLPETFS

SEQ ID NO: 17267 - protein, 318 aa, Zea mays subsp. mays
  peptide (1)..(318): Ceres Seq. ID no. 12361708
  misc_feature (1)..(310): Pfam Name: Serine carboxypeptidase Pfam Description: Serine carboxypeptidase
  misc_feature (1)..(147): Homolog of NCBI NO: 28393789 NR Description: putative serine carboxypeptidase II [Arabidopsis
  misc_feature (1)..(314): Homolog of NCBI NO: 15224454 NR Description: putative serine carboxypeptidase II; protein id:
  misc_feature (1)..(314): Homolog of NCBI NO: 15238327 NR Description: serine carboxypeptidase-II like; protein id:
  misc_feature (1)..(314): Homolog of NCBI NO: 15238328 NR Description: serine carboxypeptidase II-like
  misc_feature (1)..(314): Homolog of NCBI NO: 15218514 NR Description: serine carboxypeptidase II, putative; protein id:
  misc_feature (1)..(317): Homolog of NCBI NO: 25289793 NR Description: probable serine carboxypeptidase II
  misc_feature (1)..(317): Homolog of NCBI NO: 30685740 NR Description: serine carboxypeptidase -related [Arabidopsis
  misc_feature (1)..(317): Homolog of NCBI NO: 38347156 NR Description: OSJNBa0039C07.2 [Oryza sativa (japonica
  misc_feature (1)..(317): Homolog of NCBI NO: 25289785 NR Description: probable serine carboxypeptidase II
  misc_feature (1)..(317): Homolog of NCBI NO: 18396647 NR Description: serine carboxypeptidase II, putative
MTAMDNMVFLQRWLQKFPQYKGRDLYIAGESYAGHYIPQLAEAMVEFNKKDRIFNLRGVALGNPVLEFATDFNARAEYFWSHGLISDATYRVFTSACNYSRYVTEYYGGSLSPLCARVMNQVTRETSRFVDKYDVTLDVCLSSVLSQSKILSPHEQVGQRIDVCVEDETVRYLNRRDVQAALHARLVGVDKWAVCSSVLEYELLNLQIPTINVVGSLVKSGIRVLVYSGDQDSVIPLTGSRTLVQNLARDMGLKTTTPYRVWFEGQQVGGWTQVYGGGALSFATIRGASHEAPFSQPGRSLVLFRAFLQGQPLPETFS

SEQ ID NO: 17268 - protein, 315 aa, Zea mays subsp. mays
  peptide (1)..(315): Ceres Seq. ID no. 12361709
  misc_feature (1)..(307): Pfam Name: Serine carboxypeptidase Pfam Description: Serine carboxypeptidase
  misc_feature (1)..(144): Homolog of NCBI NO: 28393789 NR Description: putative serine carboxypeptidase II [Arabidopsis
  misc_feature (1)..(311): Homolog of NCBI NO: 15224454 NR Description: putative serine carboxypeptidase II; protein id:
  misc_feature (1)..(311): Homolog of NCBI NO: 15238327 NR Description: serine carboxypeptidase-II like; protein id:
  misc_feature (1)..(311): Homolog of NCBI NO: 15238328 NR Description: serine carboxypeptidase II-like
  misc_feature (1)..(311): Homolog of NCBI NO: 15218514 NR Description: serine carboxypeptidase II, putative; protein id:
  misc_feature (1)..(314): Homolog of NCBI NO: 25289793 NR Description: probable serine carboxypeptidase II
  misc_feature (1)..(314): Homolog of NCBI NO: 30685740 NR Description: serine carboxypeptidase -related [Arabidopsis
  misc_feature (1)..(314): Homolog of NCBI NO: 38347156 NR Description: OSJNBa0039C07.2 [Oryza sativa (japonica
  misc_feature (1)..(314): Homolog of NCBI NO: 25289785 NR Description: probable serine carboxypeptidase II
  misc_feature (1)..(314): Homolog of NCBI NO: 18396647 NR Description: serine carboxypeptidase II, putative
MDNMVFLQRWLQKFPQYKGRDLYIAGESYAGHYIPQLAEAMVEFNKKDRIFNLRGVALGNPVLEFATDFNARAEYFWSHGLISDATYRVFTSACNYSRYVTEYYGGSLSPLCARVMNQVTRETSRFVDKYDVTLDVCLSSVLSQSKILSPHEQVGQRIDVCVEDETVRYLNRRDVQAALHARLVGVDKWAVCSSVLEYELLNLQIPTINVVGSLVKSGIRVLVYSGDQDSVIPLTGSRTLVQNLARDMGLKTTTPYRVWFEGQQVGGWTQVYGGGALSFATIRGASHEAPFSQPGRSLVLFRAFLQGQPLPETFS

SEQ ID NO: 17269 - DNA, 2537 bp, Zea mays subsp. mays
  misc_feature (1)..(2537): Ceres Seq. ID no. 12417396
  misc_feature: MA Experiment ID: 108687 Result: Down-regulated in Transcription
  misc_feature: MA Experiment 108687 PARAMETER Experiment Name: Zm_Embryos-Flowers__P Parameter: Tissue Value: Embryo vs. Aerial+
  misc_feature: MA Experiment ID: 108689 Result: Up-regulated in Transcription
  misc_feature: MA Experiment 108689 PARAMETER Experiment Name: Zm_Drought_Roots_P Parameter: Age (day) Value: 9
  misc_feature: MA Experiment 108689 PARAMETER Experiment Name: Zm_Drought_Roots_P Parameter: Organism Value: Zea mays
  misc_feature: MA Experiment 108689 PARAMETER Experiment Name: Zm_Drought_Roots_P Parameter: Plant Line Value: 35A19
  misc_feature: MA Experiment 108689 PARAMETER Experiment Name: Zm_Drought_Roots_P Parameter: Timepoint (hr) Value: 24
  misc_feature: MA Experiment 108689 PARAMETER Experiment Name: Zm_Drought_Roots_P Parameter: Tissue Value: Roots
  misc_feature: MA Experiment 108689 PARAMETER Experiment Name: Zm_Drought_Roots_P Parameter: Treatment Value: Drought vs. No Drought
  misc_feature: MA Experiment ID: 20000492 Result: Down-regulated in Transcription
  misc_feature: MA Experiment 20000492 PARAMETER Experiment Name: Zm_Hybrid_Seed_Dev_P Parameter: DAP Value: 12
  misc_feature: MA Experiment 20000492 PARAMETER Experiment Name: Zm_Hybrid_Seed_Dev_P Parameter: Organism Value: Zea mays
  misc_feature: MA Experiment 20000492 PARAMETER Experiment Name: Zm_Hybrid_Seed_Dev_P Parameter: Plant Line Value: 35A19
  misc_feature: MA Experiment 20000492 PARAMETER Experiment Name: Zm_Hybrid_Seed_Dev_P Parameter: Tissue Value: Fert Kernel vs. Unfert Floret
  misc_feature: MA Experiment ID: 20000535 Result: Down-regulated in Transcription
  misc_feature: MA Experiment 20000535 PARAMETER Experiment Name: Zm_Hybrid_Seed_Dev_P Parameter: DAP Value: 30 vs. 12
  misc_feature: MA Experiment 20000535 PARAMETER Experiment Name: Zm_Hybrid_Seed_Dev_P Parameter: Organism Value: Zea mays
  misc_feature: MA Experiment 20000535 PARAMETER Experiment Name: Zm_Hybrid_Seed_Dev_P Parameter: Plant Line Value: 35A19
  misc_feature: MA Experiment 20000535 PARAMETER Experiment Name: Zm_Hybrid_Seed_Dev_P Parameter: Tissue Value: Embryo vs. Unfert Floret
attgaccaatctgctccgggcaccatggagaggatcagtggcccgcgcctcgctgtcctgctcgctctcgccgtcctcaccgccgtcgccgcagcnaccacggacgaggtgcgcgcgcagtccacctacatcatccacctcgccccaggccacccggcgctgtccgcagcgcgcgacaacggcggcgacgaggcggccctccgccgcctcctcccgcgccgcctgcgcgcgccgaggccgcgcgtgctctactcctaccagcacgctgccacgggcatcgccgcgcggctcacgccccannaggcggcgcacgccnnnnncggggagggcgtcctggccgtgtaccccgaccaggcgcggnanctgcacaccacccacaccccggcgttcctccgnctaacggaggccgccgggctcctcccggctgcgacggggggcgcgtcgtcgtctgccgtcgtcggcgtgctcgacaccgggctctaccccatcggncggtcctcgttcgcngcagcggatggtctcggnccggcgcccgcgtccttctctggngganncgtctnngcgggnnncttcaacgcgtccncctactgcaacagcaagctcatcggngccaagttcttntaccaggggtacgaagctgctctcggccaccccatcgatgagaccaaggagtcgaagtcgccgntggacactgagggccatggcacgcacaccgcctccactgnngctggctcgccggtggccggagccgggttctttgactacgccgaggggcaggccgtgggcatggaccccggtgcgcgcatcgcggcgtacaagatctgctggacgtctggatgctacgactccgatatcctcgctgccatggacgaggccgtcgctgacggcgtcgacgtcatctcgctctccgtcggcgccaacgggtacgcccccagcttcttcaccgattccatcgccatcggcgctttccacgcggtaagcaagggcatcgtcgtctcctgctccgccggcaactccggccccggcgagtacaccgccgtcaacattgcgccgtggatcctgaccgtcggcgcgtccaccatcgaccgcgagttccccgccgatgtggttctcggcgacggccgcgtctttggtggtgtctctctgtatgccggtgaccccctggactccactcagttgcctctggtgttcgccggggactgtggttcccctctgtgcctaatgggcgagctcgactcgaagaaggtggccggcaagatggtgctctgtctgcgtggtaacaacgctcgtgtcgagaaaggagcagcagtcaagctcgccggtggggtcggaatgatcctcgccaacaccgaggagagcggggaggagctcatcgccgactcccacctcgtgccggcgactatggtcgggcagaagttcggcgacaagatcaggtactacgtccagacggacccgtcgccaacggcgaccatcgtgttccgcggcacagtcatcggcaagtcgccgtccgcgcctcgagtggcggcgttctcgagccgaggccccaactaccgcgcaccggagatcctcaagcccgacgtcatcgccccaggcgtcaacatactcgcggcgtggaccggcgccgcctcccccaccgacctggacatcgactcgaggcgcgtggagttcaacatcatctccggcacgtccatgtcctgcccgcacgtgagcggcctcgccgcgctgctccgccaggcgcaccctgagtggagccccgcggcgatcaagtcggcgctcatgaccacggcgtacaacctggacaactccgggggaaccatcaaggacctcgctacgggcgtggagtcgacgccgttcgtccgtggcgccggtcacgtcgaccccaacgccgccctcgacccagggctggtgtacgacgccggctccgacgactacgtcgccttcctctgcacgctcgggtactctccgtcgttgatctccatcttcacgcangacgcgtcggtcgccgactgctcgacgaaaattcgctcgccccggcgaccttaactaccctgccttcgccgccgtcttctcctcctaccaagactcggtcacctaccgccgggtggtgcgcaacgtcggcagcaactccagcgcggtgtaccagccgacgatcgccagcccgtacggcgtggatgtcacggtgactccgagcaagctcgcgttcgacgggaagcagcagagcctgggatacgagatcaccatcgcagtgtcaggcaacccggtgatcgtggattccagctactcgttcggatccatcacctggagcgacggcgcgcacgacgtcacgagccccattgccgtgacctggccgtccaacggtggagcagcagccatgtagtagactgatgctgttgctactgtctaccgctgtgggaagaaggacagggccatgagcccatgagatccgaaatctccacgcctcctgcctgccataggaataatttactcgactgaaccacgcaataattcagctgcccctatcgtggttgtggtggacc

SEQ ID NO: 17270 - protein, 680 aa, Zea mays subsp. mays
  peptide (1)..(680): Ceres Seq. ID no. 12417397
  misc_feature (152)..(362): Pfam Name: Subtilase family Pfam Description: Subtilase family
  misc_feature (15)..(677): Homolog of NCBI NO: 18423316 NR Description: subtilisin-like serine protease
  misc_feature (81)..(677): Homolog of NCBI NO: 7435656 NR Description: subtilisin-like proteinase (EC 3.4.21.-) 2 -
  misc_feature (77)..(662): Homolog of NCBI NO: 18418552 NR Description: subtilisin-like serine protease
  misc_feature (82)..(677): Homolog of NCBI NO: 18396193 NR Description: subtilisin-like serine protease, putative
  misc_feature (16)..(660): Homolog of NCBI NO: 7435657 NR Description: subtilisin-like proteinase (EC 3.4.21.-) 1 -
  misc_feature (14)..(671): Homolog of NCBI NO: 14488360 NR Description: putative serine protease [Oryza sativa (japonica
  misc_feature (40)..(660): Homolog of NCBI NO: 1076414 NR Description: subtilisin-like proteinase (EC 3.4.21.-),
  misc_feature (12)..(660): Homolog of NCBI NO: 20147211 NR Description: AT5g67360/K8K14_8 [Arabidopsis thaliana]
  misc_feature (12)..(660): Homolog of NCBI NO: 18425181 NR Description: subtilisin-like serine protease ARA12
  misc_feature (42)..(676): Homolog of NCBI NO: 22331076 NR Description: subtilisin-like serine protease, putative
  misc_feature (32)..(32): Xaa is any aa, unknown or other
  misc_feature (100)..(100): Xaa is any aa, unknown or other
  misc_feature (101)..(101): Xaa is any aa, unknown or other
  misc_feature (106)..(106): Xaa is any aa, unknown or other
  misc_feature (107)..(107): Xaa is any aa, unknown or other
  misc_feature (121)..(121): Xaa is any aa, unknown or other
  misc_feature (132)..(132): Xaa is any aa, unknown or other
  misc_feature (164)..(164): Xaa is any aa, unknown or other
  misc_feature (169)..(169): Xaa is any aa, unknown or other
  misc_feature (175)..(175): Xaa is any aa, unknown or other
  misc_feature (183)..(183): Xaa is any aa, unknown or other
  misc_feature (185)..(185): Xaa is any aa, unknown or other
  misc_feature (187)..(187): Xaa is any aa, unknown or other
  misc_feature (189)..(189): Xaa is any aa, unknown or other
  misc_feature (190)..(190): Xaa is any aa, unknown or other
  misc_feature (195)..(195): Xaa is any aa, unknown or other
  misc_feature (203)..(203): Xaa is any aa, unknown or other
  misc_feature (207)..(207): Xaa is any aa, unknown or other
  misc_feature (229)..(229): Xaa is any aa, unknown or other
  misc_feature (242)..(242): Xaa is any aa, unknown or other
  misc_feature (663)..(663): Xaa is any aa, unknown or other
IDQSAPGTMERISGPRLAVLLALAVLTAVAAXTTDEVRAQSTYIIHLAPGHPALSAARDNGGDEAALRRLLPRRLRAPRPRVLYSYQHAATGIAARLTPXXAAHAXXGEGVLAVYPDQARXLHTTHTPAFLXLTEAAGLLPAATGGASSSAVVGVLDTGLYPIXRSSFXAADGLXPAPASFSXGXVXAXXFNASXYCNSKLIXAKFXYQGYEAALGHPIDETKESKSPXDTEGHGTHTASTXAGSPVAGAGFFDYAEGQAVGMDPGARIAAYKICWTSGCYDSDILAAMDEAVADGVDVISLSVGANGYAPSFFTDSIAIGAFHAVSKGIVVSCSAGNSGPGEYTAVNIAPWILTVGASTIDREFPADVVLGDGRVFGGVSLYAGDPLDSTQLPLVFAGDCGSPLCLMGELDSKKVAGKMVLCLRGNNARVEKGAAVKLAGGVGMILANTEESGEELIADSHLVPATMVGQKFGDKIRYYVQTDPSPTATIVFRGTVIGKSPSAPRVAAFSSRGPNYRAPEILKPDVIAPGVNILAAWTGAASPTDLDIDSRRVEFNIISGTSMSCPHVSGLAALLRQAHPEWSPAAIKSALMTTAYNLDNSGGTIKDLATGVESTPFVRGAGHVDPNAALDPGLVYDAGSDDYVAFLCTLGYSPSLISIFTXDASVADCSTKIRSPRRP

SEQ ID NO: 17271 - protein, 672 aa, Zea mays subsp. mays
  peptide (1)..(672): Ceres Seq. ID no. 12417398
  misc_feature (144)..(354): Pfam Name: Subtilase family Pfam Description: Subtilase family
  misc_feature (7)..(669): Homolog of NCBI NO: 18423316 NR Description: subtilisin-like serine protease
  misc_feature (73)..(669): Homolog of NCBI NO: 7435656 NR Description: subtilisin-like proteinase (EC 3.4.21.-) 2 -
  misc_feature (69)..(654): Homolog of NCBI NO: 18418552 NR Description: subtilisin-like serine protease
  misc_feature (74)..(669): Homolog of NCBI NO: 18396193 NR Description: subtilisin-like serine protease, putative
  misc_feature (8)..(652): Homolog of NCBI NO: 7435657 NR Description: subtilisin-like proteinase (EC 3.4.21.-) 1 -
  misc_feature (6)..(663): Homolog of NCBI NO: 14488360 NR Description: putative serine protease [Oryza sativa (japonica
  misc_feature (32)..(652): Homolog of NCBI NO: 1076414 NR Description: subtilisin-like proteinase (EC 3.4.21.-),
  misc_feature (4)..(652): Homolog of NCBI NO: 20147211 NR Description: AT5g67360/K8K14_8 [Arabidopsis thaliana]
  misc_feature (4)..(652): Homolog of NCBI NO: 18425181 NR Description: subtilisin-like serine protease ARA12
  misc_feature (34)..(668): Homolog of NCBI NO: 22331076 NR Description: subtilisin-like serine protease, putative
  misc_feature (24)..(24): Xaa is any aa, unknown or other
  misc_feature (92)..(92): Xaa is any aa, unknown or other
  misc_feature (93)..(93): Xaa is any aa, unknown or other
  misc_feature (98)..(98): Xaa is any aa, unknown or other
  misc_feature (99)..(99): Xaa is any aa, unknown or other
  misc_feature (113)..(113): Xaa is any aa, unknown or other
  misc_feature (124)..(124): Xaa is any aa, unknown or other
  misc_feature (156)..(156): Xaa is any aa, unknown or other
  misc_feature (161)..(161): Xaa is any aa, unknown or other
  misc_feature (167)..(167): Xaa is any aa, unknown or other
  misc_feature (175)..(175): Xaa is any aa, unknown or other
  misc_feature (177)..(177): Xaa is any aa, unknown or other
  misc_feature (179)..(179): Xaa is any aa, unknown or other
  misc_feature (181)..(181): Xaa is any aa, unknown or other
  misc_feature (182)..(182): Xaa is any aa, unknown or other
  misc_feature (187)..(187): Xaa is any aa, unknown or other
  misc_feature (195)..(195): Xaa is any aa, unknown or other
  misc_feature (199)..(199): Xaa is any aa, unknown or other
  misc_feature (221)..(221): Xaa is any aa, unknown or other
  misc_feature (234)..(234): Xaa is any aa, unknown or other
  misc_feature (655)..(655): Xaa is any aa, unknown or other
MERISGPRLAVLLALAVLTAVAAXTTDEVRAQSTYIIHLAPGHPALSAARDNGGDEAALRRLLPRRLRAPRPRVLYSYQHAATGIAARLTPXXAAHAXXGEGVLAVYPDQARXLHTTHTPAFLXLTEAAGLLPAATGGASSSAVVGVLDTGLYPIXRSSFXAADGLXPAPASFSXGXVXAXXFNASXYCNSKLIXAKFXYQGYEAALGHPIDETKESKSPXDTEGHGTHTASTXAGSPVAGAGFFDYAEGQAVGMDPGARIAAYKICWTSGCYDSDILAAMDEAVADGVDVISLSVGANGYAPSFFTDSIAIGAFHAVSKGIVVSCSAGNSGPGEYTAVNIAPWILTVGASTIDREFPADVVLGDGRVFGGVSLYAGDPLDSTQLPLVFAGDCGSPLCLMGELDSKKVAGKMVLCLRGNNARVEKGAAVKLAGGVGMILANTEESGEELIADSHLVPATMVGQKFGDKIRYYVQTDPSPTATIVFRGTVIGKSPSAPRVAAFSSRGPNYRAPEILKPDVIAPGVNILAAWTGAASPTDLDIDSRRVEFNIISGTSMSCPHVSGLAALLRQAHPEWSPAAIKSALMTTAYNLDNSGGTIKDLATGVESTPFVRGAGHVDPNAALDPGLVYDAGSDDYVAFLCTLGYSPSLISIFTXDASVADCSTKIRSPRRP

SEQ ID NO: 17272 - protein, 418 aa, Zea mays subsp. mays
  peptide (1)..(418): Ceres Seq. ID no. 12417399
  misc_feature (1)..(100): Pfam Name: Subtilase family Pfam Description: Subtilase family
  misc_feature (1)..(415): Homolog of NCBI NO: 18423316 NR Description: subtilisin-like serine protease
  misc_feature (1)..(415): Homolog of NCBI NO: 7435656 NR Description: subtilisin-like proteinase (EC 3.4.21.-) 2 -
  misc_feature (1)..(400): Homolog of NCBI NO: 18418552 NR Description: subtilisin-like serine protease
  misc_feature (1)..(415): Homolog of NCBI NO: 18396193 NR Description: subtilisin-like serine protease, putative
  misc_feature (1)..(398): Homolog of NCBI NO: 7435657 NR Description: subtilisin-like proteinase (EC 3.4.21.-) 1 -
  misc_feature (1)..(409): Homolog of NCBI NO: 14488360 NR Description: putative serine protease [Oryza sativa (japonica
  misc_feature (1)..(398): Homolog of NCBI NO: 1076414 NR Description: subtilisin-like proteinase (EC 3.4.21.-),
  misc_feature (1)..(398): Homolog of NCBI NO: 20147211 NR Description: AT5g67360/K8K14_8 [Arabidopsis thaliana]
  misc_feature (1)..(398): Homolog of NCBI NO: 18425181 NR Description: subtilisin-like serine protease ARA12
  misc_feature (1)..(414): Homolog of NCBI NO: 22331076 NR Description: subtilisin-like serine protease, putative
  misc_feature (401)..(401): Xaa is any aa, unknown or other
MDPGARIAAYKICWTSGCYDSDILAAMDEAVADGVDVISLSVGANGYAPSFFTDSIAIGAFHAVSKGIVVSCSAGNSGPGEYTAVNIAPWILTVGASTIDREFPADVVLGDGRVFGGVSLYAGDPLDSTQLPLVFAGDCGSPLCLMGELDSKKVAGKMVLCLRGNNARVEKGAAVKLAGGVGMILANTEESGEELIADSHLVPATMVGQKFGDKIRYYVQTDPSPTATIVFRGTVIGKSPSAPRVAAFSSRGPNYRAPEILKPDVIAPGVNILAAWTGAASPTDLDIDSRRVEFNIISGTSMSCPHVSGLAALLRQAHPEWSPAAIKSALMTTAYNLDNSGGTIKDLATGVESTPFVRGAGHVDPNAALDPGLVYDAGSDDYVAFLCTLGYSPSLISIFTXDASVADCSTKIRSPRRP

SEQ ID NO: 17273 - DNA, 2743 bp, Zea mays subsp. mays
  misc_feature (1)..(2743): Ceres Seq. ID no. 12361729
  misc_feature: MA Experiment ID: 108522 Result: Up-regulated in Transcription
  misc_feature: MA Experiment 108522 PARAMETER Experiment Name: Zm_42deg_Heat_P Parameter: Age (day) Value: 8
  misc_feature: MA Experiment 108522 PARAMETER Experiment Name: Zm_42deg_Heat_P Parameter: Organism Value: Zea mays
  misc_feature: MA Experiment 108522 PARAMETER Experiment Name: Zm_42deg_Heat_P Parameter: Plant Line Value: 35A19
  misc_feature: MA Experiment 108522 PARAMETER Experiment Name: Zm_42deg_Heat_P Parameter: Temperature (deg C) Value: 42 vs. 22
  misc_feature: MA Experiment 108522 PARAMETER Experiment Name: Zm_42deg_Heat_P Parameter: Timepoint (hr) Value: 1
  misc_feature: MA Experiment 108522 PARAMETER Experiment Name: Zm_42deg_Heat_P Parameter: Tissue Value: Aerial
  misc_feature: MA Experiment ID: 108523 Result: Up-regulated in Transcription
  misc_feature: MA Experiment 108523 PARAMETER Experiment Name: Zm_42deg_Heat_P Parameter: Age (day) Value: 8
  misc_feature: MA Experiment 108523 PARAMETER Experiment Name: Zm_42deg_Heat_P Parameter: Organism Value: Zea mays
  misc_feature: MA Experiment 108523 PARAMETER Experiment Name: Zm_42deg_Heat_P Parameter: Plant Line Value: 35A19
  misc_feature: MA Experiment 108523 PARAMETER Experiment Name: Zm_42deg_Heat_P Parameter: Temperature (deg C) Value: 42 vs. 22
  misc_feature: MA Experiment 108523 PARAMETER Experiment Name: Zm_42deg_Heat_P Parameter: Timepoint (hr) Value: 6
  misc_feature: MA Experiment 108523 PARAMETER Experiment Name: Zm_42deg_Heat_P Parameter: Tissue Value: Aerial
  misc_feature: MA Experiment ID: 108527 Result: Down-regulated in Transcription
  misc_feature: MA Experiment 108527 PARAMETER Experiment Name: Zm_5mM_NO_P Parameter: Age (day) Value: 8
  misc_feature: MA Experiment 108527 PARAMETER Experiment Name: Zm_5mM_NO_P Parameter: Organism Value: Zea mays
  misc_feature: MA Experiment 108527 PARAMETER Experiment Name: Zm_5mM_NO_P Parameter: Plant Line Value: 35A19
  misc_feature: MA Experiment 108527 PARAMETER Experiment Name: Zm_5mM_NO_P Parameter: Timepoint (hr) Value: 6
  misc_feature: MA Experiment 108527 PARAMETER Experiment Name: Zm_5mM_NO_P Parameter: Tissue Value: Aerial
  misc_feature: MA Experiment 108527 PARAMETER Experiment Name: Zm_5mM_NO_P Parameter: Treatment Value: 5mM NO vs. No Treatment
  misc_feature: MA Experiment ID: 108530 Result: Down-regulated in Transcription
  misc_feature: MA Experiment 108530 PARAMETER Experiment Name: Zm_Imbibed_Seeds_P Parameter: Age (day) Value: 6 vs. 2
  misc_feature: MA Experiment 108530 PARAMETER Experiment Name: Zm_Imbibed_Seeds_P Parameter: Organism Value: Zea mays
  misc_feature: MA Experiment 108530 PARAMETER Experiment Name: Zm_Imbibed_Seeds_P Parameter: Plant Line Value: 35A19
  misc_feature: MA Experiment 108530 PARAMETER Experiment Name: Zm_Imbibed_Seeds_P Parameter: Tissue Value: Aerial vs. Embryo
  misc_feature: MA Experiment ID: 108535 Result: Up-regulated in Transcription
  misc_feature: MA Experiment 108535 PARAMETER Experiment Name: Zm_Meristem_P Parameter: Age (day) Value: 8
  misc_feature: MA Experiment 108535 PARAMETER Experiment Name: Zm_Meristem_P Parameter: Organism Value: Zea mays
  misc_feature: MA Experiment 108535 PARAMETER Experiment Name: Zm_Meristem_P Parameter: Plant Line Value: 35A19
  misc_feature: MA Experiment 108535 PARAMETER Experiment Name: Zm_Meristem_P Parameter: Tissue Value: Root Meristem vs. Above Root Meristem
  misc_feature: MA Experiment ID: 108544 Result: Down-regulated in Transcription
  misc_feature: MA Experiment ID: 108689 Result: Up-regulated in Transcription
  misc_feature: MA Experiment 108689 PARAMETER Experiment Name: Zm_Drought_Roots_P Parameter: Age (day) Value: 9
  misc_feature: MA Experiment 108689 PARAMETER Experiment Name: Zm_Drought_Roots_P Parameter: Organism Value: Zea mays
  misc_feature: MA Experiment 108689 PARAMETER Experiment Name: Zm_Drought_Roots_P Parameter: Plant Line Value: 35A19
  misc_feature: MA Experiment 108689 PARAMETER Experiment Name: Zm_Drought_Roots_P Parameter: Timepoint (hr) Value: 24
  misc_feature: MA Experiment 108689 PARAMETER Experiment Name: Zm_Drought_Roots_P Parameter: Tissue Value: Roots
  misc_feature: MA Experiment 108689 PARAMETER Experiment Name: Zm_Drought_Roots_P Parameter: Treatment Value: Drought vs. No Drought
gcacgagaccattacctagaacatcctaatcgaaaagacgaactcatcactgcactggtggtgtccgtggtgctccacagagtgaagcgatagccaggagaggcgacgatgcgcaagtgggcgctctcctccgcgctcctcctcctctttctcctcaccacactccccgacccagctaagaagctacaagtgaatgccgaggagagcagcgatgacttggctaacccacccaaggtagaggagaagcttggtgctgtccctcatggcctgtccaccgactctgaggttgcccagagggaagccgagtctatctctaggaagactctcaggagctcagccgagaagtttgagttccaagctgaggtttccagactcatggacatcatcatcaactcactctacagcaacaaggatatcttcctgagggagctcatatctaatgcctctgatgcgttggataagattaggttcctttcccttactgataaggaagttctgggtgaaggggacactgcaaagcttgagattcagattaagttggacaaagagaagaaaatcctctccattcgggataggggtattggtatgaccaaggaagatcttattaagaaccttggaacgattgctaaatctggcacttcagcttttgtggaaaagatgcagtctggaggtgacctcaatcttattggacagtttggtgttggcttctactctgtgtacttggttgctgactatgttgaagtggtcagcaagcacaatgatgataaacagtatgtgtgggaatcaaaagctgatggatcatttgccatctctgaggatacatggaatgagccccttggccgtggaactgagataagattgcatctgcgagatgaggccaaggagtacttggaagaggataagctaaaggatttggtgaagaagtactctgagttcatcaacttccctatctatttgtggtcgaccaaggaggttgatgttgaagtgccaactgatgaggatgagacaagtgaagaagaggattcaactccagaaactacagaggaagagacagaagaagacgaagacgaagagaaagagaaaaagcccaagaccaagacaataaaggagactacttctgagtgggaacttctgaatgatgtgaaggctgtatggcttcgcagcccaaaggaggttactgatgaagaatactcgaagttttaccactcactagccaaggacttcggtgatgacaagcctatgggttggagccacttcactgccgaaggagatgttgagttcaaagctttgctctttattcccccgaaggctccacatgatctctatgagagttactacaacagtaacaagtcaaacctcaagttgtatgttaggagagttttcatctctgacgaatttgatgatcttcttcccaagtacctgagctttttgaagggtattgttgactcggacacgctgcccctgaatgtgtcacgagaaatgcttcaacaacatagcagtctcaagaccatcaagaagaagctgatccgcaaagcccttgacatgatcaggaaacttgctgaagaagaccctgatgagtacagcaacaaggataagacagatgaagagaaaagcgagatggaggagaagaagggccagtacgccaagttctggaatgagtttggcaaatcaatcaagctgggtatcatcgaagacgcgactaacagaaaccgccttgcgaagcttcttagatttgagagtaccaagtcggatggcaaacttgcctcccttgacgagtacatctcacggatgaagtcagggcagaaagacatcttctacatcacgggaagcagcaaagagcagctggagaagtctccattcctcgagaggctaaccaagaagaactacgaggttatcttcttcaccgaccccgtggacgagtacctgatgcagtacctgatggactacgaggacaagaagttccagaacgtgtccaaggagggactgaagctgggcaaggactcgaagctcaaggacctcaaggagtcgttcaaggagctgactgactggtggaagaaggccctggagagtgagaacgtggactcggtgaagatcagcaaccggctgcacgacaccccctgcgtcgtggtcacctccaagtacgggtggagcgccaacatggagaagatcatgcaggcgcagaccctgtcggactcgagcaagcaggcgtacatgcgcggcaagagggtgctggagatcaaccccaggcaccccatcatcaaggagctccgcgacaaggtcgcccaggacaacgagagcgaggagctgaagcacacggcgaggctggtgtaccagacggccctgatggagagcgggttcaacctccccgaccccaaggagttcgcgtccagcatctacaagtcggtgcagaagggcctggacctgagccccgacgcgaccgtggaggaggacgacgaggcagaggagcagccggaggtggaggagaaggagccggagccggagccgtcgtcctacgacaaggacgagctttaggctttcggatttgttttcaagtctagctagctcccgctttactaggaatgtgatgatatcggtgactgcctggttcaagtcacgtgatggttcttgagagacgcccatttttttcccatgcaacgtgatacgggatttttgcctgtctttgtacctactctacaagctttagttcagtgattcagtctaattaattagtggtttgcagttt

SEQ ID NO: 17274 - protein, 807 aa, Zea mays subsp. mays
  peptide (1)..(807): Ceres Seq. ID no. 12361730
  misc_feature (259)..(803): Pfam Name: Hsp90 protein Pfam Description: Hsp90 protein
  misc_feature (502)..(805): Homolog of NCBI NO: 22086553 NR Description: heat shock protein Hsp90 [Achlya ambisexualis]
  misc_feature (73)..(491): Homolog of NCBI NO: 22086553 NR Description: heat shock protein Hsp90 [Achlya ambisexualis]
  misc_feature (502)..(801): Homolog of NCBI NO: 6016264 NR Description: HEAT SHOCK PROTEIN 90
  misc_feature (499)..(798): Homolog of NCBI NO: 20453106 NR Description: At2g04030/F3C11.14 [Arabidopsis thaliana]
  misc_feature (499)..(798): Homolog of NCBI NO: 15228059 NR Description: putative heat shock protein
  misc_feature (57)..(491): Homolog of NCBI NO: 15228059 NR Description: putative heat shock protein
  misc_feature (57)..(491): Homolog of NCBI NO: 20453106 NR Description: At2g04030/F3C11.14 [Arabidopsis thaliana]
  misc_feature (78)..(492): Homolog of NCBI NO: 6016264 NR Description: HEAT SHOCK PROTEIN 90
  misc_feature (496)..(806): Homolog of NCBI NO: 27803586 NR Description: heat shock protein gp96 [Strongylocentrotus
  misc_feature (43)..(494): Homolog of NCBI NO: 27803586 NR Description: heat shock protein gp96 [Strongylocentrotus
MRKWALSSALLLLFLLTTLPDPAKKLQVNAEESSDDLANPPKVEEKLGAVPHGLSTDSEVAQREAESISRKTLRSSAEKFEFQAEVSRLMDIIINSLYSNKDIFLRELISNASDALDKIRFLSLTDKEVLGEGDTAKLEIQIKLDKEKKILSIRDRGIGMTKEDLIKNLGTIAKSGTSAFVEKMQSGGDLNLIGQFGVGFYSVYLVADYVEVVSKHNDDKQYVWESKADGSFAISEDTWNEPLGRGTEIRLHLRDEAKEYLEEDKLKDLVKKYSEFINFPIYLWSTKEVDVEVPTDEDETSEEEDSTPETTEEETEEDEDEEKEKKPKTKTIKETTSEWELLNDVKAVWLRSPKEVTDEEYSKFYHSLAKDFGDDKPMGWSHFTAEGDVEFKALLFIPPKAPHDLYESYYNSNKSNLKLYVRRVFISDEFDDLLPKYLSFLKGIVDSDTLPLNVSREMLQQHSSLKTIKKKLIRKALDMIRKLAEEDPDEYSNKDKTDEEKSEMEEKKGQYAKFWNEFGKSIKLGIIEDATNRNRLAKLLRFESTKSDGKLASLDEYISRMKSGQKDIFYITGSSKEQLEKSPFLERLTKKNYEVIFFTDPVDEYLMQYLMDYEDKKFQNVSKEGLKLGKDSKLKDLKESFKELTDWWKKALESENVDSVKISNRLHDTPCVVVTSKYGWSANMEKIMQAQTLSDSSKQAYMRGKRVLEINPRHPIIKELRDKVAQDNESEELKHTARLVYQTALMESGFNLPDPKEFASSIYKSVQKGLDLSPDATVEEDDEAEEQPEVEEKEPEPEPSSYDKDEL

SEQ ID NO: 17275 - protein, 718 aa, Zea mays subsp. mays
  peptide (1)..(718): Ceres Seq. ID no. 12361731
  misc_feature (170)..(714): Pfam Name: Hsp90 protein Pfam Description: Hsp90 protein
  misc_feature (410)..(709): Homolog of NCBI NO: 20453106 NR Description: At2g04030/F3C11.14 [Arabidopsis thaliana]
  misc_feature (1)..(402): Homolog of NCBI NO: 20453106 NR Description: At2g04030/F3C11.14 [Arabidopsis thaliana]
  misc_feature (410)..(709): Homolog of NCBI NO: 15228059 NR Description: putative heat shock protein
  misc_feature (1)..(402): Homolog of NCBI NO: 15228059 NR Description: putative heat shock protein
  misc_feature (413)..(712): Homolog of NCBI NO: 6016264 NR Description: HEAT SHOCK PROTEIN 90
  misc_feature (1)..(403): Homolog of NCBI NO: 6016264 NR Description: HEAT SHOCK PROTEIN 90
  misc_feature (413)..(716): Homolog of NCBI NO: 22086553 NR Description: heat shock protein Hsp90 [Achlya ambisexualis]
  misc_feature (1)..(402): Homolog of NCBI NO: 22086553 NR Description: heat shock protein Hsp90 [Achlya ambisexualis]
  misc_feature (407)..(717): Homolog of NCBI NO: 27803586 NR Description: heat shock protein gp96 [Strongylocentrotus
  misc_feature (1)..(405): Homolog of NCBI NO: 27803586 NR Description: heat shock protein gp96 [Strongylocentrotus
MDIIINSLYSNKDIFLRELISNASDALDKIRFLSLTDKEVLGEGDTAKLEIQIKLDKEKKILSIRDRGIGMTKEDLIKNLGTIAKSGTSAFVEKMQSGGDLNLIGQFGVGFYSVYLVADYVEVVSKHNDDKQYVWESKADGSFAISEDTWNEPLGRGTEIRLHLRDEAKEYLEEDKLKDLVKKYSEFINFPIYLWSTKEVDVEVPTDEDETSEEEDSTPETTEEETEEDEDEEKEKKPKTKTIKETTSEWELLNDVKAVWLRSPKEVTDEEYSKFYHSLAKDFGDDKPMGWSHFTAEGDVEFKALLFIPPKAPHDLYESYYNSNKSNLKLYVRRVFISDEFDDLLPKYLSFLKGIVDSDTLPLNVSREMLQQHSSLKTIKKKLIRKALDMIRKLAEEDPDEYSNKDKTDEEKSEMEEKKGQYAKFWNEFGKSIKLGIIEDATNRNRLAKLLRFESTKSDGKLASLDEYISRMKSGQKDIFYITGSSKEQLEKSPFLERLTKKNYEVIFFTDPVDEYLMQYLMDYEDKKFQNVSKEGLKLGKDSKLKDLKESFKELTDWWKKALESENVDSVKISNRLHDTPCVVVTSKYGWSANMEKIMQAQTLSDSSKQAYMRGKRVLEINPRHPIIKELRDKVAQDNESEELKHTARLVYQTALMESGFNLPDPKEFASSIYKSVQKGLDLSPDATVEEDDEAEEQPEVEEKEPEPEPSSYDKDEL

SEQ ID NO: 17276 - protein, 648 aa, Zea mays subsp. mays
  peptide (1)..(648): Ceres Seq. ID no. 12361732
  misc_feature (100)..(644): Pfam Name: Hsp90 protein Pfam Description: Hsp90 protein
  misc_feature (340)..(639): Homolog of NCBI NO: 20453106 NR Description: At2g04030/F3C11.14 [Arabidopsis thaliana]
  misc_feature (1)..(332): Homolog of NCBI NO: 20453106 NR Description: At2g04030/F3C11.14 [Arabidopsis thaliana]
  misc_feature (340)..(639): Homolog of NCBI NO: 15228059 NR Description: putative heat shock protein
  misc_feature (1)..(332): Homolog of NCBI NO: 15228059 NR Description: putative heat shock protein
  misc_feature (343)..(642): Homolog of NCBI NO: 6016264 NR Description: HEAT SHOCK PROTEIN 90
  misc_feature (1)..(333): Homolog of NCBI NO: 6016264 NR Description: HEAT SHOCK PROTEIN 90
  misc_feature (343)..(646): Homolog of NCBI NO: 22086553 NR Description: heat shock protein Hsp90 [Achlya ambisexualis]
  misc_feature (1)..(332): Homolog of NCBI NO: 22086553 NR Description: heat shock protein Hsp90 [Achlya ambisexualis]
  misc_feature (337)..(647): Homolog of NCBI NO: 27803586 NR Description: heat shock protein gp96 [Strongylocentrotus
  misc_feature (1)..(335): Homolog of NCBI NO: 27803586 NR Description: heat shock protein gp96 [Strongylocentrotus
MTKEDLIKNLGTIAKSGTSAFVEKMQSGGDLNLIGQFGVGFYSVYLVADYVEVVSKHNDDKQYVWESKADGSFAISEDTWNEPLGRGTEIRLHLRDEAKEYLEEDKLKDLVKKYSEFINFPIYLWSTKEVDVEVPTDEDETSEEEDSTPETTEEETEEDEDEEKEKKPKTKTIKETTSEWELLNDVKAVWLRSPKEVTDEEYSKFYHSLAKDFGDDKPMGWSHFTAEGDVEFKALLFIPPKAPHDLYESYYNSNKSNLKLYVRRVFISDEFDDLLPKYLSFLKGIVDSDTLPLNVSREMLQQHSSLKTIKKKLIRKALDMIRKLAEEDPDEYSNKDKTDEEKSEMEEKKGQYAKFWNEFGKSIKLGIIEDATNRNRLAKLLRFESTKSDGKLASLDEYISRMKSGQKDIFYITGSSKEQLEKSPFLERLTKKNYEVIFFTDPVDEYLMQYLMDYEDKKFQNVSKEGLKLGKDSKLKDLKESFKELTDWWKKALESENVDSVKISNRLHDTPCVVVTSKYGWSANMEKIMQAQTLSDSSKQAYMRGKRVLEINPRHPIIKELRDKVAQDNESEELKHTARLVYQTALMESGFNLPDPKEFASSIYKSVQKGLDLSPDATVEEDDEAEEQPEVEEKEPEPEPSSYDKDEL

SEQ ID NO: 17277 - DNA, 2830 bp, Zea mays subsp. mays; identical to SEQ ID NO: 2518
  misc_feature (1)..(2830): Ceres Seq. ID no. 12362942
  misc_feature: MA Experiment ID: 108543 Result: Up-regulated in Transcription

SEQ ID NO: 17278 - protein, 844 aa, Zea mays subsp. mays; identical to SEQ ID NO: 2519
  peptide (1)..(844): Ceres Seq. ID no. 12362943
  misc_feature (6)..(729): Pfam Name: Glycosyl hydrolases family 35 Pfam Description: Glycosyl hydrolases family 35
  misc_feature (6)..(729): Pfam Name: Glycosyl hydrolases family 35 Pfam Description: Glycosyl hydrolases family 35
  misc_feature (13)..(844): Homolog of NCBI NO: 15081596 NR Description: putative beta-galactosidase BG1 [Vitis vinifera]
  misc_feature (1)..(437): Homolog of NCBI NO: 18403090 NR Description: glycosyl hydrolase family 35 (beta-galactosidase)
  misc_feature (375)..(844): Homolog of NCBI NO: 18403090 NR Description: glycosyl hydrolase family 35 (beta-galactosidase)
  misc_feature (26)..(844): Homolog of NCBI NO: 7939623 NR Description: putative beta-galactosidase [Lycopersicon
  misc_feature (5)..(843): Homolog of NCBI NO: 14970841 NR Description: beta-galactosidase [Fragaria x ananassa]
  misc_feature (13)..(844): Homolog of NCBI NO: 15081596 NR Description: putative beta-galactosidase BG1 [Vitis vinifera]
  misc_feature (375)..(844): Homolog of NCBI NO: 18403090 NR Description: glycosyl hydrolase family 35 (beta-galactosidase)
  misc_feature (5)..(843): Homolog of NCBI NO: 14970841 NR Description: beta-galactosidase [Fragaria x ananassa]
  misc_feature (25)..(844): Homolog of NCBI NO: 7939621 NR Description: beta-galactosidase [Lycopersicon esculentum]
  misc_feature (6)..(734): Homolog of NCBI NO: 15242897 NR Description: glycosyl hydrolase family 35 (beta-galactosidase)
  misc_feature (6)..(734): Homolog of NCBI NO: 6686892 NR Description: putative beta-galactosidase [Arabidopsis thaliana]
  misc_feature (1)..(844): Homolog of NCBI NO: 6686888 NR Description: putative beta-galactosidase [Arabidopsis thaliana]
  misc_feature (14)..(844): Homolog of NCBI NO: 25326167 NR Description: probable beta-galactosidase [imported] -
  misc_feature (26)..(844): Homolog of NCBI NO: 7939623 NR Description: putative beta-galactosidase [Lycopersicon
  misc_feature (1)..(437): Homolog of NCBI NO: 18403090 NR Description: glycosyl hydrolase family 35 (beta-galactosidase)
  misc_feature (14)..(844): Homolog of NCBI NO: 25326167 NR Description: probable beta-galactosidase [imported] -
  misc_feature (1)..(844): Homolog of NCBI NO: 6686888 NR Description: putative beta-galactosidase [Arabidopsis thaliana]
  misc_feature (6)..(734): Homolog of NCBI NO: 6686892 NR Description: putative beta-galactosidase [Arabidopsis thaliana]
  misc_feature (6)..(734): Homolog of NCBI NO: 15242897 NR Description: glycosyl hydrolase family 35 (beta-galactosidase)
  misc_feature (25)..(844): Homolog of NCBI NO: 7939621 NR Description: beta-galactosidase [Lycopersicon esculentum]

SEQ ID NO: 17279 - protein, 786 aa, Zea mays subsp. mays; identical to SEQ ID NO: 2520
  peptide (1)..(786): Ceres Seq. ID no. 12362944
  misc_feature (1)..(671): Pfam Name: Glycosyl hydrolases family 35 Pfam Description: Glycosyl hydrolases family 35
  misc_feature (1)..(671): Pfam Name: Glycosyl hydrolases family 35 Pfam Description: Glycosyl hydrolases family 35
  misc_feature (1)..(786): Homolog of NCBI NO: 15081596 NR Description: putative beta-galactosidase BG1 [Vitis vinifera]
  misc_feature (1)..(379): Homolog of NCBI NO: 18403090 NR Description: glycosyl hydrolase family 35 (beta-galactosidase)
  misc_feature (317)..(786): Homolog of NCBI NO: 18403090 NR Description: glycosyl hydrolase family 35 (beta-galactosidase)
  misc_feature (1)..(786): Homolog of NCBI NO: 7939623 NR Description: putative beta-galactosidase [Lycopersicon
  misc_feature (1)..(785): Homolog of NCBI NO: 14970841 NR Description: beta-galactosidase [Fragaria x ananassa]
  misc_feature (1)..(786): Homolog of NCBI NO: 15081596 NR Description: putative beta-galactosidase BG1 [Vitis vinifera]
  misc_feature (317)..(786): Homolog of NCBI NO: 18403090 NR Description: glycosyl hydrolase family 35 (beta-galactosidase)
  misc_feature (1)..(785): Homolog of NCBI NO: 14970841 NR Description: beta-galactosidase [Fragaria x ananassa]
  misc_feature (1)..(786): Homolog of NCBI NO: 7939621 NR Description: beta-galactosidase [Lycopersicon esculentum]
  misc_feature (1)..(676): Homolog of NCBI NO: 15242897 NR Description: glycosyl hydrolase family 35 (beta-galactosidase)
  misc_feature (1)..(676): Homolog of NCBI NO: 6686892 NR Description: putative beta-galactosidase [Arabidopsis thaliana]
  misc_feature (1)..(786): Homolog of NCBI NO: 6686888 NR Description: putative beta-galactosidase [Arabidopsis thaliana]
  misc_feature (1)..(786): Homolog of NCBI NO: 25326167 NR Description: probable beta-galactosidase [imported] -
  misc_feature (1)..(786): Homolog of NCBI NO: 7939623 NR Description: putative beta-galactosidase [Lycopersicon
  misc_feature (1)..(379): Homolog of NCBI NO: 18403090 NR Description: glycosyl hydrolase family 35 (beta-galactosidase)
  misc_feature (1)..(786): Homolog of NCBI NO: 25326167 NR Description: probable beta-galactosidase [imported] -
  misc_feature (1)..(786): Homolog of NCBI NO: 6686888 NR Description: putative beta-galactosidase [Arabidopsis thaliana]
  misc_feature (1)..(676): Homolog of NCBI NO: 6686892 NR Description: putative beta-galactosidase [Arabidopsis thaliana]
  misc_feature (1)..(676): Homolog of NCBI NO: 15242897 NR Description: glycosyl hydrolase family 35 (beta-galactosidase)
  misc_feature (1)..(786): Homolog of NCBI NO: 7939621 NR Description: beta-galactosidase [Lycopersicon esculentum]

SEQ ID NO: 17280 - protein, 692 aa, Zea mays subsp. mays; identical to SEQ ID NO: 2521
  peptide (1)..(692): Ceres Seq. ID no. 12362945
  misc_feature (1)..(577): Pfam Name: Glycosyl hydrolases family 35 Pfam Description: Glycosyl hydrolases family 35
  misc_feature (1)..(577): Pfam Name: Glycosyl hydrolases family 35 Pfam Description: Glycosyl hydrolases family 35
  misc_feature (1)..(285): Homolog of NCBI NO: 18403090 NR Description: glycosyl hydrolase family 35 (beta-galactosidase)
  misc_feature (223)..(692): Homolog of NCBI NO: 18403090 NR Description: glycosyl hydrolase family 35 (beta-galactosidase)
  misc_feature (1)..(692): Homolog of NCBI NO: 7939623 NR Description: putative beta-galactosidase [Lycopersicon
  misc_feature (1)..(691): Homolog of NCBI NO: 14970841 NR Description: beta-galactosidase [Fragaria x ananassa]
  misc_feature (1)..(692): Homolog of NCBI NO: 25326167 NR Description: probable beta-galactosidase [imported] -
  misc_feature (1)..(692): Homolog of NCBI NO: 15081596 NR Description: putative beta-galactosidase BG1 [Vitis vinifera]
  misc_feature (223)..(692): Homolog of NCBI NO: 18403090 NR Description: glycosyl hydrolase family 35 (beta-galactosidase)
  misc_feature (1)..(691): Homolog of NCBI NO: 14970841 NR Description: beta-galactosidase [Fragaria x ananassa]
  misc_feature (1)..(692): Homolog of NCBI NO: 7939621 NR Description: beta-galactosidase [Lycopersicon esculentum]
  misc_feature (1)..(582): Homolog of NCBI NO: 15242897 NR Description: glycosyl hydrolase family 35 (beta-galactosidase)
  misc_feature (1)..(582): Homolog of NCBI NO: 6686892 NR Description: putative beta-galactosidase [Arabidopsis thaliana]
  misc_feature (1)..(692): Homolog of NCBI NO: 6686888 NR Description: putative beta-galactosidase [Arabidopsis thaliana]
  misc_feature (1)..(692): Homolog of NCBI NO: 25326167 NR Description: probable beta-galactosidase [imported] -
  misc_feature (1)..(692): Homolog of NCBI NO: 7939623 NR Description: putative beta-galactosidase [Lycopersicon
  misc_feature (1)..(285): Homolog of NCBI NO: 18403090 NR Description: glycosyl hydrolase family 35 (beta-galactosidase)
  misc_feature (1)..(692): Homolog of NCBI NO: 15081596 NR Description: putative beta-galactosidase BG1 [Vitis vinifera]
  misc_feature (1)..(692): Homolog of NCBI NO: 6686888 NR Description: putative beta-galactosidase [Arabidopsis thaliana]
  misc_feature (1)..(582): Homolog of NCBI NO: 6686892 NR Description: putative beta-galactosidase [Arabidopsis thaliana]
  misc_feature (1)..(582): Homolog of NCBI NO: 15242897 NR Description: glycosyl hydrolase family 35 (beta-galactosidase)
  misc_feature (1)..(692): Homolog of NCBI NO: 7939621 NR Description: beta-galactosidase [Lycopersicon esculentum]

SEQ ID NO: 17281 - DNA, 2222 bp, Zea mays subsp. mays
  misc_feature (1)..(2222): Ceres Seq. ID no. 12417404
  misc_feature: MA Experiment ID: 108543 Result: Down-regulated in Transcription
  misc_feature: MA Experiment ID: 108544 Result: Up-regulated in Transcription
gcacgagaccattacctagaacatcctaatcgaaaacacatactctgctgctgctaagtggtggcatctcgtttaggcgagatccccctcctcccccgctttccactcctctcctccaccctagtcgactccttccctgcaatccgctggccggctcacagtaccagaggagtccaccggaggagctcagctagactccaccctggtggctcgatcggcaccggccgctgcctgcgagactccgccagcgcgcgatgtaccgggtgaagagcgagggcgagggcgagggcgagggcgactgcgaaatgatgctgcaggaacagatggactcgctggtggccgacgacgtcagcagcggaggagggtcgcctcacaggggcgtcggcacgcccctgaagaaggggccatggacgtccgcggaggacgccatcctggtggactacgttaagaagaacggcgaaggcaactggaacgcggtgcagaagaacaccgggctgttccgctgcggcaagagctgccgcctccggtgggcgaaccacctcaggcccaacctcaagaagggggccttcacccccgaggaggagcgcctcatcatccagctccacgccaagatggggaacaagtgggcgaggatggctggtcacttgccagggcgtactgacaatgagatcaagaactactggaacactcgaataaagagatgtcaacgagctagccttcctatttatcctgctagtgtatgcaatcaatctacaaatgaagatcagcaactgtctggtaattttaacggtggcgagaatatatccaatgatcttctatctgggaacagcctttatctgccagattttaccagtgacaatttcattgcgaacccagaggctttatcctatgcaccacagttgtcagctgtttcaataagcaatttgctcggccaaagctttgcatcaaaaagttgtagcttcatggatcaggttgaccaagcggggatgctgaaacaatctggctgtgtgcttcctgcattgagcgatgccattgacagtgtgctttcctcagctgatcatttttcaaatgactctgagaagctcaggcaggctttaggttttgattatctaaatgaagccaatgctagcagcaagagtattgcacctttcggggttgcacttactggcagccatgcctttttaaatggcaatttctctgcttctaggcccacaaatggtcctttgaagatggagctcccttcactccaagatactgaatctgatccaaatagctggctcaagtatactgtggctcctgcaatgcagcctactgaattagtagatccttacctgcagtctccatcagcgaccccttcagtgaaatctgagtgtgcatcgccgaggaacagtggtcttttggaagagctgcttcatgaagctcaggcactaagatctgggaagaaccaacaatcatcggtccgaagttcaagttcttctgctggcacaccttatgagactaccacggtggttagcccagagtttgatatgggtcaggaatattgggaagaacagcccagttctttcctcagtgaatatgctcattttagtggaaattctttcactgaatccactcctcctgttagtgctgcgtcacctgatatcttccagctctccaagatttctcctgcacaaagcccttcaatgggctctggcgagcaggcgttagagcctaaacatgagtcggcagcttcacctcgtcctgaaaacttgaggcctgatgcattattctctgggaacacagccgatccatccattttcaataatgccatagccatgctcctgggcaatggcattgatgccgagtacaaacctgttcttggtgatggaattgtgctcgattcttcgtcatggaacaacatgcaacatgcttttcagatggcgggattcaaatgagttccatgcacttgtttgtgatgctgaagggcttcttgttgcttgttttggggtcagtatcagcgaaggccgcattgattgtgacgctgcattcctgacagagggcgtgcaggtgcagcagctaccatatgtgatcttcatgctaatagtccttttgtctaataaagtgcatgaagataaaccggatatttttttttgctttgtattagagaaccgtttttgtcaaccctgtcaggattctgttggaaatgtgtcatgatttttgtttgaacaatttaatatctgtcg

SEQ ID NO: 17282 - protein, 559 aa, Zea mays subsp. mays
  peptide (1)..(559): Ceres Seq. ID no. 12417405
  misc_feature (49)..(96): Pfam Name: Myb-like DNA-binding domain Pfam Description: Myb-like DNA-binding domain
  misc_feature (25)..(455): Homolog of NCBI NO: 15239926 NR Description: MYB family transcription factor-like; protein id:
  misc_feature (25)..(549): Homolog of NCBI NO: 15229748 NR Description: Myb DNA-binding protein, putative; protein id:
  misc_feature (38)..(199): Homolog of NCBI NO: 8247759 NR Description: GAMyb protein [Triticum aestivum]
  misc_feature (326)..(556): Homolog of NCBI NO: 2369878 NR Description: m12 [Hordeum vulgare]
  misc_feature (1)..(556): Homolog of NCBI NO: 4581969 NR Description: myb protein [Avena sativa]
  misc_feature (1)..(556): Homolog of NCBI NO: 4877649 NR Description: gibberellin MYB transcription factor [Lolium
  misc_feature (1)..(556): Homolog of NCBI NO: 13236696 NR Description: transcription factor GAMyb [Hordeum vulgare]
  misc_feature (1)..(556): Homolog of NCBI NO: 7438355 NR Description: myb-related protein - barley
  misc_feature (1)..(559): Homolog of NCBI NO: 34909188 NR Description: myb-related transcription factor
  misc_feature (1)..(559): Homolog of NCBI NO: 7438356 NR Description: myb-related transcription factor - rice
MYRVKSEGEGEGEGDCEMMLQEQMDSLVADDVSSGGGSPHRGVGTPLKKGPWTSAEDAILVDYVKKNGEGNWNAVQKNTGLFRCGKSCRLRWANHLRPNLKKGAFTPEEERLIIQLHAKMGNKWARMAGHLPGRTDNEIKNYWNTRIKRCQRASLPIYPASVCNQSTNEDQQLSGNFNGGENISNDLLSGNSLYLPDFTSDNFIANPEALSYAPQLSAVSISNLLGQSFASKSCSFMDQVDQAGMLKQSGCVLPALSDAIDSVLSSADHFSNDSEKLRQALGFDYLNEANASSKSIAPFGVALTGSHAFLNGNFSASRPTNGPLKMELPSLQDTESDPNSWLKYTVAPAMQPTELVDPYLQSPSATPSVKSECASPRNSGLLEELLHEAQALRSGKNQQSSVRSSSSSAGTPYETTTVVSPEFDMGQEYWEEQPSSFLSEYAHFSGNSFTESTPPVSAASPDIFQLSKISPAQSPSMGSGEQALEPKHESAASPRPENLRPDALFSGNTADPSIFNNAIAMLLGNGIDAEYKPVLGDGIVLDSSSWNNMQHAFQMAGFK

SEQ ID NO: 17283 - protein, 542 aa, Zea mays subsp. mays
  peptide (1)..(542): Ceres Seq. ID no. 12417406
  misc_feature (32)..(79): Pfam Name: Myb-like DNA-binding domain Pfam Description: Myb-like DNA-binding domain
  misc_feature (8)..(438): Homolog of NCBI NO: 15239926 NR Description: MYB family transcription factor-like; protein id:
  misc_feature (8)..(532): Homolog of NCBI NO: 15229748 NR Description: Myb DNA-binding protein, putative; protein id:
  misc_feature (21)..(182): Homolog of NCBI NO: 8247759 NR Description: GAMyb protein [Triticum aestivum]
  misc_feature (309)..(539): Homolog of NCBI NO: 2369878 NR Description: m12 [Hordeum vulgare]
  misc_feature (1)..(539): Homolog of NCBI NO: 4581969 NR Description: myb protein [Avena sativa]
  misc_feature (1)..(539): Homolog of NCBI NO: 4877649 NR Description: gibberellin MYB transcription factor [Lolium
  misc_feature (1)..(539): Homolog of NCBI NO: 13236696 NR Description: transcription factor GAMyb [Hordeum vulgare]
  misc_feature (1)..(539): Homolog of NCBI NO: 7438355 NR Description: myb-related protein - barley
  misc_feature (1)..(542): Homolog of NCBI NO: 34909188 NR Description: myb-related transcription factor
  misc_feature (1)..(542): Homolog of NCBI NO: 7438356 NR Description: myb-related transcription factor - rice
MMLQEQMDSLVADDVSSGGGSPHRGVGTPLKKGPWTSAEDAILVDYVKKNGEGNWNAVQKNTGLFRCGKSCRLRWANHLRPNLKKGAFTPEEERLIIQLHAKMGNKWARMAGHLPGRTDNEIKNYWNTRIKRCQRASLPIYPASVCNQSTNEDQQLSGNFNGGENISNDLLSGNSLYLPDFTSDNFIANPEALSYAPQLSAVSISNLLGQSFASKSCSFMDQVDQAGMLKQSGCVLPALSDAIDSVLSSADHFSNDSEKLRQALGFDYLNEANASSKSIAPFGVALTGSHAFLNGNFSASRPTNGPLKMELPSLQDTESDPNSWLKYTVAPAMQPTELVDPYLQSPSATPSVKSECASPRNSGLLEELLHEAQALRSGKNQQSSVRSSSSSAGTPYETTTVVSPEFDMGQEYWEEQPSSFLSEYAHFSGNSFTESTPPVSAASPDIFQLSKISPAQSPSMGSGEQALEPKHESAASPRPENLRPDALFSGNTADPSIFNNAIAMLLGNGIDAEYKPVLGDGIVLDSSSWNNMQHAFQMAGFK

SEQ ID NO: 17284 - protein, 541 aa, Zea mays subsp. mays
  peptide (1)..(541): Ceres Seq. ID no. 12417407
  misc_feature (31)..(78): Pfam Name: Myb-like DNA-binding domain Pfam Description: Myb-like DNA-binding domain
  misc_feature (7)..(437): Homolog of NCBI NO: 15239926 NR Description: MYB family transcription factor-like; protein id:
  misc_feature (7)..(531): Homolog of NCBI NO: 15229748 NR Description: Myb DNA-binding protein, putative; protein id:
  misc_feature (20)..(181): Homolog of NCBI NO: 8247759 NR Description: GAMyb protein [Triticum aestivum]
  misc_feature (308)..(538): Homolog of NCBI NO: 2369878 NR Description: m12 [Hordeum vulgare]
  misc_feature (1)..(538): Homolog of NCBI NO: 4581969 NR Description: myb protein [Avena sativa]
  misc_feature (1)..(538): Homolog of NCBI NO: 4877649 NR Description: gibberellin MYB transcription factor [Lolium
  misc_feature (1)..(538): Homolog of NCBI NO: 13236696 NR Description: transcription factor GAMyb [Hordeum vulgare]
  misc_feature (1)..(538): Homolog of NCBI NO: 7438355 NR Description: myb-related protein - barley
  misc_feature (1)..(541): Homolog of NCBI NO: 34909188 NR Description: myb-related transcription factor
  misc_feature (1)..(541): Homolog of NCBI NO: 7438356 NR Description: myb-related transcription factor - rice
MLQEQMDSLVADDVSSGGGSPHRGVGTPLKKGPWTSAEDAILVDYVKKNGEGNWNAVQKNTGLFRCGKSCRLRWANHLRPNLKKGAFTPEEERLIIQLHAKMGNKWARMAGHLPGRTDNEIKNYWNTRIKRCQRASLPIYPASVCNQSTNEDQQLSGNFNGGENISNDLLSGNSLYLPDFTSDNFIANPEALSYAPQLSAVSISNLLGQSFASKSCSFMDQVDQAGMLKQSGCVLPALSDAIDSVLSSADHFSNDSEKLRQALGFDYLNEANASSKSIAPFGVALTGSHAFLNGNFSASRPTNGPLKMELPSLQDTESDPNSWLKYTVAPAMQPTELVDPYLQSPSATPSVKSECASPRNSGLLEELLHEAQALRSGKNQQSSVRSSSSSAGTPYETTTVVSPEFDMGQEYWEEQPSSFLSEYAHFSGNSFTESTPPVSAASPDIFQLSKISPAQSPSMGSGEQALEPKHESAASPRPENLRPDALFSGNTADPSIFNNAIAMLLGNGIDAEYKPVLGDGIVLDSSSWNNMQHAFQMAGFK

SEQ ID NO: 17285 - DNA, 1649 bp, Zea mays subsp. mays
  misc_feature (1)..(1649): Ceres Seq. ID no. 12375395
  misc_feature: MA Experiment ID: 108504 Result: Down-regulated in Transcription
  misc_feature: MA Experiment 108504 PARAMETER Experiment Name: Zm_Drought_P Parameter: Age (day) Value: 8
  misc_feature: MA Experiment 108504 PARAMETER Experiment Name: Zm_Drought_P Parameter: Organism Value: Zea mays
  misc_feature: MA Experiment 108504 PARAMETER Experiment Name: Zm_Drought_P Parameter: Plant Line Value: 35A19
  misc_feature: MA Experiment 108504 PARAMETER Experiment Name: Zm_Drought_P Parameter: Timepoint (hr) Value: 12
  misc_feature: MA Experiment 108504 PARAMETER Experiment Name: Zm_Drought_P Parameter: Tissue Value: Aerial
  misc_feature: MA Experiment 108504 PARAMETER Experiment Name: Zm_Drought_P Parameter: Treatment Value: Drought vs. No Drought
  misc_feature: MA Experiment ID: 108527 Result: Down-regulated in Transcription
  misc_feature: MA Experiment 108527 PARAMETER Experiment Name: Zm_5mM_NO_P Parameter: Age (day) Value: 8
  misc_feature: MA Experiment 108527 PARAMETER Experiment Name: Zm_5mM_NO_P Parameter: Organism Value: Zea mays
  misc_feature: MA Experiment 108527 PARAMETER Experiment Name: Zm_5mM_NO_P Parameter: Plant Line Value: 35A19
  misc_feature: MA Experiment 108527 PARAMETER Experiment Name: Zm_5mM_NO_P Parameter: Timepoint (hr) Value: 6
  misc_feature: MA Experiment 108527 PARAMETER Experiment Name: Zm_5mM_NO_P Parameter: Tissue Value: Aerial
  misc_feature: MA Experiment 108527 PARAMETER Experiment Name: Zm_5mM_NO_P Parameter: Treatment Value: 5mM NO vs. No Treatment
  misc_feature: MA Experiment ID: 108536 Result: Down-regulated in Transcription
  misc_feature: MA Experiment 108536 PARAMETER Experiment Name: Zm_Meristem_P Parameter: Age (day) Value: 8
  misc_feature: MA Experiment 108536 PARAMETER Experiment Name: Zm_Meristem_P Parameter: Organism Value: Zea mays
  misc_feature: MA Experiment 108536 PARAMETER Experiment Name: Zm_Meristem_P Parameter: Plant Line Value: 35A19
  misc_feature: MA Experiment 108536 PARAMETER Experiment Name: Zm_Meristem_P Parameter: Tissue Value: Shoot Meristem vs. Above Shoot Meristem
  misc_feature: MA Experiment ID: 108544 Result: Down-regulated in Transcription
  misc_feature: MA Experiment ID: 108556 Result: Down-regulated in Transcription
  misc_feature: MA Experiment 108556 PARAMETER Experiment Name: Zm_Drought_P Parameter: Age (day) Value: 9
  misc_feature: MA Experiment 108556 PARAMETER Experiment Name: Zm_Drought_P Parameter: Organism Value: Zea mays
  misc_feature: MA Experiment 108556 PARAMETER Experiment Name: Zm_Drought_P Parameter: Plant Line Value: 35A19
  misc_feature: MA Experiment 108556 PARAMETER Experiment Name: Zm_Drought_P Parameter: Timepoint (hr) Value: 24
  misc_feature: MA Experiment 108556 PARAMETER Experiment Name: Zm_Drought_P Parameter: Tissue Value: Aerial
  misc_feature: MA Experiment 108556 PARAMETER Experiment Name: Zm_Drought_P Parameter: Treatment Value: Drought vs. No Drought
  misc_feature: MA Experiment ID: 108559 Result: Down-regulated in Transcription
  misc_feature: MA Experiment 108559 PARAMETER Experiment Name: Zm_5mM_NO_P Parameter: Age (day) Value: 8
  misc_feature: MA Experiment 108559 PARAMETER Experiment Name: Zm_5mM_NO_P Parameter: Organism Value: Zea mays
  misc_feature: MA Experiment 108559 PARAMETER Experiment Name: Zm_5mM_NO_P Parameter: Plant Line Value: 35A19
  misc_feature: MA Experiment 108559 PARAMETER Experiment Name: Zm_5mM_NO_P Parameter: Timepoint (hr) Value: 12
  misc_feature: MA Experiment 108559 PARAMETER Experiment Name: Zm_5mM_NO_P Parameter: Tissue Value: Aerial
  misc_feature: MA Experiment 108559 PARAMETER Experiment Name: Zm_5mM_NO_P Parameter: Treatment Value: 5mM NO vs. No Treatment
  misc_feature: MA Experiment ID: 20000477 Result: Down-regulated in Transcription
  misc_feature: MA Experiment 20000477 PARAMETER Experiment Name: Zm_5mM_SA_P Parameter: Age (day) Value: 10
  misc_feature: MA Experiment 20000477 PARAMETER Experiment Name: Zm_5mM_SA_P Parameter: Organism Value: Zea mays
  misc_feature: MA Experiment 20000477 PARAMETER Experiment Name: Zm_5mM_SA_P Parameter: Plant Line Value: 35A19
  misc_feature: MA Experiment 20000477 PARAMETER Experiment Name: Zm_5mM_SA_P Parameter: Timepoint (hr) Value: 48
  misc_feature: MA Experiment 20000477 PARAMETER Experiment Name: Zm_5mM_SA_P Parameter: Tissue Value: Aerial
  misc_feature: MA Experiment 20000477 PARAMETER Experiment Name: Zm_5mM_SA_P Parameter: Treatment Value: 5mM SA vs. No Treatment
  misc_feature: MA Experiment ID: 20000478 Result: Down-regulated in Transcription
  misc_feature: MA Experiment 20000478 PARAMETER Experiment Name: Zm_5mM_SA_P Parameter: Age (day) Value: 11
  misc_feature: MA Experiment 20000478 PARAMETER Experiment Name: Zm_5mM_SA_P Parameter: Organism Value: Zea mays
  misc_feature: MA Experiment 20000478 PARAMETER Experiment Name: Zm_5mM_SA_P Parameter: Plant Line Value: 35A19
  misc_feature: MA Experiment 20000478 PARAMETER Experiment Name: Zm_5mM_SA_P Parameter: Timepoint (hr) Value: 72
  misc_feature: MA Experiment 20000478 PARAMETER Experiment Name: Zm_5mM_SA_P Parameter: Tissue Value: Aerial
  misc_feature: MA Experiment 20000478 PARAMETER Experiment Name: Zm_5mM_SA_P Parameter: Treatment Value: 5mM SA vs. No Treatment
  misc_feature: MA Experiment ID: 20000480 Result: Down-regulated in Transcription
  misc_feature: MA Experiment 20000480 PARAMETER Experiment Name: Zm_Drought_P Parameter: Age (day) Value: 11
  misc_feature: MA Experiment 20000480 PARAMETER Experiment Name: Zm_Drought_P Parameter: Organism Value: Zea mays
  misc_feature: MA Experiment 20000480 PARAMETER Experiment Name: Zm_Drought_P Parameter: Plant Line Value: 35A19
  misc_feature: MA Experiment 20000480 PARAMETER Experiment Name: Zm_Drought_P Parameter: Timepoint (hr) Value: 72
  misc_feature: MA Experiment 20000480 PARAMETER Experiment Name: Zm_Drought_P Parameter: Tissue Value: Aerial
  misc_feature: MA Experiment 20000480 PARAMETER Experiment Name: Zm_Drought_P Parameter: Treatment Value: Drought vs. No Drought
  misc_feature: MA Experiment ID: 20000535 Result: Up-regulated in Transcription
  misc_feature: MA Experiment 20000535 PARAMETER Experiment Name: Zm_Hybrid_Seed_Dev_P Parameter: DAP Value: 30 vs. 12
  misc_feature: MA Experiment 20000535 PARAMETER Experiment Name: Zm_Hybrid_Seed_Dev_P Parameter: Organism Value: Zea mays
  misc_feature: MA Experiment 20000535 PARAMETER Experiment Name: Zm_Hybrid_Seed_Dev_P Parameter: Plant Line Value: 35A19
  misc_feature: MA Experiment 20000535 PARAMETER Experiment Name: Zm_Hybrid_Seed_Dev_P Parameter: Tissue Value: Embryo vs. Unfert Floret
gcacgagaccattacctagaacatcctaatcgaaaaagcaacagccatggcttcagcgaagcagagcaagaagatgcgcatacttctgatcccattcttcgccaccagccacatcgggccctacatcgacttcgccgtccgtctcgcggcagccaggccaggagccgtcgagcccaccgtcgccgtgaccccggccaatgttgcggtggtccggtcggcgctcgagcgccacggccccgcggcgagcggcacggtcaggatcgtcacgtacccgttcccgcgcgtggatggcctcgctccgggcgtggagaacctctccaccgccggagacgacgcgtggcgcatcgacgccgccgccatcgacgaggccctctcgcggccggcgcaggaggcgctcctcagggagcggtcccccgacgccgtcgtgtcggactaccacttcttctggaccagcagcatcgccgccgagctgggcctgccgtgcgtcgttttcagtgtcatcgcccccttctcgggtctcgtcatgcgcatcctcgccggcgccgtcgtctctgggtcgcgtgacgttaccgttcccgggttgccagggccggagatacggatccccgtcagcgagctgccggagttcctgagacgcccggcgaaggaccaaggcacgttcagcccctgcaacgcggcgcaggccaggtgtttgggcgtcgcctacaacacgttcgcaggcatggagcaggagtaccgcgaggcgaacgtgcgcgccaaatccttgaagcgctgctacttcgtcggccccgtctcactgccgctgccggcggcagcggcaggcaccagcgagtctccatgcatcaggtggctcgactccaggccaaactgctcggtggtgtacgtgtgcttcggcacctacgccgccatctcggaggaccagctccgggagctggcgctcggcctggaggcctcaggggagccgttcctgtgggtggtgagggccgacgggtggacgccgccggagggctgggagcagcgcgtcggggagagggggatgctggtgagagggtgggctccgcagacggcggtgctggcccatccagcggtgggcgcgttcctgacgcactgcgggtcgagctcgttgctggaggcggcggcggccggcgtgccgatgctgacgtggccgctggtgttcgaccagttcatcgaggagaggctggtgacggacgtgctcgggatcggggagcgggtctggagtggggcgcggagcacgaggtacgaggagagggagctcgtgccggcggaggcggtggctcgggcggtggcgaggttcttggagccaggcgggccgggggaggcggcgaggggcagggcgcgggatctcgcagtgaaggcccacgctgccgtagcggagggcggctcgtcgtcccgtgatctgcatcgcctcatcgacgacctggtcgaagccagagcggcaacgagcagctgcaacgctgacagcgagtaagagatggaattgctggagatgtctcgatctggcgagcaactggaagaaggtctcgaacagccttcacggacaagtacgccatctgcaacgtacgtacgttctcggagtcgaagaaaacacttatggaaataatatggtactgcaccacctcgatttctgt

SEQ ID NO: 17286 - protein, 480 aa, Zea mays subsp. mays
  peptide (1)..(480): Ceres Seq. ID no. 12375396
  misc_feature (22)..(473): Pfam Name: UDP-glucoronosyl and UDP-glucosyl transferase Pfam Description: UDP-glucoronosyl and UDP-glucosyl transferase
  misc_feature (9)..(465): Homolog of NCBI NO: 13492674 NR Description: phenylpropanoid:glucosyltransferase 1 [Nicotiana
  misc_feature (10)..(465): Homolog of NCBI NO: 4115534 NR Description: UDP-glycose:flavonoid glycosyltransferase [Vigna
  misc_feature (4)..(465): Homolog of NCBI NO: 32816180 NR Description: flavonoid glucosyl-transferase [Allium cepa]
  misc_feature (9)..(465): Homolog of NCBI NO: 7433906 NR Description: glucosyltransferase IS5a (EC 2.4.1.-),
  misc_feature (16)..(469): Homolog of NCBI NO: 7433911 NR Description: probable glucosyltransferase twi1 (EC 2.4.1.-) -
  misc_feature (1)..(473): Homolog of NCBI NO: 34911572 NR Description: putative salicylate-induced glucosyltransferase
  misc_feature (262)..(474): Homolog of NCBI NO: 34911582 NR Description: putative salicylate-induced glucosyltransferase
  misc_feature (6)..(262): Homolog of NCBI NO: 34911582 NR Description: putative salicylate-induced glucosyltransferase
  misc_feature (8)..(471): Homolog of NCBI NO: 30103010 NR Description: putative immediate-early salicylate-induced
  misc_feature (1)..(471): Homolog of NCBI NO: 30017585 NR Description: putative immediate-early salicylate-induced
MASAKQSKKMRILLIPFFATSHIGPYIDFAVRLAAARPGAVEPTVAVTPANVAVVRSALERHGPAASGTVRIVTYPFPRVDGLAPGVENLSTAGDDAWRIDAAAIDEALSRPAQEALLRERSPDAVVSDYHFFWTSSIAAELGLPCVVFSVIAPFSGLVMRILAGAVVSGSRDVTVPGLPGPEIRIPVSELPEFLRRPAKDQGTFSPCNAAQARCLGVAYNTFAGMEQEYREANVRAKSLKRCYFVGPVSLPLPAAAAGTSESPCIRWLDSRPNCSVVYVCFGTYAAISEDQLRELALGLEASGEPFLWVVRADGWTPPEGWEQRVGERGMLVRGWAPQTAVLAHPAVGAFLTHCGSSSLLEAAAAGVPMLTWPLVFDQFIEERLVTDVLGIGERVWSGARSTRYEERELVPAEAVARAVARFLEPGGPGEAARGRARDLAVKAHAAVAEGGSSSRDLHRLIDDLVEARAATSSCNADSE

SEQ ID NO: 17287 - protein, 471 aa, Zea mays subsp. mays
  peptide (1)..(471): Ceres Seq. ID no. 12375397
  misc_feature (13)..(464): Pfam Name: UDP-glucoronosyl and UDP-glucosyl transferase Pfam Description: UDP-glucoronosyl and UDP-glucosyl transferase
  misc_feature (1)..(456): Homolog of NCBI NO: 13492674 NR Description: phenylpropanoid:glucosyltransferase 1 [Nicotiana
  misc_feature (1)..(456): Homolog of NCBI NO: 4115534 NR Description: UDP-glycose:flavonoid glycosyltransferase [Vigna
  misc_feature (1)..(456): Homolog of NCBI NO: 32816180 NR Description: flavonoid glucosyl-transferase [Allium cepa]
  misc_feature (1)..(456): Homolog of NCBI NO: 7433906 NR Description: glucosyltransferase IS5a (EC 2.4.1.-),
  misc_feature (7)..(460): Homolog of NCBI NO: 7433911 NR Description: probable glucosyltransferase twi1 (EC 2.4.1.-) -
  misc_feature (1)..(464): Homolog of NCBI NO: 34911572 NR Description: putative salicylate-induced glucosyltransferase
  misc_feature (253)..(465): Homolog of NCBI NO: 34911582 NR Description: putative salicylate-induced glucosyltransferase
  misc_feature (1)..(253): Homolog of NCBI NO: 34911582 NR Description: putative salicylate-induced glucosyltransferase
  misc_feature (1)..(462): Homolog of NCBI NO: 30103010 NR Description: putative immediate-early salicylate-induced
  misc_feature (1)..(462): Homolog of NCBI NO: 30017585 NR Description: putative immediate-early salicylate-induced
MRILLIPFFATSHIGPYIDFAVRLAAARPGAVEPTVAVTPANVAVVRSALERHGPAASGTVRIVTYPFPRVDGLAPGVENLSTAGDDAWRIDAAAIDEALSRPAQEALLRERSPDAVVSDYHFFWTSSIAAELGLPCVVFSVIAPFSGLVMRILAGAVVSGSRDVTVPGLPGPEIRIPVSELPEFLRRPAKDQGTFSPCNAAQARCLGVAYNTFAGMEQEYREANVRAKSLKRCYFVGPVSLPLPAAAAGTSESPCIRWLDSRPNCSVVYVCFGTYAAISEDQLRELALGLEASGEPFLWVVRADGWTPPEGWEQRVGERGMLVRGWAPQTAVLAHPAVGAFLTHCGSSSLLEAAAAGVPMLTWPLVFDQFIEERLVTDVLGIGERVWSGARSTRYEERELVPAEAVARAVARFLEPGGPGEAARGRARDLAVKAHAAVAEGGSSSRDLHRLIDDLVEARAATSSCNADSE

SEQ ID NO: 17288 - protein, 321 aa, Zea mays subsp. mays
  peptide (1)..(321): Ceres Seq. ID no. 12375398
  misc_feature (1)..(314): Pfam Name: UDP-glucoronosyl and UDP-glucosyl transferase Pfam Description: UDP-glucoronosyl and UDP-glucosyl transferase
  misc_feature (1)..(306): Homolog of NCBI NO: 13492674 NR Description: phenylpropanoid:glucosyltransferase 1 [Nicotiana
  misc_feature (1)..(306): Homolog of NCBI NO: 4115534 NR Description: UDP-glycose:flavonoid glycosyltransferase [Vigna
  misc_feature (1)..(306): Homolog of NCBI NO: 32816180 NR Description: flavonoid glucosyl-transferase [Allium cepa]
  misc_feature (1)..(306): Homolog of NCBI NO: 7433906 NR Description: glucosyltransferase IS5a (EC 2.4.1.-),
  misc_feature (1)..(310): Homolog of NCBI NO: 7433911 NR Description: probable glucosyltransferase twi1 (EC 2.4.1.-) -
  misc_feature (1)..(314): Homolog of NCBI NO: 34911572 NR Description: putative salicylate-induced glucosyltransferase
  misc_feature (103)..(315): Homolog of NCBI NO: 34911582 NR Description: putative salicylate-induced glucosyltransferase
  misc_feature (1)..(103): Homolog of NCBI NO: 34911582 NR Description: putative salicylate-induced glucosyltransferase
  misc_feature (1)..(312): Homolog of NCBI NO: 30103010 NR Description: putative immediate-early salicylate-induced
  misc_feature (1)..(312): Homolog of NCBI NO: 30017585 NR Description: putative immediate-early salicylate-induced
MRILAGAVVSGSRDVTVPGLPGPEIRIPVSELPEFLRRPAKDQGTFSPCNAAQARCLGVAYNTFAGMEQEYREANVRAKSLKRCYFVGPVSLPLPAAAAGTSESPCIRWLDSRPNCSVVYVCFGTYAAISEDQLRELALGLEASGEPFLWVVRADGWTPPEGWEQRVGERGMLVRGWAPQTAVLAHPAVGAFLTHCGSSSLLEAAAAGVPMLTWPLVFDQFIEERLVTDVLGIGERVWSGARSTRYEERELVPAEAVARAVARFLEPGGPGEAARGRARDLAVKAHAAVAEGGSSSRDLHRLIDDLVEARAATSSCNADSE

SEQ ID NO: 17289 - DNA, 1631 bp, Zea mays subsp. mays
  misc_feature (1)..(1631): Ceres Seq. ID no. 12417412
  misc_feature: MA Experiment ID: 108504 Result: Up-regulated in Transcription
  misc_feature: MA Experiment 108504 PARAMETER Experiment Name: Zm_Drought_P Parameter: Age (day) Value: 8
  misc_feature: MA Experiment 108504 PARAMETER Experiment Name: Zm_Drought_P Parameter: Organism Value: Zea mays
  misc_feature: MA Experiment 108504 PARAMETER Experiment Name: Zm_Drought_P Parameter: Plant Line Value: 35A19
  misc_feature: MA Experiment 108504 PARAMETER Experiment Name: Zm_Drought_P Parameter: Timepoint (hr) Value: 12
  misc_feature: MA Experiment 108504 PARAMETER Experiment Name: Zm_Drought_P Parameter: Tissue Value: Aerial
  misc_feature: MA Experiment 108504 PARAMETER Experiment Name: Zm_Drought_P Parameter: Treatment Value: Drought vs. No Drought
  misc_feature: MA Experiment ID: 108556 Result: Up-regulated in Transcription
  misc_feature: MA Experiment 108556 PARAMETER Experiment Name: Zm_Drought_P Parameter: Age (day) Value: 9
  misc_feature: MA Experiment 108556 PARAMETER Experiment Name: Zm_Drought_P Parameter: Organism Value: Zea mays
  misc_feature: MA Experiment 108556 PARAMETER Experiment Name: Zm_Drought_P Parameter: Plant Line Value: 35A19
  misc_feature: MA Experiment 108556 PARAMETER Experiment Name: Zm_Drought_P Parameter: Timepoint (hr) Value: 24
  misc_feature: MA Experiment 108556 PARAMETER Experiment Name: Zm_Drought_P Parameter: Tissue Value: Aerial
  misc_feature: MA Experiment 108556 PARAMETER Experiment Name: Zm_Drought_P Parameter: Treatment Value: Drought vs. No Drought
accaatcatttctttgcaatctgcagcctctgcaaactgatcgcgttgctggttgctggtaatcatcggaccagtccacagatatcggaagctctcttgctactgatggcgaagcccagcgtggcggtgccggaggttggcgtaccagccgcgcaggcgtcgtgcacctgcccggggacgctgctcgcgtacccgccgccgcgtggcgccggggtcgcggccgccgtgcggcgcaagtgcctgcaggtggagctcggcgcgggggcgggcctgctgggcggcgccggcgcctggggcgtggagtccatgcgggcgtcgtcgcccacgcacgccagggccgcggccgcgctcgccgccggcggcggcgtcgatgttgacgtcgacgaggagcgcgccgccagctggatggcgcggcacccgtcggcgctgggcaggttcgagcggatcgtggcggcggccgagggcaagcggatcgtcatgttcctggactacgacggcacgctgtcgcccatcgtggacgaccccgacgccgccttcatgagcgagacgatgcggatggccgtgcgtagcgtcgccaagcatttcccgacggcgatcgtgagcggccggtgccgcgacaaggtgttcgagttcgtgaagctggcagagctctactacgccggcagccacggcatggacatcaagggtccggcggcctccaaggcctcctcttcttctcggcacgccgcaaaggcaaaaggagtaacggccacgtcggcgtggcaggtggcgcggcgccattgggcggggcctgccgatcgacgacctgcgtgcgcgcgcggcgggagaggctgttacaaaaacagagaagctcacatcggccaagtggtttcgccatctccgccgcccctggatcactcggtgctctcctctcctactctcccattcagattctctaagaaaaaaaggtctagatctagcgagatcgtgctgtagtagccttgttgcttggcgcatcgttgtttgttaacattacatgcttactgttgcccgtgtgcgtgtatcaccactgtatccatccatccatgtttgtttctgaaaaaaaaaaaaaaaaaagcttctcgtgccgttttttttttttttttttgaacaaaactgcaacctcaccacaagcagcaaaaagctaatctcaggtcccatattagcgagcggatctgtcacagatggtagcaggaagggaaacaaaagtgcaaaacatgtccagactcagcatgaacctggcgacccagaggcacgcgccatccacatttattctcggcatacacaagcagccaccaaaggagcacaagaggtacaaccccaagaaactgacatacgagcagaggaaggccagtctcattgaaaggctcaaccaactcaactcctcgggcggcgcagatgacgacgacgaggatgacgagtaaagtttcgtcccatcgaagtagtgctatcttatgcggcgatcagtatttgtgctatggcatttatcgctacctgtagtcgtgcaacatgcatttttgtttaagtttgtcgatgcgaacaaagttgtttctgttagtttggagctggagttctgaatatttacttttataatataaaattggaccgagtcg

SEQ ID NO: 17290 - protein, 324 aa, Zea mays subsp. mays
  peptide (1)..(324): Ceres Seq. ID no. 12417413
  misc_feature (95)..(231): Homolog of NCBI NO: 30696058 NR Description: trehalose-6-phosphate phosphatase (TPPA)
  misc_feature (95)..(241): Homolog of NCBI NO: 37536726 NR Description: putative trehalose-6-phosphate phosphatase
  misc_feature (92)..(230): Homolog of NCBI NO: 30692524 NR Description: trehalose-6-phosphate phosphatase, putative
  misc_feature (69)..(253): Homolog of NCBI NO: 25354597 NR Description: probable trehalose-phosphatase [imported] -
  misc_feature (69)..(253): Homolog of NCBI NO: 18399940 NR Description: trehalose-phosphatase, putative
  misc_feature (91)..(231): Homolog of NCBI NO: 30683008 NR Description: trehalose-6-phosphate phosphatase, putative
  misc_feature (91)..(231): Homolog of NCBI NO: 11282598 NR Description: trehalose-6-phosphate phosphatase-like protein -
  misc_feature (69)..(253): Homolog of NCBI NO: 21554408 NR Description: trehalose-phosphatase, putative [Arabidopsis
  misc_feature (95)..(246): Homolog of NCBI NO: 33146623 NR Description: putative trehalose-6-phosphate phosphatase
  misc_feature (60)..(230): Homolog of NCBI NO: 15238360 NR Description: trehalose-6-phosphate phosphatase; protein id:
TNHFFAICSLCKLIALLVAGNHRTSPQISEALLLLMAKPSVAVPEVGVPAAQASCTCPGTLLAYPPPRGAGVAAAVRRKCLQVELGAGAGLLGGAGAWGVESMRASSPTHARAAAALAAGGGVDVDVDEERAASWMARHPSALGRFERIVAAAEGKRIVMFLDYDGTLSPIVDDPDAAFMSETMRMAVRSVAKHFPTAIVSGRCRDKVFEFVKLAELYYAGSHGMDIKGPAASKASSSSRHAAKAKGVTATSAWQVARRHWAGPADRRPACARGGRGCYKNREAHIGQVVSPSPPPLDHSVLSSPTLPFRFSKKKRSRSSEIVL

SEQ ID NO: 17291 - protein, 289 aa, Zea mays subsp. mays
  peptide (1)..(289): Ceres Seq. ID no. 12417414
  misc_feature (60)..(196): Homolog of NCBI NO: 30696058 NR Description: trehalose-6-phosphate phosphatase (TPPA)
  misc_feature (60)..(206): Homolog of NCBI NO: 37536726 NR Description: putative trehalose-6-phosphate phosphatase
  misc_feature (57)..(195): Homolog of NCBI NO: 30692524 NR Description: trehalose-6-phosphate phosphatase, putative
  misc_feature (34)..(218): Homolog of NCBI NO: 25354597 NR Description: probable trehalose-phosphatase [imported] -
  misc_feature (34)..(218): Homolog of NCBI NO: 18399940 NR Description: trehalose-phosphatase, putative
  misc_feature (56)..(196): Homolog of NCBI NO: 30683008 NR Description: trehalose-6-phosphate phosphatase, putative
  misc_feature (56)..(196): Homolog of NCBI NO: 11282598 NR Description: trehalose-6-phosphate phosphatase-like protein -
  misc_feature (34)..(218): Homolog of NCBI NO: 21554408 NR Description: trehalose-phosphatase, putative [Arabidopsis
  misc_feature (60)..(211): Homolog of NCBI NO: 33146623 NR Description: putative trehalose-6-phosphate phosphatase
  misc_feature (25)..(195): Homolog of NCBI NO: 15238360 NR Description: trehalose-6-phosphate phosphatase; protein id:
MAKPSVAVPEVGVPAAQASCTCPGTLLAYPPPRGAGVAAAVRRKCLQVELGAGAGLLGGAGAWGVESMRASSPTHARAAAALAAGGGVDVDVDEERAASWMARHPSALGRFERIVAAAEGKRIVMFLDYDGTLSPIVDDPDAAFMSETMRMAVRSVAKHFPTAIVSGRCRDKVFEFVKLAELYYAGSHGMDIKGPAASKASSSSRHAAKAKGVTATSAWQVARRHWAGPADRRPACARGGRGCYKNREAHIGQVVSPSPPPLDHSVLSSPTLPFRFSKKKRSRSSEIVL

SEQ ID NO: 17292 - protein, 222 aa, Zea mays subsp. mays
  peptide (1)..(222): Ceres Seq. ID no. 12417415
  misc_feature (1)..(129): Homolog of NCBI NO: 30696058 NR Description: trehalose-6-phosphate phosphatase (TPPA)
  misc_feature (1)..(139): Homolog of NCBI NO: 37536726 NR Description: putative trehalose-6-phosphate phosphatase
  misc_feature (1)..(128): Homolog of NCBI NO: 30692524 NR Description: trehalose-6-phosphate phosphatase, putative
  misc_feature (1)..(151): Homolog of NCBI NO: 25354597 NR Description: probable trehalose-phosphatase [imported] -
  misc_feature (1)..(151): Homolog of NCBI NO: 18399940 NR Description: trehalose-phosphatase, putative
  misc_feature (1)..(129): Homolog of NCBI NO: 30683008 NR Description: trehalose-6-phosphate phosphatase, putative
  misc_feature (1)..(129): Homolog of NCBI NO: 11282598 NR Description: trehalose-6-phosphate phosphatase-like protein -
  misc_feature (1)..(151): Homolog of NCBI NO: 21554408 NR Description: trehalose-phosphatase, putative [Arabidopsis
  misc_feature (1)..(144): Homolog of NCBI NO: 33146623 NR Description: putative trehalose-6-phosphate phosphatase
  misc_feature (1)..(128): Homolog of NCBI NO: 15238360 NR Description: trehalose-6-phosphate phosphatase; protein id:
MRASSPTHARAAAALAAGGGVDVDVDEERAASWMARHPSALGRFERIVAAAEGKRIVMFLDYDGTLSPIVDDPDAAFMSETMRMAVRSVAKHFPTAIVSGRCRDKVFEFVKLAELYYAGSHGMDIKGPAASKASSSSRHAAKAKGVTATSAWQVARRHWAGPADRRPACARGGRGCYKNREAHIGQVVSPSPPPLDHSVLSSPTLPFRFSKKKRSRSSEIVL

SEQ ID NO: 17293 - DNA, 478 bp, Zea mays subsp. mays
  misc_feature (1)..(478): Ceres Seq. ID no. 1671848
  misc_feature: MA Experiment ID: 108527 Result: Up-regulated in Transcription
  misc_feature: MA Experiment 108527 PARAMETER Experiment Name: Zm_5mM_NO_P Parameter: Age (day) Value: 8
  misc_feature: MA Experiment 108527 PARAMETER Experiment Name: Zm_5mM_NO_P Parameter: Organism Value: Zea mays
  misc_feature: MA Experiment 108527 PARAMETER Experiment Name: Zm_5mM_NO_P Parameter: Plant Line Value: 35A19
  misc_feature: MA Experiment 108527 PARAMETER Experiment Name: Zm_5mM_NO_P Parameter: Timepoint (hr) Value: 6
  misc_feature: MA Experiment 108527 PARAMETER Experiment Name: Zm_5mM_NO_P Parameter: Tissue Value: Aerial
  misc_feature: MA Experiment 108527 PARAMETER Experiment Name: Zm_5mM_NO_P Parameter: Treatment Value: 5mM NO vs. No Treatment
  misc_feature: MA Experiment ID: 108535 Result: Down-regulated in Transcription
  misc_feature: MA Experiment 108535 PARAMETER Experiment Name: Zm_Meristem_P Parameter: Age (day) Value: 8
  misc_feature: MA Experiment 108535 PARAMETER Experiment Name: Zm_Meristem_P Parameter: Organism Value: Zea mays
  misc_feature: MA Experiment 108535 PARAMETER Experiment Name: Zm_Meristem_P Parameter: Plant Line Value: 35A19
  misc_feature: MA Experiment 108535 PARAMETER Experiment Name: Zm_Meristem_P Parameter: Tissue Value: Root Meristem vs. Above Root Meristem
attggccgggctccagtgctgggcgttgtatgagaggtgagcctcccggtggagcgtgggtggtgctgggtgccggggatgagctgcaacgggtgccgcgtgcttcgcaaggggtgcagcgacgcgtgcgtgctgcggccgtgcctgcagtggatcgacggcgccgaggcgcagggccacgccaccgtcttcgtcgccaagttcttcggccgcgccggcctcatgtccttcctcaccgccgtccccgagccgcagcgcccagcggtgttccagtcgttgatgtacgaggcggccgggcggacgatcaaccctgtgagcggcgccgtggggctgctcggcgcgggcagctggcagctgtgccaggcggcggtggagacggtgcttcggggcggcgccatcgggccgctgcccgagttcgacgggggccgcgacaatacgtttgctctggcggcgacggcgaggcgggccgtggggtgct

SEQ ID NO: 17294 - protein, 158 aa, Zea mays subsp. mays
  peptide (1)..(158): Ceres Seq. ID no. 1671849
WPGSSAGRCMRGEPPGGAWVVLGAGDELQRVPRASQGVQRRVRAAAVPAVDRRRRGAGPRHRLRRQVLRPRRPHVLPHRRPRAAAPSGVPVVDVRGGRADDQPCERRRGAARRGQLAAVPGGGGDGASGRRHRAAARVRRGPRQYVCSGGDGEAGRGV

SEQ ID NO: 17295 - protein, 149 aa, Zea mays subsp. mays
  peptide (1)..(149): Ceres Seq. ID no. 1671850
MRGEPPGGAWVVLGAGDELQRVPRASQGVQRRVRAAAVPAVDRRRRGAGPRHRLRRQVLRPRRPHVLPHRRPRAAAPSGVPVVDVRGGRADDQPCERRRGAARRGQLAAVPGGGGDGASGRRHRAAARVRRGPRQYVCSGGDGEAGRGV

SEQ ID NO: 17296 - protein, 133 aa, Zea mays subsp. mays
  peptide (1)..(133): Ceres Seq. ID no. 1671851
  misc_feature (2)..(107): Pfam Name: Protein of unknown function DUF260 Pfam Description: Protein of unknown function DUF260
  misc_feature (1)..(110): Homolog of NCBI NO: 15219829 NR Description: hypothetical protein; protein id: At1g67100.1
  misc_feature (1)..(111): Homolog of NCBI NO: 34895540 NR Description: unnamed protein product [Oryza sativa (japonica
  misc_feature (1)..(110): Homolog of NCBI NO: 40539088 NR Description: expressed protein [Oryza sativa (japonica
  misc_feature (1)..(112): Homolog of NCBI NO: 21592894 NR Description: unknown [Arabidopsis thaliana]
  misc_feature (1)..(112): Homolog of NCBI NO: 15235604 NR Description: putative protein
  misc_feature (1)..(112): Homolog of NCBI NO: 21593577 NR Description: unknown [Arabidopsis thaliana]
  misc_feature (1)..(112): Homolog of NCBI NO: 15240739 NR Description: putative protein
  misc_feature (1)..(116): Homolog of NCBI NO: 21553886 NR Description: unknown [Arabidopsis thaliana]
  misc_feature (1)..(116): Homolog of NCBI NO: 15229644 NR Description: putative protein
  misc_feature (1)..(132): Homolog of NCBI NO: 34394489 NR Description: putative lateral organ boundaries (LOB) domain
MSCNGCRVLRKGCSDACVLRPCLQWIDGAEAQGHATVFVAKFFGRAGLMSFLTAVPEPQRPAVFQSLMYEAAGRTINPVSGAVGLLGAGSWQLCQAAVETVLRGGAIGPLPEFDGGRDNTFALAATARRAVGC

SEQ ID NO: 17297 - DNA, 1804 bp, Zea mays subsp. mays
  misc_feature (1)..(1804): Ceres Seq. ID no. 12362385
  misc_feature: MA Experiment ID: 108545 Result: Down-regulated in Transcription
  misc_feature: MA Experiment 108545 PARAMETER Experiment Name: Zm_Imbibed_Seeds_P Parameter: Age (day) Value: 3 vs. 2
  misc_feature: MA Experiment 108545 PARAMETER Experiment Name: Zm_Imbibed_Seeds_P Parameter: Organism Value: Zea mays
  misc_feature: MA Experiment 108545 PARAMETER Experiment Name: Zm_Imbibed_Seeds_P Parameter: Plant Line Value: 35A19
  misc_feature: MA Experiment 108545 PARAMETER Experiment Name: Zm_Imbibed_Seeds_P Parameter: Tissue Value: Aerial vs. Embryo
  misc_feature: MA Experiment ID: 20000492 Result: Down-regulated in Transcription
  misc_feature: MA Experiment 20000492 PARAMETER Experiment Name: Zm_Hybrid_Seed_Dev_P Parameter: DAP Value: 12
  misc_feature: MA Experiment 20000492 PARAMETER Experiment Name: Zm_Hybrid_Seed_Dev_P Parameter: Organism Value: Zea mays
  misc_feature: MA Experiment 20000492 PARAMETER Experiment Name: Zm_Hybrid_Seed_Dev_P Parameter: Plant Line Value: 35A19
  misc_feature: MA Experiment 20000492 PARAMETER Experiment Name: Zm_Hybrid_Seed_Dev_P Parameter: Tissue Value: Fert Kernel vs. Unfert Floret
  misc_feature: MA Experiment ID: 20000535 Result: Down-regulated in Transcription
  misc_feature: MA Experiment 20000535 PARAMETER Experiment Name: Zm_Hybrid_Seed_Dev_P Parameter: DAP Value: 30 vs. 12
  misc_feature: MA Experiment 20000535 PARAMETER Experiment Name: Zm_Hybrid_Seed_Dev_P Parameter: Organism Value: Zea mays
  misc_feature: MA Experiment 20000535 PARAMETER Experiment Name: Zm_Hybrid_Seed_Dev_P Parameter: Plant Line Value: 35A19
  misc_feature: MA Experiment 20000535 PARAMETER Experiment Name: Zm_Hybrid_Seed_Dev_P Parameter: Tissue Value: Embryo vs. Unfert Floret
aattcgggctgggcttgttggcctcgcctcggttggtgccctctctgccgccgcggaggagagtcgccgccaccaccaccatccagccagccaaggcttcccttccccagcagcagtctccagccgcagccatggccaagccaccgccgcccacctccacctccgaccccgcgctccccaccactgctacaaccacctcgtcggcccccaagtcgtcgtctcgcccctccccccgcccccggggcctcctcgatccgctcgcagcctccgcgcgctccctcctcgcctcggcgcgccgctccccggtcaccacgctagccgccgccttcttcctcctcgcgctcgtcatgtacggcgaggacgcccgcaccatcgccgagctctccatcgacgactacctctacccggacgccgacctctacaacgtctccggcctgccgcccctcgcgctgcccccgctcacctgcgacctctcccgcggcagatgggtcttcgacaacgtctccgttccggcgtaccgggagaaagactgcaccttcctcaccaagcaggtctcctgcctcgccaacggccgccccgacgacatgtggcagtactggagatggcagcccaacgagtgctccctccccacgttcgacgctcggagattcatggaggcgatgcgcgggaagcggctcatgttcgtgggggactcgctgaaccgcaaccagtgggagtcgctggtgtgcctcgtgcagcccatcctgtctaagggcaggaagaagatcgtcaagcggggctccttcaacaccttctacgctaaggagtaccgcgccacgctcgagttctactgggcgcccttcctcgtcgaatccaactctgacaaccccaacttccacagcatcaaggaacggatcatcagtcccgagcggatcgaggcgcacgccaagcactggaaggatgctgactacctcatcttcaacacctacatctggtggatgaacaacgccgacatcaaagtcaggagacccaattcgaggtactggtctgacaacgatgaggttcccaggattgaggcgtatggccgtgtgttcaagacatggtctgattggctcaatgacaacatcgatcctgcccgaacgtccgtcttcttcatgacgatttctcctcctcacctcagcccacagaattggggaaacccggacggtatcaaatgtgtaagagagacgcttccatatcagaactacagccaacacctggatctttaccatgacatgcggctgtatgacttagtggtcaatgtggccagctccatggagaaggtcccagtgacagtgatcaatatcacaaggatgtcagattaccggaaggacgcccacacgtccctgtacaccatccggcaagggaagctgctgacgcctaagcagaaggcagaccccgagaagttcgcggattgcatccactggtgccttcctggcgtgccggacgtgtggaaccaaatactctacacgaggattctttcgaaatcatcgtggcattctaattttagcccccctccatcccagtctctgcctcttcctccccaatgagaatcagaagtgggggcttggtttttgtcggagaatgtatgatttttcattctttttccttcctttttgggtagattgagtaaaatgatagcacgaaaaggaaaatgaatgttctgattactgatggtatagcatgtaagaagattcagctgaagtgtaaattagttgtgagttagccaattgagaaaacaacagcgacctagtataaagtgcatatacatatactgctggttcac

SEQ ID NO: 17298 - protein, 521 aa, Zea mays subsp. mays
  peptide (1)..(521): Ceres Seq. ID no. 12362386
  misc_feature (325)..(498): Pfam Name: Arabidopsis proteins of unknown function Pfam Description: Arabidopsis proteins of unknown function
  misc_feature (152)..(498): Homolog of NCBI NO: 18412850 NR Description: putative protein
  misc_feature (85)..(498): Homolog of NCBI NO: 28393743 NR Description: unknown protein [Arabidopsis thaliana]
  misc_feature (152)..(498): Homolog of NCBI NO: 15228429 NR Description: unknown protein; protein id: At3g11030.1
  misc_feature (150)..(501): Homolog of NCBI NO: 18405285 NR Description: expressed protein
  misc_feature (155)..(503): Homolog of NCBI NO: 34898234 NR Description: P0034A04.28 [Oryza sativa (japonica
  misc_feature (108)..(501): Homolog of NCBI NO: 25366731 NR Description: hypothetical protein At2g40150 [imported] -
  misc_feature (108)..(501): Homolog of NCBI NO: 18405283 NR Description: expressed protein
  misc_feature (150)..(502): Homolog of NCBI NO: 26452343 NR Description: unknown protein [Arabidopsis thaliana]
  misc_feature (150)..(502): Homolog of NCBI NO: 15228789 NR Description: putative protein; protein id: At3g55990.1
  misc_feature (152)..(501): Homolog of NCBI NO: 34907966 NR Description: P0446G04.14 [Oryza sativa (japonica
FGLGLLASPRLVPSLPPRRRVAATTTIQPAKASLPQQQSPAAAMAKPPPPTSTSDPALPTTATTTSSAPKSSSRPSPRPRGLLDPLAASARSLLASARRSPVTTLAAAFFLLALVMYGEDARTIAELSIDDYLYPDADLYNVSGLPPLALPPLTCDLSRGRWVFDNVSVPAYREKDCTFLTKQVSCLANGRPDDMWQYWRWQPNECSLPTFDARRFMEAMRGKRLMFVGDSLNRNQWESLVCLVQPILSKGRKKIVKRGSFNTFYAKEYRATLEFYWAPFLVESNSDNPNFHSIKERIISPERIEAHAKHWKDADYLIFNTYIWWMNNADIKVRRPNSRYWSDNDEVPRIEAYGRVFKTWSDWLNDNIDPARTSVFFMTISPPHLSPQNWGNPDGIKCVRETLPYQNYSQHLDLYHDMRLYDLVVNVASSMEKVPVTVINITRMSDYRKDAHTSLYTIRQGKLLTPKQKADPEKFADCIHWCLPGVPDVWNQILYTRILSKSSWHSNFSPPPSQSLPLPPQ

SEQ ID NO: 17299 - protein, 478 aa, Zea mays subsp. mays
  peptide (1)..(478): Ceres Seq. ID no. 12362387
  misc_feature (282)..(455): Pfam Name: Arabidopsis proteins of unknown function Pfam Description: Arabidopsis proteins of unknown function
  misc_feature (109)..(455): Homolog of NCBI NO: 15228429 NR Description: unknown protein; protein id: At3g11030.1
  misc_feature (107)..(458): Homolog of NCBI NO: 18405285 NR Description: expressed protein
  misc_feature (112)..(460): Homolog of NCBI NO: 34898234 NR Description: P0034A04.28 [Oryza sativa (japonica
  misc_feature (65)..(458): Homolog of NCBI NO: 25366731 NR Description: hypothetical protein At2g40150 [imported] -
  misc_feature (109)..(455): Homolog of NCBI NO: 18412850 NR Description: putative protein
  misc_feature (42)..(455): Homolog of NCBI NO: 28393743 NR Description: unknown protein [Arabidopsis thaliana]
  misc_feature (65)..(458): Homolog of NCBI NO: 18405283 NR Description: expressed protein
  misc_feature (107)..(459): Homolog of NCBI NO: 26452343 NR Description: unknown protein [Arabidopsis thaliana]
  misc_feature (107)..(459): Homolog of NCBI NO: 15228789 NR Description: putative protein; protein id: At3g55990.1
  misc_feature (109)..(458): Homolog of NCBI NO: 34907966 NR Description: P0446G04.14 [Oryza sativa (japonica
MAKPPPPTSTSDPALPTTATTTSSAPKSSSRPSPRPRGLLDPLAASARSLLASARRSPVTTLAAAFFLLALVMYGEDARTIAELSIDDYLYPDADLYNVSGLPPLALPPLTCDLSRGRWVFDNVSVPAYREKDCTFLTKQVSCLANGRPDDMWQYWRWQPNECSLPTFDARRFMEAMRGKRLMFVGDSLNRNQWESLVCLVQPILSKGRKKIVKRGSFNTFYAKEYRATLEFYWAPFLVESNSDNPNFHSIKERIISPERIEAHAKHWKDADYLIFNTYIWWMNNADIKVRRPNSRYWSDNDEVPRIEAYGRVFKTWSDWLNDNIDPARTSVFFMTISPPHLSPQNWGNPDGIKCVRETLPYQNYSQHLDLYHDMRLYDLVVNVASSMEKVPVTVINITRMSDYRKDAHTSLYTIRQGKLLTPKQKADPEKFADCIHWCLPGVPDVWNQILYTRILSKSSWHSNFSPPPSQSLPLPPQ

SEQ ID NO: 17300 - protein, 406 aa, Zea mays subsp. mays
  peptide (1)..(406): Ceres Seq. ID no. 12362388
  misc_feature (210)..(383): Pfam Name: Arabidopsis proteins of unknown function Pfam Description: Arabidopsis proteins of unknown function
  misc_feature (37)..(383): Homolog of NCBI NO: 18412850 NR Description: putative protein
  misc_feature (1)..(383): Homolog of NCBI NO: 28393743 NR Description: unknown protein [Arabidopsis thaliana]
  misc_feature (37)..(383): Homolog of NCBI NO: 15228429 NR Description: unknown protein; protein id: At3g11030.1
  misc_feature (35)..(386): Homolog of NCBI NO: 18405285 NR Description: expressed protein
  misc_feature (40)..(388): Homolog of NCBI NO: 34898234 NR Description: P0034A04.28 [Oryza sativa (japonica
  misc_feature (1)..(386): Homolog of NCBI NO: 25366731 NR Description: hypothetical protein At2g40150 [imported] -
  misc_feature (1)..(386): Homolog of NCBI NO: 18405283 NR Description: expressed protein
  misc_feature (35)..(387): Homolog of NCBI NO: 26452343 NR Description: unknown protein [Arabidopsis thaliana]
  misc_feature (35)..(387): Homolog of NCBI NO: 15228789 NR Description: putative protein; protein id: At3g55990.1
  misc_feature (37)..(386): Homolog of NCBI NO: 34907966 NR Description: P0446G04.14 [Oryza sativa (japonica
MYGEDARTIAELSIDDYLYPDADLYNVSGLPPLALPPLTCDLSRGRWVFDNVSVPAYREKDCTFLTKQVSCLANGRPDDMWQYWRWQPNECSLPTFDARRFMEAMRGKRLMFVGDSLNRNQWESLVCLVQPILSKGRKKIVKRGSFNTFYAKEYRATLEFYWAPFLVESNSDNPNFHSIKERIISPERIEAHAKHWKDADYLIFNTYIWWMNNADIKVRRPNSRYWSDNDEVPRIEAYGRVFKTWSDWLNDNIDPARTSVFFMTISPPHLSPQNWGNPDGIKCVRETLPYQNYSQHLDLYHDMRLYDLVVNVASSMEKVPVTVINITRMSDYRKDAHTSLYTIRQGKLLTPKQKADPEKFADCIHWCLPGVPDVWNQILYTRILSKSSWHSNFSPPPSQSLPLPPQ

SEQ ID NO: 17301 - DNA, 2053 bp, Zea mays subsp. mays; identical to SEQ ID NO: 5535
  misc_feature (1)..(2053): Ceres Seq. ID no. 13577863
  misc_feature: MA Experiment ID: 108522 Result: Up-regulated in Transcription
  misc_feature: MA Experiment 108522 PARAMETER Experiment Name: Zm_42deg_Heat_P Parameter: Age (day) Value: 8
  misc_feature: MA Experiment 108522 PARAMETER Experiment Name: Zm_42deg_Heat_P Parameter: Organism Value: Zea mays
  misc_feature: MA Experiment 108522 PARAMETER Experiment Name: Zm_42deg_Heat_P Parameter: Plant Line Value: 35A19
  misc_feature: MA Experiment 108522 PARAMETER Experiment Name: Zm_42deg_Heat_P Parameter: Temperature (deg C) Value: 42 vs. 22
  misc_feature: MA Experiment 108522 PARAMETER Experiment Name: Zm_42deg_Heat_P Parameter: Timepoint (hr) Value: 1
  misc_feature: MA Experiment 108522 PARAMETER Experiment Name: Zm_42deg_Heat_P Parameter: Tissue Value: Aerial
  misc_feature: MA Experiment ID: 20000632 Result: Down-regulated in Transcription
  misc_feature: MA Experiment 20000632 PARAMETER Experiment Name: Zm_Herbicide-Treatments_P Parameter: Timepoint (hr) Value: 4
  misc_feature: MA Experiment 20000632 PARAMETER Experiment Name: Zm_Herbicide-Treatments_P Parameter: Tissue Value: Aerial
  misc_feature: MA Experiment 20000632 PARAMETER Experiment Name: Zm_Herbicide-Treatments_P Parameter: Treatment Value: Glean vs. No Treatment

SEQ ID NO: 17302 - protein, 362 aa, Zea mays subsp. mays; identical to SEQ ID NO: 5536
  peptide (1)..(362): Ceres Seq. ID no. 13577864
  misc_feature (100)..(362): Pfam Name: TCP-1/cpn60 chaperonin family Pfam Description: TCP-1/cpn60 chaperonin family
  misc_feature (100)..(362): Pfam Name: TCP-1/cpn60 chaperonin family Pfam Description: TCP-1/cpn60 chaperonin family
  misc_feature (61)..(362): Homolog of NCBI NO: 18396719 NR Description: chaperonin, putative [Arabidopsis thaliana]
  misc_feature (61)..(362): Homolog of NCBI NO: 6223641 NR Description: putative T-complex protein 1, theta subunit
  misc_feature (71)..(361): Homolog of NCBI NO: 27924345 NR Description: Similar to chaperonin containing TCP1, subunit 8
  misc_feature (72)..(362): Homolog of NCBI NO: 17066726 NR Description: CCT chaperonin theta subunit [Physarum
  misc_feature (71)..(361): Homolog of NCBI NO: 29791676 NR Description: Similar to chaperonin containing TCP1, subunit 8
  misc_feature (61)..(362): Homolog of NCBI NO: 6223641 NR Description: putative T-complex protein 1, theta subunit
  misc_feature (72)..(362): Homolog of NCBI NO: 17066726 NR Description: CCT chaperonin theta subunit [Physarum
  misc_feature (71)..(361): Homolog of NCBI NO: 23478707 NR Description: T-complex protein 1 [Plasmodium yoelii yoelii]
  misc_feature (71)..(361): Homolog of NCBI NO: 1136741 NR Description: KIAA0002 [Homo sapiens]
  misc_feature (71)..(361): Homolog of NCBI NO: 6005727 NR Description: chaperonin containing TCP1, subunit 8 (theta); protein 1, theta subunit [Homo sapiens]
  misc_feature (71)..(361): Homolog of NCBI NO: 9988062 NR Description: T-complex protein 1, theta subunit (TCP-1-theta)
  misc_feature (71)..(361): Homolog of NCBI NO: 37362194 NR Description: chaperonin containing TCP1, subunit 8 (theta)
  misc_feature (71)..(361): Homolog of NCBI NO: 29791676 NR Description: Similar to chaperonin containing TCP1, subunit 8
  misc_feature (71)..(361): Homolog of NCBI NO: 27924345 NR Description: Similar to chaperonin containing TCP1, subunit 8
  misc_feature (61)..(362): Homolog of NCBI NO: 18396719 NR Description: chaperonin, putative [Arabidopsis thaliana]
  misc_feature (71)..(361): Homolog of NCBI NO: 37362194 NR Description: chaperonin containing TCP1, subunit 8 (theta)
  misc_feature (71)..(361): Homolog of NCBI NO: 9988062 NR Description: T-complex protein 1, theta subunit (TCP-1-theta)
  misc_feature (71)..(361): Homolog of NCBI NO: 6005727 NR Description: chaperonin containing TCP1, subunit 8 (theta); protein 1, theta subunit [Homo sapiens]
  misc_feature (71)..(361): Homolog of NCBI NO: 1136741 NR Description: KIAA0002 [Homo sapiens]
  misc_feature (71)..(361): Homolog of NCBI NO: 23478707 NR Description: T-complex protein 1 [Plasmodium yoelii yoelii]
  misc_feature (44)..(44): Xaa is any aa, unknown or other
  misc_feature (173)..(173): Xaa is any aa, unknown or other
  misc_feature (213)..(213): Xaa is any aa, unknown or other

SEQ ID NO: 17303 - protein, 302 aa, Zea mays subsp. mays; identical to SEQ ID NO: 5537
  peptide (1)..(302): Ceres Seq. ID no. 13577865
  misc_feature (40)..(302): Pfam Name: TCP-1/cpn60 chaperonin family Pfam Description: TCP-1/cpn60 chaperonin family
  misc_feature (40)..(302): Pfam Name: TCP-1/cpn60 chaperonin family Pfam Description: TCP-1/cpn60 chaperonin family
  misc_feature (1)..(302): Homolog of NCBI NO: 18396719 NR Description: chaperonin, putative [Arabidopsis thaliana]
  misc_feature (1)..(302): Homolog of NCBI NO: 6223641 NR Description: putative T-complex protein 1, theta subunit
  misc_feature (11)..(301): Homolog of NCBI NO: 27924345 NR Description: Similar to chaperonin containing TCP1, subunit 8
  misc_feature (12)..(302): Homolog of NCBI NO: 17066726 NR Description: CCT chaperonin theta subunit [Physarum
  misc_feature (11)..(301): Homolog of NCBI NO: 29791676 NR Description: Similar to chaperonin containing TCP1, subunit 8
  misc_feature (1)..(302): Homolog of NCBI NO: 6223641 NR Description: putative T-complex protein 1, theta subunit
  misc_feature (12)..(302): Homolog of NCBI NO: 17066726 NR Description: CCT chaperonin theta subunit [Physarum
  misc_feature (11)..(301): Homolog of NCBI NO: 23478707 NR Description: T-complex protein 1 [Plasmodium yoelii yoelii]
  misc_feature (11)..(301): Homolog of NCBI NO: 1136741 NR Description: KIAA0002 [Homo sapiens]
  misc_feature (11)..(301): Homolog of NCBI NO: 6005727 NR Description: chaperonin containing TCP1, subunit 8 (theta); protein 1, theta subunit [Homo sapiens]
  misc_feature (11)..(301): Homolog of NCBI NO: 9988062 NR Description: T-complex protein 1, theta subunit (TCP-1-theta)
  misc_feature (11)..(301): Homolog of NCBI NO: 37362194 NR Description: chaperonin containing TCP1, subunit 8 (theta)
  misc_feature (11)..(301): Homolog of NCBI NO: 29791676 NR Description: Similar to chaperonin containing TCP1, subunit 8
  misc_feature (11)..(301): Homolog of NCBI NO: 27924345 NR Description: Similar to chaperonin containing TCP1, subunit 8
  misc_feature (1)..(302): Homolog of NCBI NO: 18396719 NR Description: chaperonin, putative [Arabidopsis thaliana]
  misc_feature (11)..(301): Homolog of NCBI NO: 37362194 NR Description: chaperonin containing TCP1, subunit 8 (theta)
  misc_feature (11)..(301): Homolog of NCBI NO: 9988062 NR Description: T-complex protein 1, theta subunit (TCP-1-theta)
  misc_feature (11)..(301): Homolog of NCBI NO: 6005727 NR Description: chaperonin containing TCP1, subunit 8 (theta); protein 1, theta subunit [Homo sapiens]
  misc_feature (11)..(301): Homolog of NCBI NO: 1136741 NR Description: KIAA0002 [Homo sapiens]
  misc_feature (11)..(301): Homolog of NCBI NO: 23478707 NR Description: T-complex protein 1 [Plasmodium yoelii yoelii]
  misc_feature (113)..(113): Xaa is any aa, unknown or other
  misc_feature (153)..(153): Xaa is any aa, unknown or other

SEQ ID NO: 17304 - protein, 296 aa, Zea mays subsp. mays; identical to SEQ ID NO: 5538
  peptide (1)..(296): Ceres Seq. ID no. 13577866
  misc_feature (34)..(296): Pfam Name: TCP-1/cpn60 chaperonin family Pfam Description: TCP-1/cpn60 chaperonin family
  misc_feature (34)..(296): Pfam Name: TCP-1/cpn60 chaperonin family Pfam Description: TCP-1/cpn60 chaperonin family
  misc_feature (1)..(296): Homolog of NCBI NO: 18396719 NR Description: chaperonin, putative [Arabidopsis thaliana]
  misc_feature (1)..(296): Homolog of NCBI NO: 6223641 NR Description: putative T-complex protein 1, theta subunit
  misc_feature (5)..(295): Homolog of NCBI NO: 27924345 NR Description: Similar to chaperonin containing TCP1, subunit 8
  misc_feature (6)..(296): Homolog of NCBI NO: 17066726 NR Description: CCT chaperonin theta subunit [Physarum
  misc_feature (5)..(295): Homolog of NCBI NO: 29791676 NR Description: Similar to chaperonin containing TCP1, subunit 8
  misc_feature (1)..(296): Homolog of NCBI NO: 6223641 NR Description: putative T-complex protein 1, theta subunit
  misc_feature (6)..(296): Homolog of NCBI NO: 17066726 NR Description: CCT chaperonin theta subunit [Physarum
  misc_feature (5)..(295): Homolog of NCBI NO: 23478707 NR Description: T-complex protein 1 [Plasmodium yoelii yoelii]
  misc_feature (5)..(295): Homolog of NCBI NO: 1136741 NR Description: KIAA0002 [Homo sapiens]
  misc_feature (5)..(295): Homolog of NCBI NO: 6005727 NR Description: chaperonin containing TCP1, subunit 8 (theta); protein 1, theta subunit [Homo sapiens]
  misc_feature (5)..(295): Homolog of NCBI NO: 9988062 NR Description: T-complex protein 1, theta subunit (TCP-1-theta)
  misc_feature (5)..(295): Homolog of NCBI NO: 37362194 NR Description: chaperonin containing TCP1, subunit 8 (theta)
  misc_feature (5)..(295): Homolog of NCBI NO: 29791676 NR Description: Similar to chaperonin containing TCP1, subunit 8
  misc_feature (5)..(295): Homolog of NCBI NO: 27924345 NR Description: Similar to chaperonin containing TCP1, subunit 8
  misc_feature (1)..(296): Homolog of NCBI NO: 18396719 NR Description: chaperonin, putative [Arabidopsis thaliana]
  misc_feature (5)..(295): Homolog of NCBI NO: 37362194 NR Description: chaperonin containing TCP1, subunit 8 (theta)
  misc_feature (5)..(295): Homolog of NCBI NO: 9988062 NR Description: T-complex protein 1, theta subunit (TCP-1-theta)
  misc_feature (5)..(295): Homolog of NCBI NO: 6005727 NR Description: chaperonin containing TCP1, subunit 8 (theta); protein 1, theta subunit [Homo sapiens]
  misc_feature (5)..(295): Homolog of NCBI NO: 1136741 NR Description: KIAA0002 [Homo sapiens]
  misc_feature (5)..(295): Homolog of NCBI NO: 23478707 NR Description: T-complex protein 1 [Plasmodium yoelii yoelii]
  misc_feature (107)..(107): Xaa is any aa, unknown or other
  misc_feature (147)..(147): Xaa is any aa, unknown or other

SEQ ID NO: 17305 - DNA, 1454 bp, Zea mays subsp. mays
  misc_feature (1)..(1454): Ceres Seq. ID no. 12358548
  misc_feature: MA Experiment ID: 108523 Result: Down-regulated in Transcription
  misc_feature: MA Experiment 108523 PARAMETER Experiment Name: Zm_42deg_Heat_P Parameter: Age (day) Value: 8
  misc_feature: MA Experiment 108523 PARAMETER Experiment Name: Zm_42deg_Heat_P Parameter: Organism Value: Zea mays
  misc_feature: MA Experiment 108523 PARAMETER Experiment Name: Zm_42deg_Heat_P Parameter: Plant Line Value: 35A19
  misc_feature: MA Experiment 108523 PARAMETER Experiment Name: Zm_42deg_Heat_P Parameter: Temperature (deg C) Value: 42 vs. 22
  misc_feature: MA Experiment 108523 PARAMETER Experiment Name: Zm_42deg_Heat_P Parameter: Timepoint (hr) Value: 6
  misc_feature: MA Experiment 108523 PARAMETER Experiment Name: Zm_42deg_Heat_P Parameter: Tissue Value: Aerial
  misc_feature: MA Experiment ID: 20000534 Result: Down-regulated in Transcription
  misc_feature: MA Experiment 20000534 PARAMETER Experiment Name: Zm_Hybrid_Pollen_P Parameter: Age (day) Value: 8
  misc_feature: MA Experiment 20000534 PARAMETER Experiment Name: Zm_Hybrid_Pollen_P Parameter: Organism Value: Zea mays
  misc_feature: MA Experiment 20000534 PARAMETER Experiment Name: Zm_Hybrid_Pollen_P Parameter: Plant Line Value: 35A19
  misc_feature: MA Experiment 20000534 PARAMETER Experiment Name: Zm_Hybrid_Pollen_P Parameter: Tissue Value: Pollen vs. Aerial
acgacgctttttctccatggtttggtgtgcatttcctctctcctgtccccacttgacacatccatgtcccaatctcccccaacctcaggtcaaccgccgctacccaagatccagtctccgttctccctctcctctcgcttcatacacaccagggcggcagcggcagcggcaggggcccgccatcaccaacccacctcccttcaattataaacctataaaatatcatcattgacccaagctgaggcgactagtgggtattgatttttggtggggcagatcaaggagggggggagggggttaacttccaaggaaccagttcattgctggttctgctagcaggaggttggatttcagaggcagaagctttcagccaggcgggctcagggcgcgggcacatcaatggctggcaaggaaatcctccacaaggtgaaggacaaggtgaaagatgcatttagttcatcaggaccagaaacagggaaaggcaagacaaagttatcaggcaagcgtgtcaagcatggttaccatctggtgaagggcaaatctaatcatccaatggaggattatctagtggcagagtaccggcaagttggtgaacatgatttgggattgtttgctatattcgatggtcacctgggccacactgttccagactttttgagctcccatcttttcaataacatcttgagtgagccagaattcttgagtgatccagaaactgctatccgaaacgcataccaacttacggatcagaagatattggaaaacgcagcagagttgggaagaggtggctccacagctgttactgccatcttaataggaagtgacaagttcgtgaaactagttgttgcaaatgttggggattcacgggcagttattagcaagaacggtgtagcgaagcagctttcagttgaccatgaaccaaacatggagcgacaaacgatcgagcagaagggtggctttgtatcaaacctaccgggtgatgtgccacgtgttgatgggcagctggcagttgcaagggcatttggagaccggagcttgaagaagcacctcagctctgatccatatgtggtcgagcaaactatcgatgaaaatactgagtttttaattctagcaagtgatggcttgtggaaggtgatgtccaaccaggaggctgtcgacgagatcaaggattgcaaggacgcgcaggcagctgccaagcacctgacggagcaggccgtgaatcggaagagcaaagacgacatttcagttatcgtagtcaagttcatgtgctagcacatcgtcaggttaaatggtctcccgattgtataccgtgttaaattatcttttaagtcttgtgctcgctggtgtcggacattttgtttaccttctttggttttgggaccccacaaagagggtcaaggcttgtaacatattgttgtttgtttaaggctccaaataaagcatggtaccaccat

SEQ ID NO: 17306 - protein, 290 aa, Zea mays subsp. mays
  peptide (1)..(290): Ceres Seq. ID no. 12358549
  misc_feature (39)..(281): Pfam Name: Protein phosphatase 2C Pfam Description: Protein phosphatase 2C
  misc_feature (25)..(287): Homolog of NCBI NO: 15218759 NR Description: protein phosphatase 2C (PP2C)
  misc_feature (21)..(288): Homolog of NCBI NO: 18395099 NR Description: protein phosphatase 2C (PP2C), putative
  misc_feature (35)..(288): Homolog of NCBI NO: 7488280 NR Description: protein phosphatase 2C homolog F20O9.80 -
  misc_feature (1)..(288): Homolog of NCBI NO: 25411985 NR Description: probable protein phosphatase 2C [imported] -
  misc_feature (1)..(288): Homolog of NCBI NO: 18399423 NR Description: protein phosphatase 2C (PP2C)
  misc_feature (1)..(287): Homolog of NCBI NO: 4336436 NR Description: protein phosphatase type 2C [Lotus japonicus]
  misc_feature (1)..(288): Homolog of NCBI NO: 18417190 NR Description: protein phosphatase 2C (PP2C)
  misc_feature (1)..(288): Homolog of NCBI NO: 21539551 NR Description: putative protein phosphatase type 2C [Arabidopsis
  misc_feature (1)..(288): Homolog of NCBI NO: 15232538 NR Description: protein phosphatase 2C (PP2C); protein id:
  misc_feature (1)..(290): Homolog of NCBI NO: 23307574 NR Description: putative protein phosphatase 2C homolog
MAGKEILHKVKDKVKDAFSSSGPETGKGKTKLSGKRVKHGYHLVKGKSNHPMEDYLVAEYRQVGEHDLGLFAIFDGHLGHTVPDFLSSHLFNNILSEPEFLSDPETAIRNAYQLTDQKILENAAELGRGGSTAVTAILIGSDKFVKLVVANVGDSRAVISKNGVAKQLSVDHEPNMERQTIEQKGGFVSNLPGDVPRVDGQLAVARAFGDRSLKKHLSSDPYVVEQTIDENTEFLILASDGLWKVMSNQEAVDEIKDCKDAQAAAKHLTEQAVNRKSKDDISVIVVKFMC

SEQ ID NO: 17307 - protein, 239 aa, Zea mays subsp. mays
  peptide (1)..(239): Ceres Seq. ID no. 12358550
  misc_feature (1)..(230): Pfam Name: Protein phosphatase 2C Pfam Description: Protein phosphatase 2C
  misc_feature (1)..(236): Homolog of NCBI NO: 15218759 NR Description: protein phosphatase 2C (PP2C)
  misc_feature (1)..(237): Homolog of NCBI NO: 18395099 NR Description: protein phosphatase 2C (PP2C), putative
  misc_feature (1)..(237): Homolog of NCBI NO: 7488280 NR Description: protein phosphatase 2C homolog F20O9.80 -
  misc_feature (1)..(237): Homolog of NCBI NO: 25411985 NR Description: probable protein phosphatase 2C [imported] -
  misc_feature (1)..(237): Homolog of NCBI NO: 18399423 NR Description: protein phosphatase 2C (PP2C)
  misc_feature (1)..(236): Homolog of NCBI NO: 4336436 NR Description: protein phosphatase type 2C [Lotus japonicus]
  misc_feature (1)..(237): Homolog of NCBI NO: 18417190 NR Description: protein phosphatase 2C (PP2C)
  misc_feature (1)..(237): Homolog of NCBI NO: 21539551 NR Description: putative protein phosphatase type 2C [Arabidopsis
  misc_feature (1)..(237): Homolog of NCBI NO: 15232538 NR Description: protein phosphatase 2C (PP2C); protein id:
  misc_feature (1)..(239): Homolog of NCBI NO: 23307574 NR Description: putative protein phosphatase 2C homolog
MEDYLVAEYRQVGEHDLGLFAIFDGHLGHTVPDFLSSHLFNNILSEPEFLSDPETAIRNAYQLTDQKILENAAELGRGGSTAVTAILIGSDKFVKLVVANVGDSRAVISKNGVAKQLSVDHEPNMERQTIEQKGGFVSNLPGDVPRVDGQLAVARAFGDRSLKKHLSSDPYVVEQTIDENTEFLILASDGLWKVMSNQEAVDEIKDCKDAQAAAKHLTEQAVNRKSKDDISVIVVKFMC

SEQ ID NO: 17308 - DNA, 936 bp, Zea mays subsp. mays; identical to SEQ ID NO: 6253
  misc_feature (1)..(936): Ceres Seq. ID no. 12361812
  misc_feature: MA Experiment ID: 108529 Result: Up-regulated in Transcription
  misc_feature: MA Experiment 108529 PARAMETER Experiment Name: Zm_Imbibed_Seeds_P Parameter: Age (day) Value: 5 vs. 2
  misc_feature: MA Experiment 108529 PARAMETER Experiment Name: Zm_Imbibed_Seeds_P Parameter: Organism Value: Zea mays
  misc_feature: MA Experiment 108529 PARAMETER Experiment Name: Zm_Imbibed_Seeds_P Parameter: Plant Line Value: 35A19
  misc_feature: MA Experiment 108529 PARAMETER Experiment Name: Zm_Imbibed_Seeds_P Parameter: Tissue Value: Roots vs. Embryo
  misc_feature: MA Experiment ID: 108530 Result: Up-regulated in Transcription
  misc_feature: MA Experiment 108530 PARAMETER Experiment Name: Zm_Imbibed_Seeds_P Parameter: Age (day) Value: 6 vs. 2
  misc_feature: MA Experiment 108530 PARAMETER Experiment Name: Zm_Imbibed_Seeds_P Parameter: Organism Value: Zea mays
  misc_feature: MA Experiment 108530 PARAMETER Experiment Name: Zm_Imbibed_Seeds_P Parameter: Plant Line Value: 35A19
  misc_feature: MA Experiment 108530 PARAMETER Experiment Name: Zm_Imbibed_Seeds_P Parameter: Tissue Value: Aerial vs. Embryo
  misc_feature: MA Experiment ID: 108535 Result: Down-regulated in Transcription
  misc_feature: MA Experiment 108535 PARAMETER Experiment Name: Zm_Meristem_P Parameter: Age (day) Value: 8
  misc_feature: MA Experiment 108535 PARAMETER Experiment Name: Zm_Meristem_P Parameter: Organism Value: Zea mays
  misc_feature: MA Experiment 108535 PARAMETER Experiment Name: Zm_Meristem_P Parameter: Plant Line Value: 35A19
  misc_feature: MA Experiment 108535 PARAMETER Experiment Name: Zm_Meristem_P Parameter: Tissue Value: Root Meristem vs. Above Root Meristem
  misc_feature: MA Experiment ID: 20000535 Result: Down-regulated in Transcription
  misc_feature: MA Experiment 20000535 PARAMETER Experiment Name: Zm_Hybrid_Seed_Dev_P Parameter: DAP Value: 30 vs. 12
  misc_feature: MA Experiment 20000535 PARAMETER Experiment Name: Zm_Hybrid_Seed_Dev_P Parameter: Organism Value: Zea mays
  misc_feature: MA Experiment 20000535 PARAMETER Experiment Name: Zm_Hybrid_Seed_Dev_P Parameter: Plant Line Value: 35A19
  misc_feature: MA Experiment 20000535 PARAMETER Experiment Name: Zm_Hybrid_Seed_Dev_P Parameter: Tissue Value: Embryo vs. Unfert Floret

SEQ ID NO: 17309 - protein, 119 aa, Zea mays subsp. mays; identical to SEQ ID NO: 6254
  peptide (1)..(119): Ceres Seq. ID no. 12361813
  misc_feature (14)..(117): Pfam Name: Microtubule associated protein 1A/1B, light chain 3 Pfam Description: Microtubule associated protein 1A/1B, light
  misc_feature (14)..(117): Pfam Name: Microtubule associated protein 1A/1B, light chain 3 Pfam Description: Microtubule associated protein 1A/1B, light
  misc_feature (1)..(119): Homolog of NCBI NO: 38344173 NR Description: OSJNBa0053K19.12 [Oryza sativa (japonica
  misc_feature (1)..(117): Homolog of NCBI NO: 34595981 NR Description: microtubule-associated protein 1 light chain 3
  misc_feature (1)..(119): Homolog of NCBI NO: 15220686 NR Description: symbiosis-related protein, putative; protein id: supported by cDNA: 19175., supported by cDNA: gi_19912154 thaliana] >gi|19912155|dbj|BAB88389.1| autophagy 8c [Arabidopsis
  misc_feature (1)..(117): Homolog of NCBI NO: 33146967 NR Description: putative microtubule associated protein [Oryza
  misc_feature (1)..(118): Homolog of NCBI NO: 21592920 NR Description: putative microtubule-associated protein
  misc_feature (1)..(119): Homolog of NCBI NO: 38344173 NR Description: OSJNBa0053K19.12 [Oryza sativa (japonica
  misc_feature (1)..(119): Homolog of NCBI NO: 15220686 NR Description: symbiosis-related protein, putative; protein id: supported by cDNA: 19175., supported by cDNA: gi_19912154 thaliana] >gi|19912155|dbj|BAB88389.1| autophagy 8c [Arabidopsis
  misc_feature (1)..(118): Homolog of NCBI NO: 7446944 NR Description: hypothetical protein F8K4.23 - Arabidopsis
  misc_feature (1)..(118): Homolog of NCBI NO: 15224577 NR Description: putative microtubule-associated protein; protein At2g05630.1, supported by cDNA: 3416., supported by cDNA:
  misc_feature (1)..(119): Homolog of NCBI NO: 21553487 NR Description: symbiosis-related like protein [Arabidopsis
  misc_feature (1)..(119): Homolog of NCBI NO: 18415813 NR Description: symbiosis-related like protein; protein id: supported by cDNA: 14759., supported by cDNA: gi_19912150 thaliana] >gi|19912151|dbj|BAB88387.1| autophagy 8a [Arabidopsis
  misc_feature (1)..(118): Homolog of NCBI NO: 21592920 NR Description: putative microtubule-associated protein
  misc_feature (1)..(117): Homolog of NCBI NO: 33146967 NR Description: putative microtubule associated protein [Oryza
  misc_feature (1)..(117): Homolog of NCBI NO: 34595981 NR Description: microtubule-associated protein 1 light chain 3
  misc_feature (1)..(118): Homolog of NCBI NO: 40253647 NR Description: putative microtubial binding protein [Oryza
  misc_feature (1)..(118): Homolog of NCBI NO: 40253647 NR Description: putative microtubial binding protein [Oryza
  misc_feature (1)..(119): Homolog of NCBI NO: 18415813 NR Description: symbiosis-related like protein; protein id: supported by cDNA: 14759., supported by cDNA: gi_19912150 thaliana] >gi|19912151|dbj|BAB88387.1| autophagy 8a [Arabidopsis
  misc_feature (1)..(119): Homolog of NCBI NO: 21553487 NR Description: symbiosis-related like protein [Arabidopsis
  misc_feature (1)..(118): Homolog of NCBI NO: 15224577 NR Description: putative microtubule-associated protein; protein At2g05630.1, supported by cDNA: 3416., supported by cDNA:
  misc_feature (1)..(118): Homolog of NCBI NO: 7446944 NR Description: hypothetical protein F8K4.23 - Arabidopsis

SEQ ID NO: 17310 - protein, 107 aa, Zea mays subsp. mays; identical to SEQ ID NO: 6255
  peptide (1)..(107): Ceres Seq. ID no. 12361814

SEQ ID NO: 17311 - DNA, 505 bp, Zea mays subsp. mays
  misc_feature (1)..(505): Ceres Seq. ID no. 1673146
  misc_feature: MA Experiment ID: 20000492 Result: Up-regulated in Transcription
  misc_feature: MA Experiment 20000492 PARAMETER Experiment Name: Zm_Hybrid_Seed_Dev_P Parameter: DAP Value: 12
  misc_feature: MA Experiment 20000492 PARAMETER Experiment Name: Zm_Hybrid_Seed_Dev_P Parameter: Organism Value: Zea mays
  misc_feature: MA Experiment 20000492 PARAMETER Experiment Name: Zm_Hybrid_Seed_Dev_P Parameter: Plant Line Value: 35A19
  misc_feature: MA Experiment 20000492 PARAMETER Experiment Name: Zm_Hybrid_Seed_Dev_P Parameter: Tissue Value: Fert Kernel vs. Unfert Floret
ctaaacccaatccccttccacaccattcacacgtaccggcggagaaggaaggaattggtcgccgccgcctgcctctctcctcctcctccgtcagtggcggtggccacgccagtgctaagctaagctaagctaagcttgcgcaagtgacaagttctttggttggttggaggcagagccgccacatggcatcgtcgtcgcggctggatctcccgccggggttccgcttccaccccaccgacgaggaggtggtgtcgcactacctgacccacaaggcgctggacagccgcttctcctgcgtcgtcatcgccgacgccgacctcaacaagatcgagccgtgggatctcccaagcaaggctaagatgggcgagaaggagtggttcttcttctgccacaaggaccgcaagtacccgacggggatgcgcaccaaccgcgccaccgccagcgggtactggaaggccacggggaaggacaaggagatcttccgcggcagtagcagtagtccccg

SEQ ID NO: 17312 - protein, 107 aa, Zea mays subsp. mays
  peptide (1)..(107): Ceres Seq. ID no. 1673147
  misc_feature (9)..(102): Pfam Name: No apical meristem (NAM) protein Pfam Description: No apical meristem (NAM) protein
  misc_feature (4)..(104): Homolog of NCBI NO: 15228570 NR Description: hypothetical protein
  misc_feature (7)..(101): Homolog of NCBI NO: 27529810 NR Description: OsNAC2 protein [Oryza sativa]
  misc_feature (1)..(101): Homolog of NCBI NO: 38344965 NR Description: OSJNBa0072F16.10 [Oryza sativa (japonica
  misc_feature (2)..(102): Homolog of NCBI NO: 34902148 NR Description: Putative NAM (no apical meristem) protein
  misc_feature (5)..(102): Homolog of NCBI NO: 34394523 NR Description: putative GRAB2 protein(Geminivirus Rep A-binding)
MASSSRLDLPPGFRFHPTDEEVVSHYLTHKALDSRFSCVVIADADLNKIEPWDLPSKAKMGEKEWFFFCHKDRKYPTGMRTNRATASGYWKATGKDKEIFRGSSSSP

SEQ ID NO: 17313 - DNA, 415 bp, Zea mays subsp. mays
  misc_feature (1)..(415): Ceres Seq. ID no. 1671992
  misc_feature: MA Experiment ID: 20000108 Result: Up-regulated in Transcription
  misc_feature: MA Experiment 20000108 PARAMETER Experiment Name: Zm_Root-Tips_P Parameter: Age (day) Value: 12
  misc_feature: MA Experiment 20000108 PARAMETER Experiment Name: Zm_Root-Tips_P Parameter: Organism Value: Zea mays
  misc_feature: MA Experiment 20000108 PARAMETER Experiment Name: Zm_Root-Tips_P Parameter: Tissue Value: Root tips vs. Root mid region    35
  misc_feature: MA Experiment 20000108 PARAMETER Experiment Name: Zm_Root-Tips_P Parameter: Tissue Value: Root tips vs. Root mid region   Sequence Listing-Misc Features (4)
  misc_feature: MA Experiment ID: 20000487 Result: Up-regulated in Transcription
  misc_feature: MA Experiment 20000487 PARAMETER Experiment Name: Zm_50mM_NH4NO3_L_to_H_P Parameter: Organism Value: Zea mays
  misc_feature: MA Experiment 20000487 PARAMETER Experiment Name: Zm_50mM_NH4NO3_L_to_H_P Parameter: Timepoint (hr) Value: 4
  misc_feature: MA Experiment 20000487 PARAMETER Experiment Name: Zm_50mM_NH4NO3_L_to_H_P Parameter: Tissue Value: Leaves
  misc_feature: MA Experiment 20000487 PARAMETER Experiment Name: Zm_50mM_NH4NO3_L_to_H_P Parameter: Treatment Value: 50mM NH4NO3 vs. 100mM Mannitol
  misc_feature: MA Experiment ID: 20000492 Result: Up-regulated in Transcription
  misc_feature: MA Experiment 20000492 PARAMETER Experiment Name: Zm_Hybrid_Seed_Dev_P Parameter: DAP Value: 12
  misc_feature: MA Experiment 20000492 PARAMETER Experiment Name: Zm_Hybrid_Seed_Dev_P Parameter: Organism Value: Zea mays
  misc_feature: MA Experiment 20000492 PARAMETER Experiment Name: Zm_Hybrid_Seed_Dev_P Parameter: Plant Line Value: 35A19
  misc_feature: MA Experiment 20000492 PARAMETER Experiment Name: Zm_Hybrid_Seed_Dev_P Parameter: Tissue Value: Fert Kernel vs. Unfert Floret
  misc_feature: MA Experiment ID: 20000534 Result: Down-regulated in Transcription
  misc_feature: MA Experiment 20000534 PARAMETER Experiment Name: Zm_Hybrid_Pollen_P Parameter: Age (day) Value: 8
  misc_feature: MA Experiment 20000534 PARAMETER Experiment Name: Zm_Hybrid_Pollen_P Parameter: Organism Value: Zea mays
  misc_feature: MA Experiment 20000534 PARAMETER Experiment Name: Zm_Hybrid_Pollen_P Parameter: Plant Line Value: 35A19
  misc_feature: MA Experiment 20000534 PARAMETER Experiment Name: Zm_Hybrid_Pollen_P Parameter: Tissue Value: Pollen vs. Aerial
  misc_feature: MA Experiment ID: 20001613 Result: Up-regulated in Transcription
  misc_feature: MA Experiment 20001613 PARAMETER Experiment Name: Zm_50ppm_KNO3_L-to-H_P Parameter: Age (day) Value: 20
  misc_feature: MA Experiment 20001613 PARAMETER Experiment Name: Zm_50ppm_KNO3_L-to-H_P Parameter: Organism Value: Zea mays
  misc_feature: MA Experiment 20001613 PARAMETER Experiment Name: Zm_50ppm_KNO3_L-to-H_P Parameter: Plant Line Value: 35A19
  misc_feature: MA Experiment 20001613 PARAMETER Experiment Name: Zm_50ppm_KNO3_L-to-H_P Parameter: Timepoint (hr) Value: 24
  misc_feature: MA Experiment 20001613 PARAMETER Experiment Name: Zm_50ppm_KNO3_L-to-H_P Parameter: Tissue Value: Roots
  misc_feature: MA Experiment 20001613 PARAMETER Experiment Name: Zm_50ppm_KNO3_L-to-H_P Parameter: Treatment Value: 50ppm KNO3 vs. 50ppm KCl
aaacccagggtgagtctccggatccgtcgccgtctggtatccgtgtgctctcgtcgccgtcgccgtcgccgccgtctgactgcccccctcgcctcccgcggcgtcgggtctctggtgctgctgctgctgctgctgctgctgcgtgcagggcagtgatggcgacgaagaggagcgtgggcaccctcggcgaggcggatctgaaggggaagaaggtgttcgtgcgcgccgacctcaacgtcccgctcgacgatgcccagaagatcaccgacgacacccgcatccgcgcctccgtccccaccatcaagttcctcctcgagaagggcgccaaggtcatcctcgccagccacctgggtcgtccaaaaggtgtcaccccaaagtacagcttgaagcctcttgttccacgcttgtctgagct

SEQ ID NO: 17314 - protein, 137 aa, Zea mays subsp. mays
  peptide (1)..(137): Ceres Seq. ID no. 1671993
  misc_feature (54)..(136): Pfam Name: Phosphoglycerate kinase Pfam Description: Phosphoglycerate kinase
  misc_feature (9)..(136): Homolog of NCBI NO: 15230595 NR Description: phosphoglycerate kinase, putative
  misc_feature (43)..(136): Homolog of NCBI NO: 7434544 NR Description: phosphoglycerate kinase (EC 2.7.2.3) precursor,
  misc_feature (47)..(136): Homolog of NCBI NO: 3738261 NR Description: chloroplast phosphoglycerate kinase [Populus
  misc_feature (52)..(136): Homolog of NCBI NO: 21536853 NR Description: phosphoglycerate kinase, putative [Arabidopsis
  misc_feature (36)..(136): Homolog of NCBI NO: 15223484 NR Description: phosphoglycerate kinase, putative
  misc_feature (36)..(136): Homolog of NCBI NO: 6056366 NR Description: phosphoglycerate kinase [Arabidopsis thaliana]
  misc_feature (52)..(136): Homolog of NCBI NO: 15219412 NR Description: phosphoglycerate kinase, putative
  misc_feature (29)..(136): Homolog of NCBI NO: 129915 NR Description: Phosphoglycerate kinase, chloroplast precursor
  misc_feature (52)..(136): Homolog of NCBI NO: 9230771 NR Description: cytosolic phosphoglycerate kinase [Pisum sativum]
  misc_feature (52)..(136): Homolog of NCBI NO: 129916 NR Description: Phosphoglycerate kinase, cytosolic
TQGESPDPSPSGIRVLSSPSPSPPSDCPPRLPRRRVSGAAAAAAAAACRAVMATKRSVGTLGEADLKGKKVFVRADLNVPLDDAQKITDDTRIRASVPTIKFLLEKGAKVILASHLGRPKGVTPKYSLKPLVPRLSE

SEQ ID NO: 17315 - protein, 86 aa, Zea mays subsp. mays
  peptide (1)..(86): Ceres Seq. ID no. 1671994
  misc_feature (3)..(85): Pfam Name: Phosphoglycerate kinase Pfam Description: Phosphoglycerate kinase
  misc_feature (1)..(85): Homolog of NCBI NO: 15223484 NR Description: phosphoglycerate kinase, putative
  misc_feature (1)..(85): Homolog of NCBI NO: 6056366 NR Description: phosphoglycerate kinase [Arabidopsis thaliana]
  misc_feature (1)..(85): Homolog of NCBI NO: 15230595 NR Description: phosphoglycerate kinase, putative
  misc_feature (1)..(85): Homolog of NCBI NO: 7434544 NR Description: phosphoglycerate kinase (EC 2.7.2.3) precursor,
  misc_feature (1)..(85): Homolog of NCBI NO: 3738261 NR Description: chloroplast phosphoglycerate kinase [Populus
  misc_feature (1)..(85): Homolog of NCBI NO: 21536853 NR Description: phosphoglycerate kinase, putative [Arabidopsis
  misc_feature (1)..(85): Homolog of NCBI NO: 15219412 NR Description: phosphoglycerate kinase, putative
  misc_feature (1)..(85): Homolog of NCBI NO: 129915 NR Description: Phosphoglycerate kinase, chloroplast precursor
  misc_feature (1)..(85): Homolog of NCBI NO: 9230771 NR Description: cytosolic phosphoglycerate kinase [Pisum sativum]
  misc_feature (1)..(85): Homolog of NCBI NO: 129916 NR Description: Phosphoglycerate kinase, cytosolic
MATKRSVGTLGEADLKGKKVFVRADLNVPLDDAQKITDDTRIRASVPTIKFLLEKGAKVILASHLGRPKGVTPKYSLKPLVPRLSE

SEQ ID NO: 17316 - DNA, 1224 bp, Zea mays subsp. mays
  misc_feature (1)..(1224): Ceres Seq. ID no. 13494493
  misc_feature: MA Experiment ID: 108528 Result: Up-regulated in Transcription
  misc_feature: MA Experiment 108528 PARAMETER Experiment Name: Zm_Imbibed_Seeds_P Parameter: Age (day) Value: 5 vs. 2
  misc_feature: MA Experiment 108528 PARAMETER Experiment Name: Zm_Imbibed_Seeds_P Parameter: Organism Value: Zea mays
  misc_feature: MA Experiment 108528 PARAMETER Experiment Name: Zm_Imbibed_Seeds_P Parameter: Plant Line Value: 35A19
  misc_feature: MA Experiment 108528 PARAMETER Experiment Name: Zm_Imbibed_Seeds_P Parameter: Tissue Value: Aerial vs. Embryo
  misc_feature: MA Experiment ID: 108530 Result: Up-regulated in Transcription
  misc_feature: MA Experiment 108530 PARAMETER Experiment Name: Zm_Imbibed_Seeds_P Parameter: Age (day) Value: 6 vs. 2
  misc_feature: MA Experiment 108530 PARAMETER Experiment Name: Zm_Imbibed_Seeds_P Parameter: Organism Value: Zea mays
  misc_feature: MA Experiment 108530 PARAMETER Experiment Name: Zm_Imbibed_Seeds_P Parameter: Plant Line Value: 35A19
  misc_feature: MA Experiment 108530 PARAMETER Experiment Name: Zm_Imbibed_Seeds_P Parameter: Tissue Value: Aerial vs. Embryo
  misc_feature: MA Experiment ID: 108536 Result: Up-regulated in Transcription
  misc_feature: MA Experiment 108536 PARAMETER Experiment Name: Zm_Meristem_P Parameter: Age (day) Value: 8
  misc_feature: MA Experiment 108536 PARAMETER Experiment Name: Zm_Meristem_P Parameter: Organism Value: Zea mays
  misc_feature: MA Experiment 108536 PARAMETER Experiment Name: Zm_Meristem_P Parameter: Plant Line Value: 35A19
  misc_feature: MA Experiment 108536 PARAMETER Experiment Name: Zm_Meristem_P Parameter: Tissue Value: Shoot Meristem vs. Above Shoot Meristem
  misc_feature: MA Experiment ID: 108543 Result: Up-regulated in Transcription
  misc_feature: MA Experiment ID: 20000477 Result: Down-regulated in Transcription
  misc_feature: MA Experiment 20000477 PARAMETER Experiment Name: Zm_5mM_SA_P Parameter: Age (day) Value: 10
  misc_feature: MA Experiment 20000477 PARAMETER Experiment Name: Zm_5mM_SA_P Parameter: Organism Value: Zea mays
  misc_feature: MA Experiment 20000477 PARAMETER Experiment Name: Zm_5mM_SA_P Parameter: Plant Line Value: 35A19
  misc_feature: MA Experiment 20000477 PARAMETER Experiment Name: Zm_5mM_SA_P Parameter: Timepoint (hr) Value: 48
  misc_feature: MA Experiment 20000477 PARAMETER Experiment Name: Zm_5mM_SA_P Parameter: Tissue Value: Aerial
  misc_feature: MA Experiment 20000477 PARAMETER Experiment Name: Zm_5mM_SA_P Parameter: Treatment Value: 5mM SA vs. No Treatment
  misc_feature: MA Experiment ID: 20000478 Result: Down-regulated in Transcription
  misc_feature: MA Experiment 20000478 PARAMETER Experiment Name: Zm_5mM_SA_P Parameter: Age (day) Value: 11
  misc_feature: MA Experiment 20000478 PARAMETER Experiment Name: Zm_5mM_SA_P Parameter: Organism Value: Zea mays
  misc_feature: MA Experiment 20000478 PARAMETER Experiment Name: Zm_5mM_SA_P Parameter: Plant Line Value: 35A19
  misc_feature: MA Experiment 20000478 PARAMETER Experiment Name: Zm_5mM_SA_P Parameter: Timepoint (hr) Value: 72
  misc_feature: MA Experiment 20000478 PARAMETER Experiment Name: Zm_5mM_SA_P Parameter: Tissue Value: Aerial
  misc_feature: MA Experiment 20000478 PARAMETER Experiment Name: Zm_5mM_SA_P Parameter: Treatment Value: 5mM SA vs. No Treatment
  misc_feature: MA Experiment ID: 20000479 Result: Down-regulated in Transcription
  misc_feature: MA Experiment 20000479 PARAMETER Experiment Name: Zm_Drought_P Parameter: Age (day) Value: 10
  misc_feature: MA Experiment 20000479 PARAMETER Experiment Name: Zm_Drought_P Parameter: Organism Value: Zea mays
  misc_feature: MA Experiment 20000479 PARAMETER Experiment Name: Zm_Drought_P Parameter: Plant Line Value: 35A19
  misc_feature: MA Experiment 20000479 PARAMETER Experiment Name: Zm_Drought_P Parameter: Timepoint (hr) Value: 48
  misc_feature: MA Experiment 20000479 PARAMETER Experiment Name: Zm_Drought_P Parameter: Tissue Value: Aerial
  misc_feature: MA Experiment 20000479 PARAMETER Experiment Name: Zm_Drought_P Parameter: Treatment Value: Drought vs. No Drought
  misc_feature: MA Experiment ID: 20000534 Result: Down-regulated in Transcription
  misc_feature: MA Experiment 20000534 PARAMETER Experiment Name: Zm_Hybrid_Pollen_P Parameter: Age (day) Value: 8
  misc_feature: MA Experiment 20000534 PARAMETER Experiment Name: Zm_Hybrid_Pollen_P Parameter: Organism Value: Zea mays
  misc_feature: MA Experiment 20000534 PARAMETER Experiment Name: Zm_Hybrid_Pollen_P Parameter: Plant Line Value: 35A19
  misc_feature: MA Experiment 20000534 PARAMETER Experiment Name: Zm_Hybrid_Pollen_P Parameter: Tissue Value: Pollen vs. Aerial
ccctttcctgcccctccccctccgcctttcctctctctcgctctcctcctctcctctcctctcctctccttccgcatcacacaccacgactcccaaccgccggttggctttgctgctccgagctcttcctcttccacacccgccctctctcttgggtcggcggccgagtgtctgcgtcgtccacggagatcagggatcggcggcggggtatggcgagggagcgacgggagataaagaggatagagagcgcggcggcgcggcaggtcacgttctccaagcgccgccgcggcctcttcaagaaggctgaggagctctccgtgctgtgcgatgccgacgtcgcgctcatcgtcttctcctccacgggaaagctctcccagttcgccagctccagtatgaatgagatcattgacaagtacagcacacattctaaaaacctggggaaagcagaacagccttcacttgacttgaacttagaacatagcaaatatgcaaatttgaatgagcaacttgtggaagcaagccttcgactcaggcagatgagaggtgaagaacttgagggattgagtgttgaagaactccagcaattggagaagaatctggaatctggtctgcatagggtgcttcaaacaaaggatcaacaattcttggaacagatcagcgacctcgaacaaaagagtacacaactggcagaggagaacaggcaactgaggaatcaagtatcccacatacccccagttggcaagcaatcagttgctgatactgaaaatgttatcgctgaagatgggcaatcctctgaatcagtcatgactgcgttgcattctgggagttcacaggataatgatgatggttcggatgtctctctaaaattagggctgccttgtgttgcatggaagtgaaaaaacaagatggtctgtgttgatctgggtggagctgcggcttcagcagataggcacttgtgttattgtcttatggacgacccccgactactgcaataatcttgcatcggaagcgagatcagttaacctgatttgtcatccttgtggcttcatgatgcgatgttgcgcttgtaccgtttgctaggatgttaactggactagaatcgtgtctacttttgtactgctcgtgaatcctatctactttgtgctatccaaagttatgacctaccacttgcatcggcatggcgcgccggccgtaagctgtgctcaagcatgcatgcttcgtgtt

SEQ ID NO: 17317 - protein, 297 aa, Zea mays subsp. mays
  peptide (1)..(297): Ceres Seq. ID no. 13494494
  misc_feature (176)..(240): Pfam Name: K-box region Pfam Description: K-box region
  misc_feature (72)..(291): Homolog of NCBI NO: 12964064 NR Description: MADS box transcription factor [Oryza sativa]
  misc_feature (53)..(291): Homolog of NCBI NO: 33621117 NR Description: transcription factor MADS47
  misc_feature (70)..(292): Homolog of NCBI NO: 16549058 NR Description: putative MADS-domain transcription factor MpMADS1
  misc_feature (70)..(292): Homolog of NCBI NO: 6652756 NR Description: MADS box protein [Paulownia kawakamii]
  misc_feature (70)..(292): Homolog of NCBI NO: 30575602 NR Description: SVP-like floral repressor [Eucalyptus grandis]
  misc_feature (70)..(292): Homolog of NCBI NO: 30983948 NR Description: SVP-like floral repressor [Eucalyptus
  misc_feature (70)..(292): Homolog of NCBI NO: 29372754 NR Description: m21 [Zea mays]
  misc_feature (70)..(297): Homolog of NCBI NO: 5295978 NR Description: MADS box-like protein [Oryza sativa (japonica
  misc_feature (70)..(297): Homolog of NCBI NO: 29372770 NR Description: putative MADS-domain transcription factor [Zea
  misc_feature (70)..(297): Homolog of NCBI NO: 29372750 NR Description: putative MADS-domain transcription factor [Zea
LSCPSPSAFPLSRSPPLLSSPLLPHHTPRLPTAGWLCCSELFLFHTRPLSWVGGRVSASSTEIRDRRRGMARERREIKRIESAAARQVTFSKRRRGLFKKAEELSVLCDADVALIVFSSTGKLSQFASSSMNEIIDKYSTHSKNLGKAEQPSLDLNLEHSKYANLNEQLVEASLRLRQMRGEELEGLSVEELQQLEKNLESGLHRVLQTKDQQFLEQISDLEQKSTQLAEENRQLRNQVSHIPPVGKQSVADTENVIAEDGQSSESVMTALHSGSSQDNDDGSDVSLKLGLPCVAWK

SEQ ID NO: 17318 - protein, 228 aa, Zea mays subsp. mays
  peptide (1)..(228): Ceres Seq. ID no. 13494495
  misc_feature (107)..(171): Pfam Name: K-box region Pfam Description: K-box region
  misc_feature (3)..(222): Homolog of NCBI NO: 12964064 NR Description: MADS box transcription factor [Oryza sativa]
  misc_feature (1)..(222): Homolog of NCBI NO: 33621117 NR Description: transcription factor MADS47
  misc_feature (1)..(223): Homolog of NCBI NO: 16549058 NR Description: putative MADS-domain transcription factor MpMADS1
  misc_feature (1)..(223): Homolog of NCBI NO: 6652756 NR Description: MADS box protein [Paulownia kawakamii]
  misc_feature (1)..(223): Homolog of NCBI NO: 30575602 NR Description: SVP-like floral repressor [Eucalyptus grandis]
  misc_feature (1)..(223): Homolog of NCBI NO: 30983948 NR Description: SVP-like floral repressor [Eucalyptus
  misc_feature (1)..(223): Homolog of NCBI NO: 29372754 NR Description: m21 [Zea mays]
  misc_feature (1)..(228): Homolog of NCBI NO: 5295978 NR Description: MADS box-like protein [Oryza sativa (japonica
  misc_feature (1)..(228): Homolog of NCBI NO: 29372770 NR Description: putative MADS-domain transcription factor [Zea
  misc_feature (1)..(228): Homolog of NCBI NO: 29372750 NR Description: putative MADS-domain transcription factor [Zea
MARERREIKRIESAAARQVTFSKRRRGLFKKAEELSVLCDADVALIVFSSTGKLSQFASSSMNEIIDKYSTHSKNLGKAEQPSLDLNLEHSKYANLNEQLVEASLRLRQMRGEELEGLSVEELQQLEKNLESGLHRVLQTKDQQFLEQISDLEQKSTQLAEENRQLRNQVSHIPPVGKQSVADTENVIAEDGQSSESVMTALHSGSSQDNDDGSDVSLKLGLPCVAWK

SEQ ID NO: 17319 - protein, 167 aa, Zea mays subsp. mays
  peptide (1)..(167): Ceres Seq. ID no. 13494496
  misc_feature (46)..(110): Pfam Name: K-box region Pfam Description: K-box region
  misc_feature (1)..(161): Homolog of NCBI NO: 12964064 NR Description: MADS box transcription factor [Oryza sativa]
  misc_feature (1)..(161): Homolog of NCBI NO: 33621117 NR Description: transcription factor MADS47
  misc_feature (1)..(162): Homolog of NCBI NO: 16549058 NR Description: putative MADS-domain transcription factor MpMADS1
  misc_feature (1)..(162): Homolog of NCBI NO: 6652756 NR Description: MADS box protein [Paulownia kawakamii]
  misc_feature (1)..(162): Homolog of NCBI NO: 30575602 NR Description: SVP-like floral repressor [Eucalyptus grandis]
  misc_feature (1)..(162): Homolog of NCBI NO: 30983948 NR Description: SVP-like floral repressor [Eucalyptus
  misc_feature (1)..(162): Homolog of NCBI NO: 29372754 NR Description: m21 [Zea mays]
  misc_feature (1)..(167): Homolog of NCBI NO: 5295978 NR Description: MADS box-like protein [Oryza sativa (japonica
  misc_feature (1)..(167): Homolog of NCBI NO: 29372770 NR Description: putative MADS-domain transcription factor [Zea
  misc_feature (1)..(167): Homolog of NCBI NO: 29372750 NR Description: putative MADS-domain transcription factor [Zea
MNEIIDKYSTHSKNLGKAEQPSLDLNLEHSKYANLNEQLVEASLRLRQMRGEELEGLSVEELQQLEKNLESGLHRVLQTKDQQFLEQISDLEQKSTQLAEENRQLRNQVSHIPPVGKQSVADTENVIAEDGQSSESVMTALHSGSSQDNDDGSDVSLKLGLPCVAWK

SEQ ID NO: 17320 - DNA, 2817 bp, Zea mays subsp. mays
  misc_feature (1)..(2817): Ceres Seq. ID no. 12362502
  misc_feature: MA Experiment ID: 108515 Result: Down-regulated in Transcription
  misc_feature: MA Experiment 108515 PARAMETER Experiment Name: Zm_2mM_SA_P Parameter: Age (day) Value: 8
  misc_feature: MA Experiment 108515 PARAMETER Experiment Name: Zm_2mM_SA_P Parameter: Organism Value: Zea mays
  misc_feature: MA Experiment 108515 PARAMETER Experiment Name: Zm_2mM_SA_P Parameter: Plant Line Value: 35A19
  misc_feature: MA Experiment 108515 PARAMETER Experiment Name: Zm_2mM_SA_P Parameter: Timepoint (hr) Value: 12
  misc_feature: MA Experiment 108515 PARAMETER Experiment Name: Zm_2mM_SA_P Parameter: Tissue Value: Aerial
  misc_feature: MA Experiment 108515 PARAMETER Experiment Name: Zm_2mM_SA_P Parameter: Treatment Value: 2mM SA vs. No Treatment
  misc_feature: MA Experiment ID: 108535 Result: Up-regulated in Transcription
  misc_feature: MA Experiment 108535 PARAMETER Experiment Name: Zm_Meristem_P Parameter: Age (day) Value: 8
  misc_feature: MA Experiment 108535 PARAMETER Experiment Name: Zm_Meristem_P Parameter: Organism Value: Zea mays
  misc_feature: MA Experiment 108535 PARAMETER Experiment Name: Zm_Meristem_P Parameter: Plant Line Value: 35A19
  misc_feature: MA Experiment 108535 PARAMETER Experiment Name: Zm_Meristem_P Parameter: Tissue Value: Root Meristem vs. Above Root Meristem
  misc_feature: MA Experiment ID: 108543 Result: Up-regulated in Transcription
  misc_feature: MA Experiment ID: 108556 Result: Down-regulated in Transcription
  misc_feature: MA Experiment 108556 PARAMETER Experiment Name: Zm_Drought_P Parameter: Age (day) Value: 9
  misc_feature: MA Experiment 108556 PARAMETER Experiment Name: Zm_Drought_P Parameter: Organism Value: Zea mays
  misc_feature: MA Experiment 108556 PARAMETER Experiment Name: Zm_Drought_P Parameter: Plant Line Value: 35A19
  misc_feature: MA Experiment 108556 PARAMETER Experiment Name: Zm_Drought_P Parameter: Timepoint (hr) Value: 24
  misc_feature: MA Experiment 108556 PARAMETER Experiment Name: Zm_Drought_P Parameter: Tissue Value: Aerial
  misc_feature: MA Experiment 108556 PARAMETER Experiment Name: Zm_Drought_P Parameter: Treatment Value: Drought vs. No Drought
  misc_feature: MA Experiment ID: 108559 Result: Down-regulated in Transcription
  misc_feature: MA Experiment 108559 PARAMETER Experiment Name: Zm_5mM_NO_P Parameter: Age (day) Value: 8
  misc_feature: MA Experiment 108559 PARAMETER Experiment Name: Zm_5mM_NO_P Parameter: Organism Value: Zea mays
  misc_feature: MA Experiment 108559 PARAMETER Experiment Name: Zm_5mM_NO_P Parameter: Plant Line Value: 35A19
  misc_feature: MA Experiment 108559 PARAMETER Experiment Name: Zm_5mM_NO_P Parameter: Timepoint (hr) Value: 12
  misc_feature: MA Experiment 108559 PARAMETER Experiment Name: Zm_5mM_NO_P Parameter: Tissue Value: Aerial
  misc_feature: MA Experiment 108559 PARAMETER Experiment Name: Zm_5mM_NO_P Parameter: Treatment Value: 5mM NO vs. No Treatment
  misc_feature: MA Experiment ID: 108597 Result: Down-regulated in Transcription
  misc_feature: MA Experiment 108597 PARAMETER Experiment Name: Zm_100uM_ABA_P Parameter: Age (day) Value: 9
  misc_feature: MA Experiment 108597 PARAMETER Experiment Name: Zm_100uM_ABA_P Parameter: Organism Value: Zea mays
  misc_feature: MA Experiment 108597 PARAMETER Experiment Name: Zm_100uM_ABA_P Parameter: Plant Line Value: 35A19
  misc_feature: MA Experiment 108597 PARAMETER Experiment Name: Zm_100uM_ABA_P Parameter: Timepoint (hr) Value: 24
  misc_feature: MA Experiment 108597 PARAMETER Experiment Name: Zm_100uM_ABA_P Parameter: Tissue Value: Aerial
  misc_feature: MA Experiment 108597 PARAMETER Experiment Name: Zm_100uM_ABA_P Parameter: Treatment Value: 100uM ABA vs. No Treatment
  misc_feature: MA Experiment ID: 20000477 Result: Down-regulated in Transcription
  misc_feature: MA Experiment 20000477 PARAMETER Experiment Name: Zm_5mM_SA_P Parameter: Age (day) Value: 10
  misc_feature: MA Experiment 20000477 PARAMETER Experiment Name: Zm_5mM_SA_P Parameter: Organism Value: Zea mays
  misc_feature: MA Experiment 20000477 PARAMETER Experiment Name: Zm_5mM_SA_P Parameter: Plant Line Value: 35A19
  misc_feature: MA Experiment 20000477 PARAMETER Experiment Name: Zm_5mM_SA_P Parameter: Timepoint (hr) Value: 48
  misc_feature: MA Experiment 20000477 PARAMETER Experiment Name: Zm_5mM_SA_P Parameter: Tissue Value: Aerial
  misc_feature: MA Experiment 20000477 PARAMETER Experiment Name: Zm_5mM_SA_P Parameter: Treatment Value: 5mM SA vs. No Treatment
  misc_feature: MA Experiment ID: 20000478 Result: Down-regulated in Transcription
  misc_feature: MA Experiment 20000478 PARAMETER Experiment Name: Zm_5mM_SA_P Parameter: Age (day) Value: 11
  misc_feature: MA Experiment 20000478 PARAMETER Experiment Name: Zm_5mM_SA_P Parameter: Organism Value: Zea mays
  misc_feature: MA Experiment 20000478 PARAMETER Experiment Name: Zm_5mM_SA_P Parameter: Plant Line Value: 35A19
  misc_feature: MA Experiment 20000478 PARAMETER Experiment Name: Zm_5mM_SA_P Parameter: Timepoint (hr) Value: 72
  misc_feature: MA Experiment 20000478 PARAMETER Experiment Name: Zm_5mM_SA_P Parameter: Tissue Value: Aerial
  misc_feature: MA Experiment 20000478 PARAMETER Experiment Name: Zm_5mM_SA_P Parameter: Treatment Value: 5mM SA vs. No Treatment
  misc_feature: MA Experiment ID: 20000479 Result: Down-regulated in Transcription
  misc_feature: MA Experiment 20000479 PARAMETER Experiment Name: Zm_Drought_P Parameter: Age (day) Value: 10
  misc_feature: MA Experiment 20000479 PARAMETER Experiment Name: Zm_Drought_P Parameter: Organism Value: Zea mays
  misc_feature: MA Experiment 20000479 PARAMETER Experiment Name: Zm_Drought_P Parameter: Plant Line Value: 35A19
  misc_feature: MA Experiment 20000479 PARAMETER Experiment Name: Zm_Drought_P Parameter: Timepoint (hr) Value: 48
  misc_feature: MA Experiment 20000479 PARAMETER Experiment Name: Zm_Drought_P Parameter: Tissue Value: Aerial
  misc_feature: MA Experiment 20000479 PARAMETER Experiment Name: Zm_Drought_P Parameter: Treatment Value: Drought vs. No Drought
  misc_feature: MA Experiment ID: 20000480 Result: Down-regulated in Transcription
  misc_feature: MA Experiment 20000480 PARAMETER Experiment Name: Zm_Drought_P Parameter: Age (day) Value: 11
  misc_feature: MA Experiment 20000480 PARAMETER Experiment Name: Zm_Drought_P Parameter: Organism Value: Zea mays
  misc_feature: MA Experiment 20000480 PARAMETER Experiment Name: Zm_Drought_P Parameter: Plant Line Value: 35A19
  misc_feature: MA Experiment 20000480 PARAMETER Experiment Name: Zm_Drought_P Parameter: Timepoint (hr) Value: 72
  misc_feature: MA Experiment 20000480 PARAMETER Experiment Name: Zm_Drought_P Parameter: Tissue Value: Aerial
  misc_feature: MA Experiment 20000480 PARAMETER Experiment Name: Zm_Drought_P Parameter: Treatment Value: Drought vs. No Drought
  misc_feature: MA Experiment ID: 20000487 Result: Down-regulated in Transcription
  misc_feature: MA Experiment 20000487 PARAMETER Experiment Name: Zm_50mM_NH4NO3_L_to_H_P Parameter: Organism Value: Zea mays
  misc_feature: MA Experiment 20000487 PARAMETER Experiment Name: Zm_50mM_NH4NO3_L_to_H_P Parameter: Timepoint (hr) Value: 4
  misc_feature: MA Experiment 20000487 PARAMETER Experiment Name: Zm_50mM_NH4NO3_L_to_H_P Parameter: Tissue Value: Leaves
  misc_feature: MA Experiment 20000487 PARAMETER Experiment Name: Zm_50mM_NH4NO3_L_to_H_P Parameter: Treatment Value: 50mM NH4NO3 vs. 100mM Mannitol
  misc_feature: MA Experiment ID: 20000492 Result: Up-regulated in Transcription
  misc_feature: MA Experiment 20000492 PARAMETER Experiment Name: Zm_Hybrid_Seed_Dev_P Parameter: DAP Value: 12
  misc_feature: MA Experiment 20000492 PARAMETER Experiment Name: Zm_Hybrid_Seed_Dev_P Parameter: Organism Value: Zea mays
  misc_feature: MA Experiment 20000492 PARAMETER Experiment Name: Zm_Hybrid_Seed_Dev_P Parameter: Plant Line Value: 35A19
  misc_feature: MA Experiment 20000492 PARAMETER Experiment Name: Zm_Hybrid_Seed_Dev_P Parameter: Tissue Value: Fert Kernel vs. Unfert Floret
  misc_feature: MA Experiment ID: 20000534 Result: Down-regulated in Transcription
  misc_feature: MA Experiment 20000534 PARAMETER Experiment Name: Zm_Hybrid_Pollen_P Parameter: Age (day) Value: 8
  misc_feature: MA Experiment 20000534 PARAMETER Experiment Name: Zm_Hybrid_Pollen_P Parameter: Organism Value: Zea mays
  misc_feature: MA Experiment 20000534 PARAMETER Experiment Name: Zm_Hybrid_Pollen_P Parameter: Plant Line Value: 35A19
  misc_feature: MA Experiment 20000534 PARAMETER Experiment Name: Zm_Hybrid_Pollen_P Parameter: Tissue Value: Pollen vs. Aerial
  misc_feature: MA Experiment ID: 20000535 Result: Up-regulated in Transcription
  misc_feature: MA Experiment 20000535 PARAMETER Experiment Name: Zm_Hybrid_Seed_Dev_P Parameter: DAP Value: 30 vs. 12
  misc_feature: MA Experiment 20000535 PARAMETER Experiment Name: Zm_Hybrid_Seed_Dev_P Parameter: Organism Value: Zea mays
  misc_feature: MA Experiment 20000535 PARAMETER Experiment Name: Zm_Hybrid_Seed_Dev_P Parameter: Plant Line Value: 35A19
  misc_feature: MA Experiment 20000535 PARAMETER Experiment Name: Zm_Hybrid_Seed_Dev_P Parameter: Tissue Value: Embryo vs. Unfert Floret
  misc_feature: MA Experiment ID: 20000632 Result: Down-regulated in Transcription
  misc_feature: MA Experiment 20000632 PARAMETER Experiment Name: Zm_Herbicide-Treatments_P Parameter: Timepoint (hr) Value: 4
  misc_feature: MA Experiment 20000632 PARAMETER Experiment Name: Zm_Herbicide-Treatments_P Parameter: Tissue Value: Aerial
  misc_feature: MA Experiment 20000632 PARAMETER Experiment Name: Zm_Herbicide-Treatments_P Parameter: Treatment Value: Glean vs. No Treatment
  misc_feature: MA Experiment ID: 20000633 Result: Down-regulated in Transcription
  misc_feature: MA Experiment 20000633 PARAMETER Experiment Name: Zm_Herbicide-Treatments_P Parameter: Timepoint (hr) Value: 4
  misc_feature: MA Experiment 20000633 PARAMETER Experiment Name: Zm_Herbicide-Treatments_P Parameter: Tissue Value: Aerial
  misc_feature: MA Experiment 20000633 PARAMETER Experiment Name: Zm_Herbicide-Treatments_P Parameter: Treatment Value: Trimec vs. No Treatment
gcacgagaccattacctagaacatcctaatcgaaaaccactccccatcttcccaaaccgccccacgcttcatcctcgcaagcctccccgaccccccagctcaacgagatccggcgagcgaattccatcttccccgaccaccagatcgcagcgatggagccggatcgggtcgccgcgggggcatcctcctcgccgcagccctcaccagcgccggccatgttcctgccggggcaaacgcgagaccatgagcggggagcggtcgactgcgcggatcccggcggagacctgaatcccgcaccgcctcagcaggctacagttgaggatgccgcggtgggcggcgatgtggagcaggaggagccaaagaaggaggcgatggcaggagtaggggaggctctccggagcttcatggaggagtttggggatcaaggagaggactccattatcttgtcaccgcggctgcaggagatttgtactcctgaccgccccactgccctgcgcttcttagggaagaaatataataacctcatggagagatacaagaagcaggtggtcaagtgttctgaggagtgtgaccctagatataacggcttgaagaagaagtacacagacgagtgtgcagagaggcggcgtctgtacaatgagcttattgagctaagaggtaacattagggtgttctgcagatgcagacctctgagctccaatgagctcgcccgtgggtgttcatcagtagttgagattgactcatcacaggagactgagctgcagtttgtccccaatgaaaaagaaaggaagccctttaagttcgaccatgtttttggcccagacgatgaccaagaggccgtgttttcagaaacagtgcccgttgttgggtcagtgatggatggtttcaacgtatgcatctttgcatatgggcaaacaggaaccgggaaaactttcacaatggaaggggttccagaaaataggggtgtaaattatagggctttggaagaattgttcagaatctcagagaaaagaagtgcatctgttgcatacacattttccgtaagcatcttggaagtttacaatgaaaagatcagggatcttcttgatgagagcaatgatcaatcaaaaaggttggatattaagcaaaatgctgatggaacacaagaagttcatggtttggttgaggctccaatttataacatagatggtgtgtgggagaaactgaagtttggcgctcaaaataggtctgttggctcaaccaatgctaatgaactcagcagccgctcccacagtttggttagggtcactgttaggagcgagcacttggtgacttatcagaggagcagaagccacatgtggttggttgaccttgctggaagtgagagaatagctaaaactggggtagaaggagataggctgaaagaatcacagttcatcaacaaatcactatctgccttgggtgatgttatatctgcccttgcctcaaaaaattcccatattccatacaggaattccaagctgactcatttgctccaaagctctttaggcggagattgcaagactctaatgttcgtgcagataagcccaagctcaatggattcaggagaaactctcagttcactcaattttgcgagtagagtccgagctgtagaacatggccctgctgctcgtaagcaagcggatccagctgggagtttgaagttaaagcagatgactgaaaaacttcagcatgaggaaaaggagaatgcacagctgaatcaaagcttgcagctgatgcaactgaagtatgcttctcgtgagaatgtcttcaggacactaaatgaaaaggtgaaggatgctgaacaagcatgcagaaattatcagcagcggattagagagctggaaaatgaattaggcaatgagaagagggcttctagggattctgctagatcctcaaggcccccacttgttcctacgagacagagacaacctcagggaaggactaacagcttcgcaccaccttcaggcccttctagatggaggctcaaagcccccgcaaaacacaacaaagagaacattcctgtggcgatgaataaaccaaatgctggggatgatcctaataagcctgtcggcagagcaaggcgtgtttcacttgctccggtgattcgacaaatccccatccagcccaagaggcgatcttcgatggcagtgctaccatccgtgagagagcatctttctgtgctaaacgacaagaaagcaggatctcgactgtcgcaagccaacatggcaagaggatcacttggggcatttggcttgaatttggttccaggaacacccctagcaggacatggtggacctgttgatgctacaccagatggagcaaagttcaggagatttgatttcggaagcagcagcaagttcacaagccctgccccaaatgtgggcatgtggaacaaaatggtcacgccgcagcagaagctgggaatggcaccggcaggagcgaagctgtgtttcagcatccagaaaagagttacgcctccacatgttcgggcgaaacctggattgggcatcttcgacccagctctgcgtgagaatatggtcgtggggagagccggcaatgcgctgcgggtgctcaaccccaagcgaaggcaatctgttatctaactcttgaagccaaaggtacagcagatgtttggacgttcaaacggagcgtgtggttcttagtgaaaccgtgaagatgttcttttcagcatctttaaatggattctgcttggttgttactagttgataggaaagctatgttaatactgttaatggaagttgttaattgtatttgttcgttactaagaatcgcttc

SEQ ID NO: 17321 - protein, 823 aa, Zea mays subsp. mays
  peptide (1)..(823): Ceres Seq. ID no. 12362503
  misc_feature (71)..(501): Homolog of NCBI NO: 14124976 NR Description: Similar to kinesin family member C3 [Homo sapiens]
  misc_feature (71)..(501): Homolog of NCBI NO: 19923321 NR Description: kinesin family member C3 [Homo sapiens]
  misc_feature (71)..(501): Homolog of NCBI NO: 3249735 NR Description: microtubule-based motor [Homo sapiens]
  misc_feature (71)..(501): Homolog of NCBI NO: 26996539 NR Description: Unknown (protein for MGC:47520) [Homo sapiens]
  misc_feature (156)..(589): Homolog of NCBI NO: 11358474 NR Description: kinesin-like heavy chain [validated] -
  misc_feature (156)..(589): Homolog of NCBI NO: 18421069 NR Description: kinesin-related protein; protein id: At5g27000.1
  misc_feature (146)..(602): Homolog of NCBI NO: 15227252 NR Description: kinesin-related protein; protein id: At2g22610.1
  misc_feature (146)..(573): Homolog of NCBI NO: 27476088 NR Description: Hypothetical protein [Oryza sativa (japonica
  misc_feature (102)..(684): Homolog of NCBI NO: 15218418 NR Description: kinesin-related protein; protein id: At1g72250.1
  misc_feature (142)..(553): Homolog of NCBI NO: 15240982 NR Description: kinesin-related protein; protein id: At5g27550.1
MEPDRVAAGASSSPQPSPAPAMFLPGQTRDHERGAVDCADPGGDLNPAPPQQATVEDAAVGGDVEQEEPKKEAMAGVGEALRSFMEEFGDQGEDSIILSPRLQEICTPDRPTALRFLGKKYNNLMERYKKQVVKCSEECDPRYNGLKKKYTDECAERRRLYNELIELRGNIRVFCRCRPLSSNELARGCSSVVEIDSSQETELQFVPNEKERKPFKFDHVFGPDDDQEAVFSETVPVVGSVMDGFNVCIFAYGQTGTGKTFTMEGVPENRGVNYRALEELFRISEKRSASVAYTFSVSILEVYNEKIRDLLDESNDQSKRLDIKQNADGTQEVHGLVEAPIYNIDGVWEKLKFGAQNRSVGSTNANELSSRSHSLVRVTVRSEHLVTYQRSRSHMWLVDLAGSERIAKTGVEGDRLKESQFINKSLSALGDVISALASKNSHIPYRNSKLTHLLQSSLGGDCKTLMFVQISPSSMDSGETLSSLNFASRVRAVEHGPAARKQADPAGSLKLKQMTEKLQHEEKENAQLNQSLQLMQLKYASRENVFRTLNEKVKDAEQACRNYQQRIRELENELGNEKRASRDSARSSRPPLVPTRQRQPQGRTNSFAPPSGPSRWRLKAPAKHNKENIPVAMNKPNAGDDPNKPVGRARRVSLAPVIRQIPIQPKRRSSMAVLPSVREHLSVLNDKKAGSRLSQANMARGSLGAFGLNLVPGTPLAGHGGPVDATPDGAKFRRFDFGSSSKFTSPAPNVGMWNKMVTPQQKLGMAPAGAKLCFSIQKRVTPPHVRAKPGLGIFDPALRENMVVGRAGNALRVLNPKRRQSVI

SEQ ID NO: 17322 - protein, 802 aa, Zea mays subsp. mays
  peptide (1)..(802): Ceres Seq. ID no. 12362504
  misc_feature (50)..(480): Homolog of NCBI NO: 19923321 NR Description: kinesin family member C3 [Homo sapiens]
  misc_feature (50)..(480): Homolog of NCBI NO: 14124976 NR Description: Similar to kinesin family member C3 [Homo sapiens]
  misc_feature (50)..(480): Homolog of NCBI NO: 3249735 NR Description: microtubule-based motor [Homo sapiens]
  misc_feature (50)..(480): Homolog of NCBI NO: 26996539 NR Description: Unknown (protein for MGC:47520) [Homo sapiens]
  misc_feature (135)..(568): Homolog of NCBI NO: 11358474 NR Description: kinesin-like heavy chain [validated] -
  misc_feature (135)..(568): Homolog of NCBI NO: 18421069 NR Description: kinesin-related protein; protein id: At5g27000.1
  misc_feature (125)..(581): Homolog of NCBI NO: 15227252 NR Description: kinesin-related protein; protein id: At2g22610.1
  misc_feature (125)..(552): Homolog of NCBI NO: 27476088 NR Description: Hypothetical protein [Oryza sativa (japonica
  misc_feature (81)..(663): Homolog of NCBI NO: 15218418 NR Description: kinesin-related protein; protein id: At1g72250.1
  misc_feature (121)..(532): Homolog of NCBI NO: 15240982 NR Description: kinesin-related protein; protein id: At5g27550.1
MFLPGQTRDHERGAVDCADPGGDLNPAPPQQATVEDAAVGGDVEQEEPKKEAMAGVGEALRSFMEEFGDQGEDSIILSPRLQEICTPDRPTALRFLGKKYNNLMERYKKQVVKCSEECDPRYNGLKKKYTDECAERRRLYNELIELRGNIRVFCRCRPLSSNELARGCSSVVEIDSSQETELQFVPNEKERKPFKFDHVFGPDDDQEAVFSETVPVVGSVMDGFNVCIFAYGQTGTGKTFTMEGVPENRGVNYRALEELFRISEKRSASVAYTFSVSILEVYNEKIRDLLDESNDQSKRLDIKQNADGTQEVHGLVEAPIYNIDGVWEKLKFGAQNRSVGSTNANELSSRSHSLVRVTVRSEHLVTYQRSRSHMWLVDLAGSERIAKTGVEGDRLKESQFINKSLSALGDVISALASKNSHIPYRNSKLTHLLQSSLGGDCKTLMFVQISPSSMDSGETLSSLNFASRVRAVEHGPAARKQADPAGSLKLKQMTEKLQHEEKENAQLNQSLQLMQLKYASRENVFRTLNEKVKDAEQACRNYQQRIRELENELGNEKRASRDSARSSRPPLVPTRQRQPQGRTNSFAPPSGPSRWRLKAPAKHNKENIPVAMNKPNAGDDPNKPVGRARRVSLAPVIRQIPIQPKRRSSMAVLPSVREHLSVLNDKKAGSRLSQANMARGSLGAFGLNLVPGTPLAGHGGPVDATPDGAKFRRFDFGSSSKFTSPAPNVGMWNKMVTPQQKLGMAPAGAKLCFSIQKRVTPPHVRAKPGLGIFDPALRENMVVGRAGNALRVLNPKRRQSVI

SEQ ID NO: 17323 - protein, 750 aa, Zea mays subsp. mays
  peptide (1)..(750): Ceres Seq. ID no. 12362505
  misc_feature (1)..(428): Homolog of NCBI NO: 19923321 NR Description: kinesin family member C3 [Homo sapiens]
  misc_feature (1)..(428): Homolog of NCBI NO: 14124976 NR Description: Similar to kinesin family member C3 [Homo sapiens]
  misc_feature (1)..(428): Homolog of NCBI NO: 3249735 NR Description: microtubule-based motor [Homo sapiens]
  misc_feature (1)..(428): Homolog of NCBI NO: 26996539 NR Description: Unknown (protein for MGC:47520) [Homo sapiens]
  misc_feature (83)..(516): Homolog of NCBI NO: 11358474 NR Description: kinesin-like heavy chain [validated] -
  misc_feature (83)..(516): Homolog of NCBI NO: 18421069 NR Description: kinesin-related protein; protein id: At5g27000.1
  misc_feature (73)..(529): Homolog of NCBI NO: 15227252 NR Description: kinesin-related protein; protein id: At2g22610.1
  misc_feature (73)..(500): Homolog of NCBI NO: 27476088 NR Description: Hypothetical protein [Oryza sativa (japonica
  misc_feature (29)..(611): Homolog of NCBI NO: 15218418 NR Description: kinesin-related protein; protein id: At1g72250.1
  misc_feature (69)..(480): Homolog of NCBI NO: 15240982 NR Description: kinesin-related protein; protein id: At5g27550.1
MAGVGEALRSFMEEFGDQGEDSIILSPRLQEICTPDRPTALRFLGKKYNNLMERYKKQVVKCSEECDPRYNGLKKKYTDECAERRRLYNELIELRGNIRVFCRCRPLSSNELARGCSSVVEIDSSQETELQFVPNEKERKPFKFDHVFGPDDDQEAVFSETVPVVGSVMDGFNVCIFAYGQTGTGKTFTMEGVPENRGVNYRALEELFRISEKRSASVAYTFSVSILEVYNEKIRDLLDESNDQSKRLDIKQNADGTQEVHGLVEAPIYNIDGVWEKLKFGAQNRSVGSTNANELSSRSHSLVRVTVRSEHLVTYQRSRSHMWLVDLAGSERIAKTGVEGDRLKESQFINKSLSALGDVISALASKNSHIPYRNSKLTHLLQSSLGGDCKTLMFVQISPSSMDSGETLSSLNFASRVRAVEHGPAARKQADPAGSLKLKQMTEKLQHEEKENAQLNQSLQLMQLKYASRENVFRTLNEKVKDAEQACRNYQQRIRELENELGNEKRASRDSARSSRPPLVPTRQRQPQGRTNSFAPPSGPSRWRLKAPAKHNKENIPVAMNKPNAGDDPNKPVGRARRVSLAPVIRQIPIQPKRRSSMAVLPSVREHLSVLNDKKAGSRLSQANMARGSLGAFGLNLVPGTPLAGHGGPVDATPDGAKFRRFDFGSSSKFTSPAPNVGMWNKMVTPQQKLGMAPAGAKLCFSIQKRVTPPHVRAKPGLGIFDPALRENMVVGRAGNALRVLNPKRRQSVI

SEQ ID NO: 17324 - DNA, 1757 bp, Zea mays subsp. mays
  misc_feature (1)..(1757): Ceres Seq. ID no. 12381532
  misc_feature: MA Experiment ID: 108687 Result: Up-regulated in Transcription
  misc_feature: MA Experiment 108687 PARAMETER Experiment Name: Zm_Embryos-Flowers__P Parameter: Tissue Value: Embryo vs. Aerial+
  misc_feature: MA Experiment ID: 20000535 Result: Up-regulated in Transcription
  misc_feature: MA Experiment 20000535 PARAMETER Experiment Name: Zm_Hybrid_Seed_Dev_P Parameter: DAP Value: 30 vs. 12
  misc_feature: MA Experiment 20000535 PARAMETER Experiment Name: Zm_Hybrid_Seed_Dev_P Parameter: Organism Value: Zea mays
  misc_feature: MA Experiment 20000535 PARAMETER Experiment Name: Zm_Hybrid_Seed_Dev_P Parameter: Plant Line Value: 35A19
  misc_feature: MA Experiment 20000535 PARAMETER Experiment Name: Zm_Hybrid_Seed_Dev_P Parameter: Tissue Value: Embryo vs. Unfert Floret
aaatcaatgcagatttgagcgtccttccaaggacgcccaaacgatctctgtaccgcacctgcacggctgcacctaccccacttggtggtcgtctgggtggcgacgccggcgatgatacgcgccgggtcgacgaccgacgtcatgatcgtgctgctgacggcgttcctgctggagtacctgcccaagatctaccacgccgtccgcgtcctgcgccggatgcagggcgtctccggctacctcttcggcaccatctggtgggggatcgcgctcaacctcatggcctacttcgtcgccgctcacgcggtgggcgcgtgttggtacctgctcggcgcgcagcgggccaccaagtgcctcagggagcagtgcgcccaggccgggagcgggtgcgcgccctgggcgctggcgttcgcggagccgctctactacggcgccaccgccagcagcgtgggggcgccggccaggctcgcctgggccggcaacgccacggctaggggcacgtgcctcgacagcgccgacaactaccagtacggggcctaccagtggactgtcatgctggtggccaaccccagcagggtcgagagggttctgctccccatcttctggggactaatgactctcagcacctttgggaatctggagagcacgacggagtggctggagatcgtgttcaacatcgtcaccatcaccggcgggctgattctcgtgacaatgctcatagggaacatcaaggtgttcctgaacgcgacgacgtcgaagaagcaggcgatgcacacgcggctgcgcagcgtggagctgtggatgaagcgcaaggacctgcccaggagctaccggcaccgggtgcgccagtacaagcggcagcggtgggcggccacgcgcggcgtcgacgagtgccgcatcgtccgtgacctgccggaggggctccgccgggacatcaagtaccacctctgcctcggcctcgtgcgccaggtgccgctgttccaacacatggacgacctggtgctcgagaacatctgcgacagggtcaagtccctcattttccccaaaggagaagttattgtcagagaaggagacccagtgaagaggatgctgttcatcgtgcgcggccacctgcagagcagccaggtgctccgcaacggcgccgagagctgctgcatgctggggccgggcaacttcagcggcgacgagctcctgtcgtggtgcctgcgccggccgttcctggagcggctgccggcgtcgtcgtccacgctggccacgctggagagcacggaggccttcgggctggacgccgcggacgtcaagtacgtcacgcagcacttccggtacaccttcaccaacgacaaggtgcggcgcagcgcgcgctactactcgcccgggtggcgcacgtgggcggccgtggcggtgcagctcgcgtggcgccgctacaagcaccgcaagacgctcgcgtcgctgtcgttcatccgcccgcgccgcccgctctcgcggtgctcgtcgctcggcgaggagaagctacgcctctataccgcgctgctcacgtcgcccaagcccaaccaagacgacctgctgtgactgagatgcatgcctgcagtctgaacaacgcgcgtctgttcagcggagttgaagcaaaatgcagcgagatggaagaagctggttctctatagtaaacgtgcatgtcagaaagaactcgagcattggagctccagcctctatgtgtacggtactggttgacaggttctctgtgacatgtgtctcgaattgct

SEQ ID NO: 17325 - protein, 484 aa, Zea mays subsp. mays
  peptide (1)..(484): Ceres Seq. ID no. 12381533
  misc_feature (303)..(404): Pfam Name: Cyclic nucleotide-binding domain Pfam Description: Cyclic nucleotide-binding domain
  misc_feature (1)..(464): Homolog of NCBI NO: 30688654 NR Description: cyclic nucleotide-regulated ion channel, putative
  misc_feature (1)..(447): Homolog of NCBI NO: 30682497 NR Description: cyclic nucleotide-regulated ion channel, putative
  misc_feature (1)..(447): Homolog of NCBI NO: 25412226 NR Description: hypothetical protein At2g24610 [imported] -
  misc_feature (1)..(441): Homolog of NCBI NO: 15226370 NR Description: cyclic nucleotide-regulated ion channel, putative
  misc_feature (70)..(479): Homolog of NCBI NO: 30961811 NR Description: putative cyclic nucleotide and
  misc_feature (1)..(479): Homolog of NCBI NO: 15242291 NR Description: cyclic nucleotide-regulated ion channel (CNGC2)
  misc_feature (1)..(479): Homolog of NCBI NO: 13236666 NR Description: putative cyclic nucleotide and
  misc_feature (1)..(482): Homolog of NCBI NO: 15239581 NR Description: cyclic nucleotide-regulated ion channel (CNGC4)
  misc_feature (1)..(482): Homolog of NCBI NO: 30961805 NR Description: putative cyclic nucleotide and
  misc_feature (1)..(484): Homolog of NCBI NO: 34910098 NR Description: putative cyclic nucleotide and
MIRAGSTTDVMIVLLTAFLLEYLPKIYHAVRVLRRMQGVSGYLFGTIWWGIALNLMAYFVAAHAVGACWYLLGAQRATKCLREQCAQAGSGCAPWALAFAEPLYYGATASSVGAPARLAWAGNATARGTCLDSADNYQYGAYQWTVMLVANPSRVERVLLPIFWGLMTLSTFGNLESTTEWLEIVFNIVTITGGLILVTMLIGNIKVFLNATTSKKQAMHTRLRSVELWMKRKDLPRSYRHRVRQYKRQRWAATRGVDECRIVRDLPEGLRRDIKYHLCLGLVRQVPLFQHMDDLVLENICDRVKSLIFPKGEVIVREGDPVKRMLFIVRGHLQSSQVLRNGAESCCMLGPGNFSGDELLSWCLRRPFLERLPASSSTLATLESTEAFGLDAADVKYVTQHFRYTFTNDKVRRSARYYSPGWRTWAAVAVQLAWRRYKHRKTLASLSFIRPRRPLSRCSSLGEEKLRLYTALLTSPKPNQDDLL

SEQ ID NO: 17326 - protein, 474 aa, Zea mays subsp. mays
  peptide (1)..(474): Ceres Seq. ID no. 12381534
  misc_feature (293)..(394): Pfam Name: Cyclic nucleotide-binding domain Pfam Description: Cyclic nucleotide-binding domain
  misc_feature (1)..(454): Homolog of NCBI NO: 30688654 NR Description: cyclic nucleotide-regulated ion channel, putative
  misc_feature (1)..(437): Homolog of NCBI NO: 30682497 NR Description: cyclic nucleotide-regulated ion channel, putative
  misc_feature (1)..(437): Homolog of NCBI NO: 25412226 NR Description: hypothetical protein At2g24610 [imported] -
  misc_feature (1)..(431): Homolog of NCBI NO: 15226370 NR Description: cyclic nucleotide-regulated ion channel, putative
  misc_feature (60)..(469): Homolog of NCBI NO: 30961811 NR Description: putative cyclic nucleotide and
  misc_feature (1)..(469): Homolog of NCBI NO: 15242291 NR Description: cyclic nucleotide-regulated ion channel (CNGC2)
  misc_feature (1)..(469): Homolog of NCBI NO: 13236666 NR Description: putative cyclic nucleotide and
  misc_feature (1)..(472): Homolog of NCBI NO: 15239581 NR Description: cyclic nucleotide-regulated ion channel (CNGC4)
  misc_feature (1)..(472): Homolog of NCBI NO: 30961805 NR Description: putative cyclic nucleotide and
  misc_feature (1)..(474): Homolog of NCBI NO: 34910098 NR Description: putative cyclic nucleotide and
MIVLLTAFLLEYLPKIYHAVRVLRRMQGVSGYLFGTIWWGIALNLMAYFVAAHAVGACWYLLGAQRATKCLREQCAQAGSGCAPWALAFAEPLYYGATASSVGAPARLAWAGNATARGTCLDSADNYQYGAYQWTVMLVANPSRVERVLLPIFWGLMTLSTFGNLESTTEWLEIVFNIVTITGGLILVTMLIGNIKVFLNATTSKKQAMHTRLRSVELWMKRKDLPRSYRHRVRQYKRQRWAATRGVDECRIVRDLPEGLRRDIKYHLCLGLVRQVPLFQHMDDLVLENICDRVKSLIFPKGEVIVREGDPVKRMLFIVRGHLQSSQVLRNGAESCCMLGPGNFSGDELLSWCLRRPFLERLPASSSTLATLESTEAFGLDAADVKYVTQHFRYTFTNDKVRRSARYYSPGWRTWAAVAVQLAWRRYKHRKTLASLSFIRPRRPLSRCSSLGEEKLRLYTALLTSPKPNQDDLL

SEQ ID NO: 17327 - protein, 449 aa, Zea mays subsp. mays
  peptide (1)..(449): Ceres Seq. ID no. 12381535
  misc_feature (268)..(369): Pfam Name: Cyclic nucleotide-binding domain Pfam Description: Cyclic nucleotide-binding domain
  misc_feature (1)..(444): Homolog of NCBI NO: 13236666 NR Description: putative cyclic nucleotide and
  misc_feature (1)..(447): Homolog of NCBI NO: 15239581 NR Description: cyclic nucleotide-regulated ion channel (CNGC4)
  misc_feature (1)..(429): Homolog of NCBI NO: 30688654 NR Description: cyclic nucleotide-regulated ion channel, putative
  misc_feature (1)..(412): Homolog of NCBI NO: 25412226 NR Description: hypothetical protein At2g24610 [imported] -
  misc_feature (35)..(444): Homolog of NCBI NO: 30961811 NR Description: putative cyclic nucleotide and
  misc_feature (1)..(444): Homolog of NCBI NO: 15242291 NR Description: cyclic nucleotide-regulated ion channel (CNGC2)
  misc_feature (1)..(406): Homolog of NCBI NO: 15226370 NR Description: cyclic nucleotide-regulated ion channel, putative
  misc_feature (1)..(412): Homolog of NCBI NO: 30682497 NR Description: cyclic nucleotide-regulated ion channel, putative
  misc_feature (1)..(447): Homolog of NCBI NO: 30961805 NR Description: putative cyclic nucleotide and
  misc_feature (1)..(449): Homolog of NCBI NO: 34910098 NR Description: putative cyclic nucleotide and
MQGVSGYLFGTIWWGIALNLMAYFVAAHAVGACWYLLGAQRATKCLREQCAQAGSGCAPWALAFAEPLYYGATASSVGAPARLAWAGNATARGTCLDSADNYQYGAYQWTVMLVANPSRVERVLLPIFWGLMTLSTFGNLESTTEWLEIVFNIVTITGGLILVTMLIGNIKVFLNATTSKKQAMHTRLRSVELWMKRKDLPRSYRHRVRQYKRQRWAATRGVDECRIVRDLPEGLRRDIKYHLCLGLVRQVPLFQHMDDLVLENICDRVKSLIFPKGEVIVREGDPVKRMLFIVRGHLQSSQVLRNGAESCCMLGPGNFSGDELLSWCLRRPFLERLPASSSTLATLESTEAFGLDAADVKYVTQHFRYTFTNDKVRRSARYYSPGWRTWAAVAVQLAWRRYKHRKTLASLSFIRPRRPLSRCSSLGEEKLRLYTALLTSPKPNQDDLL

SEQ ID NO: 17328 - DNA, 2095 bp, Zea mays subsp. mays
  misc_feature (1)..(2095): Ceres Seq. ID no. 12417312
  misc_feature: MA Experiment ID: 108522 Result: Up-regulated in Transcription
  misc_feature: MA Experiment 108522 PARAMETER Experiment Name: Zm_42deg_Heat_P Parameter: Age (day) Value: 8
  misc_feature: MA Experiment 108522 PARAMETER Experiment Name: Zm_42deg_Heat_P Parameter: Organism Value: Zea mays
  misc_feature: MA Experiment 108522 PARAMETER Experiment Name: Zm_42deg_Heat_P Parameter: Plant Line Value: 35A19
  misc_feature: MA Experiment 108522 PARAMETER Experiment Name: Zm_42deg_Heat_P Parameter: Temperature (deg C) Value: 42 vs. 22
  misc_feature: MA Experiment 108522 PARAMETER Experiment Name: Zm_42deg_Heat_P Parameter: Timepoint (hr) Value: 1
  misc_feature: MA Experiment 108522 PARAMETER Experiment Name: Zm_42deg_Heat_P Parameter: Tissue Value: Aerial
  misc_feature: MA Experiment ID: 108528 Result: Down-regulated in Transcription
  misc_feature: MA Experiment 108528 PARAMETER Experiment Name: Zm_Imbibed_Seeds_P Parameter: Age (day) Value: 5 vs. 2
  misc_feature: MA Experiment 108528 PARAMETER Experiment Name: Zm_Imbibed_Seeds_P Parameter: Organism Value: Zea mays
  misc_feature: MA Experiment 108528 PARAMETER Experiment Name: Zm_Imbibed_Seeds_P Parameter: Plant Line Value: 35A19
  misc_feature: MA Experiment 108528 PARAMETER Experiment Name: Zm_Imbibed_Seeds_P Parameter: Tissue Value: Aerial vs. Embryo
  misc_feature: MA Experiment ID: 108529 Result: Down-regulated in Transcription
  misc_feature: MA Experiment 108529 PARAMETER Experiment Name: Zm_Imbibed_Seeds_P Parameter: Age (day) Value: 5 vs. 2
  misc_feature: MA Experiment 108529 PARAMETER Experiment Name: Zm_Imbibed_Seeds_P Parameter: Organism Value: Zea mays
  misc_feature: MA Experiment 108529 PARAMETER Experiment Name: Zm_Imbibed_Seeds_P Parameter: Plant Line Value: 35A19
  misc_feature: MA Experiment 108529 PARAMETER Experiment Name: Zm_Imbibed_Seeds_P Parameter: Tissue Value: Roots vs. Embryo
  misc_feature: MA Experiment ID: 108530 Result: Down-regulated in Transcription
  misc_feature: MA Experiment 108530 PARAMETER Experiment Name: Zm_Imbibed_Seeds_P Parameter: Age (day) Value: 6 vs. 2
  misc_feature: MA Experiment 108530 PARAMETER Experiment Name: Zm_Imbibed_Seeds_P Parameter: Organism Value: Zea mays
  misc_feature: MA Experiment 108530 PARAMETER Experiment Name: Zm_Imbibed_Seeds_P Parameter: Plant Line Value: 35A19
  misc_feature: MA Experiment 108530 PARAMETER Experiment Name: Zm_Imbibed_Seeds_P Parameter: Tissue Value: Aerial vs. Embryo
  misc_feature: MA Experiment ID: 108535 Result: Up-regulated in Transcription
  misc_feature: MA Experiment 108535 PARAMETER Experiment Name: Zm_Meristem_P Parameter: Age (day) Value: 8
  misc_feature: MA Experiment 108535 PARAMETER Experiment Name: Zm_Meristem_P Parameter: Organism Value: Zea mays
  misc_feature: MA Experiment 108535 PARAMETER Experiment Name: Zm_Meristem_P Parameter: Plant Line Value: 35A19
  misc_feature: MA Experiment 108535 PARAMETER Experiment Name: Zm_Meristem_P Parameter: Tissue Value: Root Meristem vs. Above Root Meristem
  misc_feature: MA Experiment ID: 108547 Result: Down-regulated in Transcription
  misc_feature: MA Experiment 108547 PARAMETER Experiment Name: Zm_Imbibed_Seeds_P Parameter: Age (day) Value: 4 vs. 2
  misc_feature: MA Experiment 108547 PARAMETER Experiment Name: Zm_Imbibed_Seeds_P Parameter: Organism Value: Zea mays
  misc_feature: MA Experiment 108547 PARAMETER Experiment Name: Zm_Imbibed_Seeds_P Parameter: Plant Line Value: 35A19
  misc_feature: MA Experiment 108547 PARAMETER Experiment Name: Zm_Imbibed_Seeds_P Parameter: Tissue Value: Aerial vs. Embryo
  misc_feature: MA Experiment ID: 20000108 Result: Up-regulated in Transcription
  misc_feature: MA Experiment 20000108 PARAMETER Experiment Name: Zm_Root-Tips_P Parameter: Age (day) Value: 12
  misc_feature: MA Experiment 20000108 PARAMETER Experiment Name: Zm_Root-Tips_P Parameter: Organism Value: Zea mays
  misc_feature: MA Experiment 20000108 PARAMETER Experiment Name: Zm_Root-Tips_P Parameter: Tissue Value: Root tips vs. Root mid region    35
  misc_feature: MA Experiment 20000108 PARAMETER Experiment Name: Zm_Root-Tips_P Parameter: Tissue Value: Root tips vs. Root mid region   Sequence Listing-Misc Features (4)
  misc_feature: MA Experiment ID: 20000488 Result: Up-regulated in Transcription
  misc_feature: MA Experiment 20000488 PARAMETER Experiment Name: Zm_50mM_NH4NO3_L_to_H_P Parameter: Organism Value: Zea mays
  misc_feature: MA Experiment 20000488 PARAMETER Experiment Name: Zm_50mM_NH4NO3_L_to_H_P Parameter: Timepoint (hr) Value: 8
  misc_feature: MA Experiment 20000488 PARAMETER Experiment Name: Zm_50mM_NH4NO3_L_to_H_P Parameter: Tissue Value: Leaves
  misc_feature: MA Experiment 20000488 PARAMETER Experiment Name: Zm_50mM_NH4NO3_L_to_H_P Parameter: Treatment Value: 50mM NH4NO3 vs. 100mM Mannitol
  misc_feature: MA Experiment ID: 20000492 Result: Up-regulated in Transcription
  misc_feature: MA Experiment 20000492 PARAMETER Experiment Name: Zm_Hybrid_Seed_Dev_P Parameter: DAP Value: 12
  misc_feature: MA Experiment 20000492 PARAMETER Experiment Name: Zm_Hybrid_Seed_Dev_P Parameter: Organism Value: Zea mays
  misc_feature: MA Experiment 20000492 PARAMETER Experiment Name: Zm_Hybrid_Seed_Dev_P Parameter: Plant Line Value: 35A19
  misc_feature: MA Experiment 20000492 PARAMETER Experiment Name: Zm_Hybrid_Seed_Dev_P Parameter: Tissue Value: Fert Kernel vs. Unfert Floret
gcacgagaccattacctagaacatcctaatcaaaaaaaatcacaacccgcactcgcccaaaaccctactgctcccgctccgctcctgcttggtcgagatcacttcgccgccgccgctttcgagatctccgggtggagcaagcgaggaaaggcagcagccatgtcgctccgcgtgctgaaccctaacgccgaggtgctcaacaagtcggcagcgctgcacatgaacatcaacgccgccaagggcctccaggacgtgctcaagaccaacctcggccccaagggcaccatcaagatgcttgtgggtggagctggtgacctgaagctgacgaaggatgggaacaccctcttgaaggaaatgcaaattcagaacccaactgcaatcatgattgcgaggacggctgtggcacaggatgacacaagtggtgatggcacaacctccactgtgctatttatcggggagctaatgaagcagtccgagcggtgcatcgatgaaggaactcatccaaggttcttggttgatggttttgatgttgctaagagagcgtgtcttgattttctcgataagttcaagacgccagtcgttactggtgatgaacctgacagagataccttaaaaatgatagcaagaacaactcttaggacaaagttgtatgaagggctggctgatcagttgactgatattgttgtgaatgcagttctctgcattcgcaaaccagatgaaccaattgatctgtttatggtggaaataatgcacatgcgccacaaatttgatgttgacacccgtctggttgagggtctggtcctggaccacggttctcgtcaccctgacatgaagcgcagggcagagaattgttacatcttgacctgcaatgtctcattagaatatgagaaaagtgaaatcaatgcaggatttttttactcaaacgcagaacaaagagagaagatggttgctgcagagagacgccaagttgatgaacgtgtcaaacagattattgaattgaaaaataaggtttgtgctggaggcgataaaaactttgtggtgatcaatcagaagggcattgaccctccatctctggatctccttgctagagcggggattattgctcttcgaagagcaaagaggagaaatatggagaggcttgtgctagcatgtggtggtgaagctgtcaattcagttgatgagttgactgaagattgtctaggctgggctggtcttgtctatgagcatgttcttggagaagaaaagtacacatttgtggagaatgtgaaaaatcctcgctcttgtactatactgattaaaggacctaatgaccataccattgcacaaatcaaggatgctgtccgtgatggtctaagatctgttaagaacacagttgaggatgaagcagttgtgctgggtgctggtgcttttgaggttgctgcaaagaagcatcttatcgacaatgtgaagaaaaccgtcaaaggacgagcacaacttggggtggaggcgtttgcggaagctcttcttgttatacccaagactttggctgagaactctggtttagatactcaagatgtgattgtttctctccagaatgagcatgaccgtggattagttgtggggttgaaccatcactctggggatccgattgatccccagatggaaggcatcttcgacaactactctgtgaagcgccagatcatcaattctggacccatcattgcatcccagttgctgcttgtggatgaagtgatcagggcaggccgcaacatgaggaaaccgacttagatttttgtcgccacctagccgagacttatttgttctaccttttgttttggttttgtgcctagtagtgatctggatgatacgtttgacttgagttggtcccatttcacgaagcaggtcgcattcgcttttttttttgggattactgcgtgcttccattttaacatgggattttagttttatcgatggttttaacatcctcctatgaggaaacaaagcctctagagagacgaggttgccttcccgaagttagtgccaccaaacttgctgcatggaacataaagaagcaatgtttataacaatgttattatcaagtaatccgatgtgatgg

SEQ ID NO: 17329 - protein, 588 aa, Zea mays subsp. mays
  peptide (1)..(588): Ceres Seq. ID no. 12417313
  misc_feature (82)..(582): Pfam Name: TCP-1/cpn60 chaperonin family Pfam Description: TCP-1/cpn60 chaperonin family
  misc_feature (55)..(586): Homolog of NCBI NO: 14517632 NR Description: acute morphine dependence related protein 2 [Homo
  misc_feature (55)..(586): Homolog of NCBI NO: 6094438 NR Description: T-complex protein 1, zeta subunit (TCP-1-zeta)
  misc_feature (55)..(586): Homolog of NCBI NO: 4502643 NR Description: chaperonin containing TCP1, subunit 6A (zeta 1)
  misc_feature (55)..(586): Homolog of NCBI NO: 28277547 NR Description: Similar to chaperonin containing TCP1, subunit 6A
  misc_feature (55)..(586): Homolog of NCBI NO: 6753324 NR Description: chaperonin subunit 6a (zeta); chaperonin
  misc_feature (54)..(588): Homolog of NCBI NO: 11277144 NR Description: TCP-1 chaperonin-like protein - Arabidopsis
  misc_feature (54)..(588): Homolog of NCBI NO: 30685661 NR Description: chaperonin, putative [Arabidopsis thaliana]
  misc_feature (54)..(588): Homolog of NCBI NO: 21536971 NR Description: putative chaperonin [Arabidopsis thaliana]
  misc_feature (54)..(588): Homolog of NCBI NO: 14423532 NR Description: putative chaperonin [Arabidopsis thaliana]
  misc_feature (54)..(588): Homolog of NCBI NO: 15232923 NR Description: putative chaperonin
ARDHYLEHPNQKKSQPALAQNPTAPAPLLLGRDHFAAAAFEISGWSKRGKAAAMSLRVLNPNAEVLNKSAALHMNINAAKGLQDVLKTNLGPKGTIKMLVGGAGDLKLTKDGNTLLKEMQIQNPTAIMIARTAVAQDDTSGDGTTSTVLFIGELMKQSERCIDEGTHPRFLVDGFDVAKRACLDFLDKFKTPVVTGDEPDRDTLKMIARTTLRTKLYEGLADQLTDIVVNAVLCIRKPDEPIDLFMVEIMHMRHKFDVDTRLVEGLVLDHGSRHPDMKRRAENCYILTCNVSLEYEKSEINAGFFYSNAEQREKMVAAERRQVDERVKQIIELKNKVCAGGDKNFVVINQKGIDPPSLDLLARAGIIALRRAKRRNMERLVLACGGEAVNSVDELTEDCLGWAGLVYEHVLGEEKYTFVENVKNPRSCTILIKGPNDHTIAQIKDAVRDGLRSVKNTVEDEAVVLGAGAFEVAAKKHLIDNVKKTVKGRAQLGVEAFAEALLVIPKTLAENSGLDTQDVIVSLQNEHDRGLVVGLNHHSGDPIDPQMEGIFDNYSVKRQIINSGPIIASQLLLVDEVIRAGRNMRKPT

SEQ ID NO: 17330 - protein, 535 aa, Zea mays subsp. mays
  peptide (1)..(535): Ceres Seq. ID no. 12417314
  misc_feature (29)..(529): Pfam Name: TCP-1/cpn60 chaperonin family Pfam Description: TCP-1/cpn60 chaperonin family
  misc_feature (2)..(533): Homolog of NCBI NO: 14517632 NR Description: acute morphine dependence related protein 2 [Homo
  misc_feature (2)..(533): Homolog of NCBI NO: 6094438 NR Description: T-complex protein 1, zeta subunit (TCP-1-zeta)
  misc_feature (2)..(533): Homolog of NCBI NO: 4502643 NR Description: chaperonin containing TCP1, subunit 6A (zeta 1)
  misc_feature (2)..(533): Homolog of NCBI NO: 28277547 NR Description: Similar to chaperonin containing TCP1, subunit 6A
  misc_feature (2)..(533): Homolog of NCBI NO: 6753324 NR Description: chaperonin subunit 6a (zeta); chaperonin
  misc_feature (1)..(535): Homolog of NCBI NO: 11277144 NR Description: TCP-1 chaperonin-like protein - Arabidopsis
  misc_feature (1)..(535): Homolog of NCBI NO: 30685661 NR Description: chaperonin, putative [Arabidopsis thaliana]
  misc_feature (1)..(535): Homolog of NCBI NO: 21536971 NR Description: putative chaperonin [Arabidopsis thaliana]
  misc_feature (1)..(535): Homolog of NCBI NO: 14423532 NR Description: putative chaperonin [Arabidopsis thaliana]
  misc_feature (1)..(535): Homolog of NCBI NO: 15232923 NR Description: putative chaperonin
MSLRVLNPNAEVLNKSAALHMNINAAKGLQDVLKTNLGPKGTIKMLVGGAGDLKLTKDGNTLLKEMQIQNPTAIMIARTAVAQDDTSGDGTTSTVLFIGELMKQSERCIDEGTHPRFLVDGFDVAKRACLDFLDKFKTPVVTGDEPDRDTLKMIARTTLRTKLYEGLADQLTDIVVNAVLCIRKPDEPIDLFMVEIMHMRHKFDVDTRLVEGLVLDHGSRHPDMKRRAENCYILTCNVSLEYEKSEINAGFFYSNAEQREKMVAAERRQVDERVKQIIELKNKVCAGGDKNFVVINQKGIDPPSLDLLARAGIIALRRAKRRNMERLVLACGGEAVNSVDELTEDCLGWAGLVYEHVLGEEKYTFVENVKNPRSCTILIKGPNDHTIAQIKDAVRDGLRSVKNTVEDEAVVLGAGAFEVAAKKHLIDNVKKTVKGRAQLGVEAFAEALLVIPKTLAENSGLDTQDVIVSLQNEHDRGLVVGLNHHSGDPIDPQMEGIFDNYSVKRQIINSGPIIASQLLLVDEVIRAGRNMRKPT

SEQ ID NO: 17331 - protein, 515 aa, Zea mays subsp. mays
  peptide (1)..(515): Ceres Seq. ID no. 12417315
  misc_feature (9)..(509): Pfam Name: TCP-1/cpn60 chaperonin family Pfam Description: TCP-1/cpn60 chaperonin family
  misc_feature (1)..(513): Homolog of NCBI NO: 14517632 NR Description: acute morphine dependence related protein 2 [Homo
  misc_feature (1)..(513): Homolog of NCBI NO: 6094438 NR Description: T-complex protein 1, zeta subunit (TCP-1-zeta)
  misc_feature (1)..(513): Homolog of NCBI NO: 4502643 NR Description: chaperonin containing TCP1, subunit 6A (zeta 1)
  misc_feature (1)..(513): Homolog of NCBI NO: 28277547 NR Description: Similar to chaperonin containing TCP1, subunit 6A
  misc_feature (1)..(513): Homolog of NCBI NO: 6753324 NR Description: chaperonin subunit 6a (zeta); chaperonin
  misc_feature (1)..(515): Homolog of NCBI NO: 11277144 NR Description: TCP-1 chaperonin-like protein - Arabidopsis
  misc_feature (1)..(515): Homolog of NCBI NO: 30685661 NR Description: chaperonin, putative [Arabidopsis thaliana]
  misc_feature (1)..(515): Homolog of NCBI NO: 21536971 NR Description: putative chaperonin [Arabidopsis thaliana]
  misc_feature (1)..(515): Homolog of NCBI NO: 14423532 NR Description: putative chaperonin [Arabidopsis thaliana]
  misc_feature (1)..(515): Homolog of NCBI NO: 15232923 NR Description: putative chaperonin
MNINAAKGLQDVLKTNLGPKGTIKMLVGGAGDLKLTKDGNTLLKEMQIQNPTAIMIARTAVAQDDTSGDGTTSTVLFIGELMKQSERCIDEGTHPRFLVDGFDVAKRACLDFLDKFKTPVVTGDEPDRDTLKMIARTTLRTKLYEGLADQLTDIVVNAVLCIRKPDEPIDLFMVEIMHMRHKFDVDTRLVEGLVLDHGSRHPDMKRRAENCYILTCNVSLEYEKSEINAGFFYSNAEQREKMVAAERRQVDERVKQIIELKNKVCAGGDKNFVVINQKGIDPPSLDLLARAGIIALRRAKRRNMERLVLACGGEAVNSVDELTEDCLGWAGLVYEHVLGEEKYTFVENVKNPRSCTILIKGPNDHTIAQIKDAVRDGLRSVKNTVEDEAVVLGAGAFEVAAKKHLIDNVKKTVKGRAQLGVEAFAEALLVIPKTLAENSGLDTQDVIVSLQNEHDRGLVVGLNHHSGDPIDPQMEGIFDNYSVKRQIINSGPIIASQLLLVDEVIRAGRNMRKPT

SEQ ID NO: 17332 - DNA, 887 bp, Zea mays subsp. mays
  misc_feature (1)..(887): Ceres Seq. ID no. 12367194
  misc_feature: MA Experiment ID: 108523 Result: Up-regulated in Transcription
  misc_feature: MA Experiment 108523 PARAMETER Experiment Name: Zm_42deg_Heat_P Parameter: Age (day) Value: 8
  misc_feature: MA Experiment 108523 PARAMETER Experiment Name: Zm_42deg_Heat_P Parameter: Organism Value: Zea mays
  misc_feature: MA Experiment 108523 PARAMETER Experiment Name: Zm_42deg_Heat_P Parameter: Plant Line Value: 35A19
  misc_feature: MA Experiment 108523 PARAMETER Experiment Name: Zm_42deg_Heat_P Parameter: Temperature (deg C) Value: 42 vs. 22
  misc_feature: MA Experiment 108523 PARAMETER Experiment Name: Zm_42deg_Heat_P Parameter: Timepoint (hr) Value: 6
  misc_feature: MA Experiment 108523 PARAMETER Experiment Name: Zm_42deg_Heat_P Parameter: Tissue Value: Aerial
  misc_feature: MA Experiment ID: 108527 Result: Up-regulated in Transcription
  misc_feature: MA Experiment 108527 PARAMETER Experiment Name: Zm_5mM_NO_P Parameter: Age (day) Value: 8
  misc_feature: MA Experiment 108527 PARAMETER Experiment Name: Zm_5mM_NO_P Parameter: Organism Value: Zea mays
  misc_feature: MA Experiment 108527 PARAMETER Experiment Name: Zm_5mM_NO_P Parameter: Plant Line Value: 35A19
  misc_feature: MA Experiment 108527 PARAMETER Experiment Name: Zm_5mM_NO_P Parameter: Timepoint (hr) Value: 6
  misc_feature: MA Experiment 108527 PARAMETER Experiment Name: Zm_5mM_NO_P Parameter: Tissue Value: Aerial
  misc_feature: MA Experiment 108527 PARAMETER Experiment Name: Zm_5mM_NO_P Parameter: Treatment Value: 5mM NO vs. No Treatment
  misc_feature: MA Experiment ID: 108543 Result: Down-regulated in Transcription
  misc_feature: MA Experiment ID: 20000477 Result: Up-regulated in Transcription
  misc_feature: MA Experiment 20000477 PARAMETER Experiment Name: Zm_5mM_SA_P Parameter: Age (day) Value: 10
  misc_feature: MA Experiment 20000477 PARAMETER Experiment Name: Zm_5mM_SA_P Parameter: Organism Value: Zea mays
  misc_feature: MA Experiment 20000477 PARAMETER Experiment Name: Zm_5mM_SA_P Parameter: Plant Line Value: 35A19
  misc_feature: MA Experiment 20000477 PARAMETER Experiment Name: Zm_5mM_SA_P Parameter: Timepoint (hr) Value: 48
  misc_feature: MA Experiment 20000477 PARAMETER Experiment Name: Zm_5mM_SA_P Parameter: Tissue Value: Aerial
  misc_feature: MA Experiment 20000477 PARAMETER Experiment Name: Zm_5mM_SA_P Parameter: Treatment Value: 5mM SA vs. No Treatment
  misc_feature: MA Experiment ID: 20000478 Result: Up-regulated in Transcription
  misc_feature: MA Experiment 20000478 PARAMETER Experiment Name: Zm_5mM_SA_P Parameter: Age (day) Value: 11
  misc_feature: MA Experiment 20000478 PARAMETER Experiment Name: Zm_5mM_SA_P Parameter: Organism Value: Zea mays
  misc_feature: MA Experiment 20000478 PARAMETER Experiment Name: Zm_5mM_SA_P Parameter: Plant Line Value: 35A19
  misc_feature: MA Experiment 20000478 PARAMETER Experiment Name: Zm_5mM_SA_P Parameter: Timepoint (hr) Value: 72
  misc_feature: MA Experiment 20000478 PARAMETER Experiment Name: Zm_5mM_SA_P Parameter: Tissue Value: Aerial
  misc_feature: MA Experiment 20000478 PARAMETER Experiment Name: Zm_5mM_SA_P Parameter: Treatment Value: 5mM SA vs. No Treatment
  misc_feature: MA Experiment ID: 20000487 Result: Up-regulated in Transcription
  misc_feature: MA Experiment 20000487 PARAMETER Experiment Name: Zm_50mM_NH4NO3_L_to_H_P Parameter: Organism Value: Zea mays
  misc_feature: MA Experiment 20000487 PARAMETER Experiment Name: Zm_50mM_NH4NO3_L_to_H_P Parameter: Timepoint (hr) Value: 4
  misc_feature: MA Experiment 20000487 PARAMETER Experiment Name: Zm_50mM_NH4NO3_L_to_H_P Parameter: Tissue Value: Leaves
  misc_feature: MA Experiment 20000487 PARAMETER Experiment Name: Zm_50mM_NH4NO3_L_to_H_P Parameter: Treatment Value: 50mM NH4NO3 vs. 100mM Mannitol
gtacagacagccgccgccgccggcggtggttcacaatcacaagccaccgctactccaccaaaccgcacggaggcggaacccaaattccaacccgactcctccagccaacagcccaagcgaagcgagggcccttgagctcccctcccgcatgacgtccccatggtgcctctcggcaccgcccgccgccccgcccgtggcggctgcgcccggcgccctcggcttctccgcgtctgcctccaccctcgcgcgtgtgccggttcccggaagtaggcggcgcaggtggaacgcgctcgtggtctgcgcggcccccgatgaggagaagattacgaagcggtcgcccctggatttccccatcgaatgggagagaccaaaacctgggaggagacctgatatcttccctaagtttagcccaatgaagacaccattaccgcatccattgccagctgatgatcctctggatgatgatgaagaggaagaggaagaacaagcaccacctcaggaggagccacaagaggacgatccagacaaggaagaacctgaggaagatgacccagataagccaaccgagtaattttcgattggcttgaacagtgatagattaggcaatggggaaaaaatgtgctacgtctttggagcgcgcaagagatctcagttctatttgaactgccggcttatataggctctagatgcataagtttgttatatgacctctgagcttttctaaagctatgaaagttctgtttcacggattacagattacagtgcgatatctgtgatgacatgtattctcactttttctatgttttgagtaagcaacgtgtacattgcaaaacctgtatttggtgtagttgcatcattgatttgtgaaacggatactgagatttttg

SEQ ID NO: 17333 - protein, 189 aa, Zea mays subsp. mays
  peptide (1)..(189): Ceres Seq. ID no. 12367195
  misc_feature (102)..(185): Homolog of NCBI NO: 26452533 NR Description: unknown protein [Arabidopsis thaliana]
  misc_feature (71)..(186): Homolog of NCBI NO: 18398354 NR Description: expressed protein
  misc_feature (44)..(185): Homolog of NCBI NO: 21553725 NR Description: unknown [Arabidopsis thaliana]
  misc_feature (44)..(185): Homolog of NCBI NO: 18404214 NR Description: Expressed protein
YRQPPPPAVVHNHKPPLLHQTARRRNPNSNPTPPANSPSEARALELPSRMTSPWCLSAPPAAPPVAAAPGALGFSASASTLARVPVPGSRRRRWNALVVCAAPDEEKITKRSPLDFPIEWERPKPGRRPDIFPKFSPMKTPLPHPLPADDPLDDDEEEEEEQAPPQEEPQEDDPDKEEPEEDDPDKPTE

SEQ ID NO: 17334 - protein, 140 aa, Zea mays subsp. mays
  peptide (1)..(140): Ceres Seq. ID no. 12367196
  misc_feature (53)..(136): Homolog of NCBI NO: 26452533 NR Description: unknown protein [Arabidopsis thaliana]
  misc_feature (22)..(137): Homolog of NCBI NO: 18398354 NR Description: expressed protein
  misc_feature (1)..(136): Homolog of NCBI NO: 21553725 NR Description: unknown [Arabidopsis thaliana]
  misc_feature (1)..(136): Homolog of NCBI NO: 18404214 NR Description: Expressed protein
MTSPWCLSAPPAAPPVAAAPGALGFSASASTLARVPVPGSRRRRWNALVVCAAPDEEKITKRSPLDFPIEWERPKPGRRPDIFPKFSPMKTPLPHPLPADDPLDDDEEEEEEQAPPQEEPQEDDPDKEEPEEDDPDKPTE

SEQ ID NO: 17335 - DNA, 490 bp, Zea mays subsp. mays
  misc_feature (1)..(490): Ceres Seq. ID no. 13577813
  misc_feature: MA Experiment ID: 108544 Result: Up-regulated in Transcription
  misc_feature: MA Experiment ID: 108597 Result: Up-regulated in Transcription
  misc_feature: MA Experiment 108597 PARAMETER Experiment Name: Zm_100uM_ABA_P Parameter: Age (day) Value: 9
  misc_feature: MA Experiment 108597 PARAMETER Experiment Name: Zm_100uM_ABA_P Parameter: Organism Value: Zea mays
  misc_feature: MA Experiment 108597 PARAMETER Experiment Name: Zm_100uM_ABA_P Parameter: Plant Line Value: 35A19
  misc_feature: MA Experiment 108597 PARAMETER Experiment Name: Zm_100uM_ABA_P Parameter: Timepoint (hr) Value: 24
  misc_feature: MA Experiment 108597 PARAMETER Experiment Name: Zm_100uM_ABA_P Parameter: Tissue Value: Aerial
  misc_feature: MA Experiment 108597 PARAMETER Experiment Name: Zm_100uM_ABA_P Parameter: Treatment Value: 100uM ABA vs. No Treatment
  misc_feature: MA Experiment ID: 20000477 Result: Up-regulated in Transcription
  misc_feature: MA Experiment 20000477 PARAMETER Experiment Name: Zm_5mM_SA_P Parameter: Age (day) Value: 10
  misc_feature: MA Experiment 20000477 PARAMETER Experiment Name: Zm_5mM_SA_P Parameter: Organism Value: Zea mays
  misc_feature: MA Experiment 20000477 PARAMETER Experiment Name: Zm_5mM_SA_P Parameter: Plant Line Value: 35A19
  misc_feature: MA Experiment 20000477 PARAMETER Experiment Name: Zm_5mM_SA_P Parameter: Timepoint (hr) Value: 48
  misc_feature: MA Experiment 20000477 PARAMETER Experiment Name: Zm_5mM_SA_P Parameter: Tissue Value: Aerial
  misc_feature: MA Experiment 20000477 PARAMETER Experiment Name: Zm_5mM_SA_P Parameter: Treatment Value: 5mM SA vs. No Treatment
  misc_feature: MA Experiment ID: 20000478 Result: Up-regulated in Transcription
  misc_feature: MA Experiment 20000478 PARAMETER Experiment Name: Zm_5mM_SA_P Parameter: Age (day) Value: 11
  misc_feature: MA Experiment 20000478 PARAMETER Experiment Name: Zm_5mM_SA_P Parameter: Organism Value: Zea mays
  misc_feature: MA Experiment 20000478 PARAMETER Experiment Name: Zm_5mM_SA_P Parameter: Plant Line Value: 35A19
  misc_feature: MA Experiment 20000478 PARAMETER Experiment Name: Zm_5mM_SA_P Parameter: Timepoint (hr) Value: 72
  misc_feature: MA Experiment 20000478 PARAMETER Experiment Name: Zm_5mM_SA_P Parameter: Tissue Value: Aerial
  misc_feature: MA Experiment 20000478 PARAMETER Experiment Name: Zm_5mM_SA_P Parameter: Treatment Value: 5mM SA vs. No Treatment
acgctctcctctccagtctccaccaacgtcctccccccaccgcaccgcaccgcaccgcaccgccctccccaccccgcgcgtgcgccgccgccgcgagatccggggcgcgatgtggcgcagctgcgtctcgcggggtctctccagggccaaggcctccgcctccaggctcctctccacggcatcgtcgtcctacacggtggtggaccacacctacgacgcggtcgtggtgggggccggcggcgcggggctccgggcggccatcggcctctccgagcacggcttcaacaccgcgtgcatcaccaagctcttccccacgcgctcgcacaccgtcgcagcacaggnaggcataaatgccgcacttggaaacatgagtgaagatgattggaggtggcacatgtatgacactgtgaagggaagcgattggctcggtgaccaggattctattcagtatatgtgcagagaagcacaaaaagctgttatagagcttgag

SEQ ID NO: 17336 - protein, 163 aa, Zea mays subsp. mays
  peptide (1)..(163): Ceres Seq. ID no. 13577814
  misc_feature (50)..(162): Homolog of NCBI NO: 28703813 NR Description: Similar to succinate dehydrogenase complex,
  misc_feature (50)..(162): Homolog of NCBI NO: 5759173 NR Description: succinate dehydrogenase flavoprotein subunit
  misc_feature (50)..(162): Homolog of NCBI NO: 23574788 NR Description: succinate dehydrogenase flavoprotein subunit
  misc_feature (50)..(162): Homolog of NCBI NO: 4759080 NR Description: succinate dehydrogenase complex, subunit A,
  misc_feature (50)..(162): Homolog of NCBI NO: 1169337 NR Description: Succinate dehydrogenase
  misc_feature (29)..(162): Homolog of NCBI NO: 18426858 NR Description: succinate dehydrogenase complex, subunit A,
  misc_feature (40)..(162): Homolog of NCBI NO: 19115231 NR Description: probable succinate dehydrogenase flavoprotein
  misc_feature (29)..(162): Homolog of NCBI NO: 15224174 NR Description: succinate dehydrogenase
  misc_feature (37)..(162): Homolog of NCBI NO: 15240075 NR Description: succinate dehydrogenase
  misc_feature (37)..(162): Homolog of NCBI NO: 34394418 NR Description: putative succinate dehydrogenase flavoprotein
  misc_feature (114)..(114): Xaa is any aa, unknown or other
RSPLQSPPTSSPHRTAPHRTALPTPRVRRRREIRGAMWRSCVSRGLSRAKASASRLLSTASSSYTVVDHTYDAVVVGAGGAGLRAAIGLSEHGFNTACITKLFPTRSHTVAAQXGINAALGNMSEDDWRWHMYDTVKGSDWLGDQDSIQYMCREAQKAVIELE

SEQ ID NO: 17337 - protein, 127 aa, Zea mays subsp. mays
  peptide (1)..(127): Ceres Seq. ID no. 13577815
  misc_feature (14)..(126): Homolog of NCBI NO: 28703813 NR Description: Similar to succinate dehydrogenase complex,
  misc_feature (14)..(126): Homolog of NCBI NO: 4759080 NR Description: succinate dehydrogenase complex, subunit A,
  misc_feature (14)..(126): Homolog of NCBI NO: 5759173 NR Description: succinate dehydrogenase flavoprotein subunit
  misc_feature (14)..(126): Homolog of NCBI NO: 23574788 NR Description: succinate dehydrogenase flavoprotein subunit
  misc_feature (14)..(126): Homolog of NCBI NO: 1169337 NR Description: Succinate dehydrogenase
  misc_feature (1)..(126): Homolog of NCBI NO: 18426858 NR Description: succinate dehydrogenase complex, subunit A,
  misc_feature (4)..(126): Homolog of NCBI NO: 19115231 NR Description: probable succinate dehydrogenase flavoprotein
  misc_feature (1)..(126): Homolog of NCBI NO: 15224174 NR Description: succinate dehydrogenase
  misc_feature (1)..(126): Homolog of NCBI NO: 15240075 NR Description: succinate dehydrogenase
  misc_feature (1)..(126): Homolog of NCBI NO: 34394418 NR Description: putative succinate dehydrogenase flavoprotein
  misc_feature (78)..(78): Xaa is any aa, unknown or other
MWRSCVSRGLSRAKASASRLLSTASSSYTVVDHTYDAVVVGAGGAGLRAAIGLSEHGFNTACITKLFPTRSHTVAAQXGINAALGNMSEDDWRWHMYDTVKGSDWLGDQDSIQYMCREAQKAVIELE

SEQ ID NO: 17338 - protein, 124 aa, Zea mays subsp. mays
  peptide (1)..(124): Ceres Seq. ID no. 13577816
  misc_feature (114)..(114): Xaa is any aa, unknown or other
TLSSPVSTNVLPPPHRTAPHRPPHPARAPPPRDPGRDVAQLRLAGSLQGQGLRLQAPLHGIVVLHGGGPHLRRGRGGGRRRGAPGGHRPLRARLQHRVHHQALPHALAHRRSTXRHKCRTWKHE

SEQ ID NO: 17339 - DNA, 1067 bp, Zea mays subsp. mays
  misc_feature (1)..(1067): Ceres Seq. ID no. 14305435
  misc_feature: MA Experiment ID: 108528 Result: Up-regulated in Transcription
  misc_feature: MA Experiment 108528 PARAMETER Experiment Name: Zm_Imbibed_Seeds_P Parameter: Age (day) Value: 5 vs. 2
  misc_feature: MA Experiment 108528 PARAMETER Experiment Name: Zm_Imbibed_Seeds_P Parameter: Organism Value: Zea mays
  misc_feature: MA Experiment 108528 PARAMETER Experiment Name: Zm_Imbibed_Seeds_P Parameter: Plant Line Value: 35A19
  misc_feature: MA Experiment 108528 PARAMETER Experiment Name: Zm_Imbibed_Seeds_P Parameter: Tissue Value: Aerial vs. Embryo
  misc_feature: MA Experiment ID: 108545 Result: Up-regulated in Transcription
  misc_feature: MA Experiment 108545 PARAMETER Experiment Name: Zm_Imbibed_Seeds_P Parameter: Age (day) Value: 3 vs. 2
  misc_feature: MA Experiment 108545 PARAMETER Experiment Name: Zm_Imbibed_Seeds_P Parameter: Organism Value: Zea mays
  misc_feature: MA Experiment 108545 PARAMETER Experiment Name: Zm_Imbibed_Seeds_P Parameter: Plant Line Value: 35A19
  misc_feature: MA Experiment 108545 PARAMETER Experiment Name: Zm_Imbibed_Seeds_P Parameter: Tissue Value: Aerial vs. Embryo
  misc_feature: MA Experiment ID: 108547 Result: Up-regulated in Transcription
  misc_feature: MA Experiment 108547 PARAMETER Experiment Name: Zm_Imbibed_Seeds_P Parameter: Age (day) Value: 4 vs. 2
  misc_feature: MA Experiment 108547 PARAMETER Experiment Name: Zm_Imbibed_Seeds_P Parameter: Organism Value: Zea mays
  misc_feature: MA Experiment 108547 PARAMETER Experiment Name: Zm_Imbibed_Seeds_P Parameter: Plant Line Value: 35A19
  misc_feature: MA Experiment 108547 PARAMETER Experiment Name: Zm_Imbibed_Seeds_P Parameter: Tissue Value: Aerial vs. Embryo
aaagatttgatttttttttctcggggaggagccggagtccgagcagcagtggcggctggagggaggagatcctgatctgttgtcgcagcggggaggggaggaccggaggaggaagatggctgcgcaggagcaggagcaggagaagcagcaggcgaagacgagcaccacgagctcgctgccctccagcagcgagcgctcctccagctccgctcgcaacaacctcacggaaggaggggcggagagcgacgaggagatacggcgggtgccggagatgggcggcgcgtcggcgtcggcctcgtcgggcgccggcgcggatgagcgtcccaagggggaggacggcaagcaggggcaggtggcggcgggggcgcagcctccggcgggcgggaagaagcgcgggcgcaccgcgggggacaaggagcagaagctcttgcagtatatgatgctatgaggtatgttaaagttcctattttcactctgtgtgtcggtaatgcatggggagaagctgctttactcttagctgctggcgctaaaggtaaccgtgccgcacttccatcatcgacaataatgataaaacagccaattggtcgctttcaaggtcaggcaacagacgttgacattgcaagaaaagagattcgaaatgtcaagatagaaatggttaagctgctggcaagacacatcggtaaaccaatggaagagattgctcgggacatcaggcgtcctaaatactttagccccagtgaagctgtggattatggcatcatcgacaaggtgatatacaacgagaaaatccaggaagatggcggtgttgtgtcagaactcaaaagatcaaatttgatatagtgttctttttccacaagtagacacgtctttgtatgtttagtggtcattcacgtgcctttgagtattgagtagttaccactcgatcactcattagctggttgtagaggcgtagagcacatagccaatgcattgaacaagcatttccttcccccctctgccgtttcaacgctgtattgcccttacccaacgggcgtgctgaaagatgaattttggtaggttgttgaaac

SEQ ID NO: 17340 - protein, 145 aa, Zea mays subsp. mays
  peptide (1)..(145): Ceres Seq. ID no. 14305436
  misc_feature (32)..(97): Pfam Name: Sperm histone P2 Pfam Description: Sperm histone P2
RFDFFFSGRSRSPSSSGGWREEILICCRSGEGRTGGGRWLRRSRSRRSSRRRRAPRARCPPAASAPPAPLATTSRKEGRRATRRYGGCRRWAARRRRPRRAPARMSVPRGRTASRGRWRRGRSLRRAGRSAGAPRGTRSRSSCSI

SEQ ID NO: 17341 - protein, 131 aa, Zea mays subsp. mays
  peptide (1)..(131): Ceres Seq. ID no. 14305437
  misc_feature (1)..(113): Pfam Name: Clp protease Pfam Description: Clp protease
  misc_feature (1)..(109): Homolog of NCBI NO: 16123319 NR Description: ATP-dependent Clp protease proteolytic subunit
  misc_feature (1)..(114): Homolog of NCBI NO: 33866182 NR Description: ATP-dependent Clp protease proteolytic subunit 4
  misc_feature (1)..(114): Homolog of NCBI NO: 26989024 NR Description: ATP-dependent Clp protease, proteolytic subunit
  misc_feature (1)..(114): Homolog of NCBI NO: 33862588 NR Description: Clp protease proteolytic subunit
  misc_feature (1)..(114): Homolog of NCBI NO: 33861869 NR Description: Clp protease proteolytic subunit
  misc_feature (1)..(109): Homolog of NCBI NO: 2493738 NR Description: ATP-dependent Clp protease proteolytic subunit
  misc_feature (1)..(109): Homolog of NCBI NO: 37527729 NR Description: ATP-dependent proteolytic subunit of clpA-clpP
  misc_feature (1)..(110): Homolog of NCBI NO: 15606541 NR Description: ATP-dependent Clp protease proteolytic subunit
  misc_feature (1)..(131): Homolog of NCBI NO: 19698857 NR Description: unknown protein [Arabidopsis thaliana]
  misc_feature (1)..(131): Homolog of NCBI NO: 18414804 NR Description: ATP-dependent Clp protease proteolytic subunit
MRYVKVPIFTLCVGNAWGEAALLLAAGAKGNRAALPSSTIMIKQPIGRFQGQATDVDIARKEIRNVKIEMVKLLARHIGKPMEEIARDIRRPKYFSPSEAVDYGIIDKVIYNEKIQEDGGVVSELKRSNLI

SEQ ID NO: 17342 - protein, 110 aa, Zea mays subsp. mays
  peptide (1)..(110): Ceres Seq. ID no. 14305438
  misc_feature (1)..(109): Homolog of NCBI NO: 34910258 NR Description: putative THY5 protein [Oryza sativa (japonica
MAAQEQEQEKQQAKTSTTSSLPSSSERSSSSARNNLTEGGAESDEEIRRVPEMGGASASASSGAGADERPKGEDGKQGQVAAGAQPPAGGKKRGRTAGDKEQKLLQYMML

SEQ ID NO: 17343 - DNA, 2286 bp, Zea mays subsp. mays
  misc_feature (1)..(2286): Ceres Seq. ID no. 12366176
  misc_feature: MA Experiment ID: 108535 Result: Up-regulated in Transcription
  misc_feature: MA Experiment 108535 PARAMETER Experiment Name: Zm_Meristem_P Parameter: Age (day) Value: 8
  misc_feature: MA Experiment 108535 PARAMETER Experiment Name: Zm_Meristem_P Parameter: Organism Value: Zea mays
  misc_feature: MA Experiment 108535 PARAMETER Experiment Name: Zm_Meristem_P Parameter: Plant Line Value: 35A19
  misc_feature: MA Experiment 108535 PARAMETER Experiment Name: Zm_Meristem_P Parameter: Tissue Value: Root Meristem vs. Above Root Meristem
  misc_feature: MA Experiment ID: 108544 Result: Down-regulated in Transcription
  misc_feature: MA Experiment ID: 108547 Result: Down-regulated in Transcription
  misc_feature: MA Experiment 108547 PARAMETER Experiment Name: Zm_Imbibed_Seeds_P Parameter: Age (day) Value: 4 vs. 2
  misc_feature: MA Experiment 108547 PARAMETER Experiment Name: Zm_Imbibed_Seeds_P Parameter: Organism Value: Zea mays
  misc_feature: MA Experiment 108547 PARAMETER Experiment Name: Zm_Imbibed_Seeds_P Parameter: Plant Line Value: 35A19
  misc_feature: MA Experiment 108547 PARAMETER Experiment Name: Zm_Imbibed_Seeds_P Parameter: Tissue Value: Aerial vs. Embryo
gcacgagaccattacctagaacatcctaatcgaaaaactgccccttccagtctcgccgtcgccggagataggccgccgccgccagccggaacgcaacaccgcagcggttacctgcagcggacggcaggaacctagtcctccactgctctgcctaccctacaatcgggatctcgcgggcttcattaggggggaaaatcgaccagcgagcgagtgcaagaagctcctgttcgatcgatctcgggagctccgatactgcgcgcaatcccaaatttgacacagagtcacagcaatgtcagtgagccatgccgacgagcacgagatatctctgtgcgaccccagctccgaggacgaccggcggcgccggaagatcgggtccctgccgctcaaggccatccacgcgctacggaagaagcgcgcccggcgtcgcgtcactgacttccggttccccgcggccatctccatcgaggacgtccgcgacgccgaggaggagcgcgccgtcgccgccttccgcgaccgtctcgccgcgcaccgcctcctccccgacaagcacgacgactaccacatgatgctgaggtttctgaaagccaggaagtttgattccgacaaggcaatgcaaatgtggtcagagatgctgaggtggaggaaagagtttggtaccgacacaatcttggaggactttgagttcgacgagctcaacgatgtactccactactatcctcagggcctaccatggcgtcgaccgtgaaggccggcccgtgtacattgagaggctcggcaaagttgatccgaacaagctcatgcagatcacctcggtggatcgctacatcaagtaccatgtgcaggagttcgagagggcattcagggagaggttccctgcctgcacactgtcagccaagagacatattgactccactaccaccatactggacgtccatggtgtggggttcaagaatttctcaaagaccgcaagggagcttgtccaacgtatgcagagaatagacagtgactactatcccgagacgctacatcagatgtatgttgtgaatgcaggcagtgggtttaagttgatctggaacagtgttaagggattcctagacccaaaaacttcttccaagatccatgttcttggttccaactaccagagcagacttatcgaagttattgactcaagtgaattgccaaaatttcttggcggatcatgcacatgcagtgagaagggtggttgcctcaggtctaacaggggtccatggaatgaccctgtcattatgaagctaatacacagtatggaaggtggtagtactagagaaataaagcaagtttctgacggggacgaaagaagtggctcttccctaagggcagaaaacctgaagggcatgcttagtgacatatcaaatgctgaatctgagtcggatgttgatgacgttggtttaacagttgtccaaaagagtacggaccacagtttactaaccccagttcatgaagaagtcaaggggtcagatacttcgatattttgtagttctagcagtaagcatctcctagatacaactcctcgatctcctcaggccacccctcaaatggagatgcccattcagttgacttgccgtaaatattttcctacctttgggtggctaaataatttagggaatgcttacattagtttgcatggtacatccgctggaaggactctggaaaaccttgctactggactgatcacgctcttgatcaggatatcatctttcttccacctttccgtctaccggcaagaaagatatctagaaaccgtccaaccctgtgccgcagcacaggaaccagaacctcaaagggaagaggacatgagtgcttgtttacgacgcctcaagaagctcgagtcactgtgtgatcacctcatgagcaaacctccggatatgccgaaggagaaagaacttgtattgatgcagtccttcgatcggataaaatccctcgaggctgaactggaggcgacgaaaaacgcgctgcaggctgcggtggaaaagcagatggaactggtggagacggtagaatctctgcagcaccaaacgtccagcgttaggaggagattttgctgttcataggagtaggattgtcgtcgtcgcgccgaagctgtctgggttagcaaataatgaacctgacgctgcccttggcatacgccaaacctgtcgctggctcgacactgtatgcgcggatgcgtgtaaaatcgatcagttttttttgtagctacactctggcttctgtgatctccagagcctgcaaaatgtcaaagctttcgcc

SEQ ID NO: 17344 - protein, 463 aa, Zea mays subsp. mays
  peptide (1)..(463): Ceres Seq. ID no. 12366177
  misc_feature (8)..(191): Pfam Name: CRAL/TRIO domain Pfam Description: CRAL/TRIO domain
  misc_feature (337)..(461): Homolog of NCBI NO: 38423984 NR Description: phosphatidylinositol transfer-like
  misc_feature (371)..(461): Homolog of NCBI NO: 15226574 NR Description: putative phosphatidylinositol/phosphatidylcholine
  misc_feature (324)..(455): Homolog of NCBI NO: 11994666 NR Description: phosphatidylinositol/phosphatidylcholine transfer
  misc_feature (10)..(462): Homolog of NCBI NO: 7487350 NR Description: hypothetical protein T22F8.70 - Arabidopsis
  misc_feature (10)..(462): Homolog of NCBI NO: 18420392 NR Description: SEC14 - like protein
  misc_feature (8)..(191): Homolog of NCBI NO: 5257268 NR Description: Similar to putative SEC14 cytosolic factor.
  misc_feature (10)..(432): Homolog of NCBI NO: 14335006 NR Description: AT4g39170/T22F8_70 [Arabidopsis thaliana]
  misc_feature (10)..(222): Homolog of NCBI NO: 11994666 NR Description: phosphatidylinositol/phosphatidylcholine transfer
  misc_feature (8)..(262): Homolog of NCBI NO: 15226574 NR Description: putative phosphatidylinositol/phosphatidylcholine
  misc_feature (8)..(273): Homolog of NCBI NO: 38423984 NR Description: phosphatidylinositol transfer-like
MYSTTILRAYHGVDREGRPVYIERLGKVDPNKLMQITSVDRYIKYHVQEFERAFRERFPACTLSAKRHIDSTTTILDVHGVGFKNFSKTARELVQRMQRIDSDYYPETLHQMYVVNAGSGFKLIWNSVKGFLDPKTSSKIHVLGSNYQSRLIEVIDSSELPKFLGGSCTCSEKGGCLRSNRGPWNDPVIMKLIHSMEGGSTREIKQVSDGDERSGSSLRAENLKGMLSDISNAESESDVDDVGLTVVQKSTDHSLLTPVHEEVKGSDTSIFCSSSSKHLLDTTPRSPQATPQMEMPIQLTCRKYFPTFGWLNNLGNAYISLHGTSAGRTLENLATGLITLLIRISSFFHLSVYRQERYLETVQPCAAAQEPEPQREEDMSACLRRLKKLESLCDHLMSKPPDMPKEKELVLMQSFDRIKSLEAELEATKNALQAAVEKQMELVETVESLQHQTSSVRRRFCCS

SEQ ID NO: 17345 - protein, 430 aa, Zea mays subsp. mays
  peptide (1)..(430): Ceres Seq. ID no. 12366178
  misc_feature (1)..(158): Pfam Name: CRAL/TRIO domain Pfam Description: CRAL/TRIO domain
  misc_feature (338)..(428): Homolog of NCBI NO: 15226574 NR Description: putative phosphatidylinositol/phosphatidylcholine
  misc_feature (1)..(229): Homolog of NCBI NO: 15226574 NR Description: putative phosphatidylinositol/phosphatidylcholine
  misc_feature (291)..(422): Homolog of NCBI NO: 11994666 NR Description: phosphatidylinositol/phosphatidylcholine transfer
  misc_feature (1)..(189): Homolog of NCBI NO: 11994666 NR Description: phosphatidylinositol/phosphatidylcholine transfer
  misc_feature (1)..(429): Homolog of NCBI NO: 7487350 NR Description: hypothetical protein T22F8.70 - Arabidopsis
  misc_feature (1)..(399): Homolog of NCBI NO: 14335006 NR Description: AT4g39170/T22F8_70 [Arabidopsis thaliana]
  misc_feature (1)..(429): Homolog of NCBI NO: 18420392 NR Description: SEC14 - like protein
  misc_feature (1)..(158): Homolog of NCBI NO: 5257268 NR Description: Similar to putative SEC14 cytosolic factor.
  misc_feature (304)..(428): Homolog of NCBI NO: 38423984 NR Description: phosphatidylinositol transfer-like
  misc_feature (1)..(240): Homolog of NCBI NO: 38423984 NR Description: phosphatidylinositol transfer-like
MQITSVDRYIKYHVQEFERAFRERFPACTLSAKRHIDSTTTILDVHGVGFKNFSKTARELVQRMQRIDSDYYPETLHQMYVVNAGSGFKLIWNSVKGFLDPKTSSKIHVLGSNYQSRLIEVIDSSELPKFLGGSCTCSEKGGCLRSNRGPWNDPVIMKLIHSMEGGSTREIKQVSDGDERSGSSLRAENLKGMLSDISNAESESDVDDVGLTVVQKSTDHSLLTPVHEEVKGSDTSIFCSSSSKHLLDTTPRSPQATPQMEMPIQLTCRKYFPTFGWLNNLGNAYISLHGTSAGRTLENLATGLITLLIRISSFFHLSVYRQERYLETVQPCAAAQEPEPQREEDMSACLRRLKKLESLCDHLMSKPPDMPKEKELVLMQSFDRIKSLEAELEATKNALQAAVEKQMELVETVESLQHQTSSVRRRFCCS

SEQ ID NO: 17346 - protein, 367 aa, Zea mays subsp. mays
  peptide (1)..(367): Ceres Seq. ID no. 12366179
  misc_feature (1)..(95): Pfam Name: CRAL/TRIO domain Pfam Description: CRAL/TRIO domain
  misc_feature (275)..(365): Homolog of NCBI NO: 15226574 NR Description: putative phosphatidylinositol/phosphatidylcholine
  misc_feature (1)..(166): Homolog of NCBI NO: 15226574 NR Description: putative phosphatidylinositol/phosphatidylcholine
  misc_feature (228)..(359): Homolog of NCBI NO: 11994666 NR Description: phosphatidylinositol/phosphatidylcholine transfer
  misc_feature (1)..(126): Homolog of NCBI NO: 11994666 NR Description: phosphatidylinositol/phosphatidylcholine transfer
  misc_feature (1)..(366): Homolog of NCBI NO: 7487350 NR Description: hypothetical protein T22F8.70 - Arabidopsis
  misc_feature (1)..(336): Homolog of NCBI NO: 14335006 NR Description: AT4g39170/T22F8_70 [Arabidopsis thaliana]
  misc_feature (1)..(366): Homolog of NCBI NO: 18420392 NR Description: SEC14 - like protein
  misc_feature (1)..(95): Homolog of NCBI NO: 5257268 NR Description: Similar to putative SEC14 cytosolic factor.
  misc_feature (241)..(365): Homolog of NCBI NO: 38423984 NR Description: phosphatidylinositol transfer-like
  misc_feature (1)..(177): Homolog of NCBI NO: 38423984 NR Description: phosphatidylinositol transfer-like
MQRIDSDYYPETLHQMYVVNAGSGFKLIWNSVKGFLDPKTSSKIHVLGSNYQSRLIEVIDSSELPKFLGGSCTCSEKGGCLRSNRGPWNDPVIMKLIHSMEGGSTREIKQVSDGDERSGSSLRAENLKGMLSDISNAESESDVDDVGLTVVQKSTDHSLLTPVHEEVKGSDTSIFCSSSSKHLLDTTPRSPQATPQMEMPIQLTCRKYFPTFGWLNNLGNAYISLHGTSAGRTLENLATGLITLLIRISSFFHLSVYRQERYLETVQPCAAAQEPEPQREEDMSACLRRLKKLESLCDHLMSKPPDMPKEKELVLMQSFDRIKSLEAELEATKNALQAAVEKQMELVETVESLQHQTSSVRRRFCCS

SEQ ID NO: 17347 - DNA, 1296 bp, Zea mays subsp. mays
  misc_feature (1)..(1296): Ceres Seq. ID no. 12366185
  misc_feature: MA Experiment ID: 108527 Result: Down-regulated in Transcription
  misc_feature: MA Experiment 108527 PARAMETER Experiment Name: Zm_5mM_NO_P Parameter: Age (day) Value: 8
  misc_feature: MA Experiment 108527 PARAMETER Experiment Name: Zm_5mM_NO_P Parameter: Organism Value: Zea mays
  misc_feature: MA Experiment 108527 PARAMETER Experiment Name: Zm_5mM_NO_P Parameter: Plant Line Value: 35A19
  misc_feature: MA Experiment 108527 PARAMETER Experiment Name: Zm_5mM_NO_P Parameter: Timepoint (hr) Value: 6
  misc_feature: MA Experiment 108527 PARAMETER Experiment Name: Zm_5mM_NO_P Parameter: Tissue Value: Aerial
  misc_feature: MA Experiment 108527 PARAMETER Experiment Name: Zm_5mM_NO_P Parameter: Treatment Value: 5mM NO vs. No Treatment
  misc_feature: MA Experiment ID: 108528 Result: Up-regulated in Transcription
  misc_feature: MA Experiment 108528 PARAMETER Experiment Name: Zm_Imbibed_Seeds_P Parameter: Age (day) Value: 5 vs. 2
  misc_feature: MA Experiment 108528 PARAMETER Experiment Name: Zm_Imbibed_Seeds_P Parameter: Organism Value: Zea mays
  misc_feature: MA Experiment 108528 PARAMETER Experiment Name: Zm_Imbibed_Seeds_P Parameter: Plant Line Value: 35A19
  misc_feature: MA Experiment 108528 PARAMETER Experiment Name: Zm_Imbibed_Seeds_P Parameter: Tissue Value: Aerial vs. Embryo
  misc_feature: MA Experiment ID: 108530 Result: Up-regulated in Transcription
  misc_feature: MA Experiment 108530 PARAMETER Experiment Name: Zm_Imbibed_Seeds_P Parameter: Age (day) Value: 6 vs. 2
  misc_feature: MA Experiment 108530 PARAMETER Experiment Name: Zm_Imbibed_Seeds_P Parameter: Organism Value: Zea mays
  misc_feature: MA Experiment 108530 PARAMETER Experiment Name: Zm_Imbibed_Seeds_P Parameter: Plant Line Value: 35A19
  misc_feature: MA Experiment 108530 PARAMETER Experiment Name: Zm_Imbibed_Seeds_P Parameter: Tissue Value: Aerial vs. Embryo
  misc_feature: MA Experiment ID: 108534 Result: Down-regulated in Transcription
  misc_feature: MA Experiment 108534 PARAMETER Experiment Name: Zm_4deg_Cold_P Parameter: Age (hr) Value: 8
  misc_feature: MA Experiment 108534 PARAMETER Experiment Name: Zm_4deg_Cold_P Parameter: Organism Value: Zea mays
  misc_feature: MA Experiment 108534 PARAMETER Experiment Name: Zm_4deg_Cold_P Parameter: Plant Line Value: 35A19
  misc_feature: MA Experiment 108534 PARAMETER Experiment Name: Zm_4deg_Cold_P Parameter: Temperature (deg C) Value: 4 vs. 22
  misc_feature: MA Experiment 108534 PARAMETER Experiment Name: Zm_4deg_Cold_P Parameter: Timepoint (hr) Value: 6
  misc_feature: MA Experiment 108534 PARAMETER Experiment Name: Zm_4deg_Cold_P Parameter: Tissue Value: Aerial
  misc_feature: MA Experiment ID: 108536 Result: Down-regulated in Transcription
  misc_feature: MA Experiment 108536 PARAMETER Experiment Name: Zm_Meristem_P Parameter: Age (day) Value: 8
  misc_feature: MA Experiment 108536 PARAMETER Experiment Name: Zm_Meristem_P Parameter: Organism Value: Zea mays
  misc_feature: MA Experiment 108536 PARAMETER Experiment Name: Zm_Meristem_P Parameter: Plant Line Value: 35A19
  misc_feature: MA Experiment 108536 PARAMETER Experiment Name: Zm_Meristem_P Parameter: Tissue Value: Shoot Meristem vs. Above Shoot Meristem
  misc_feature: MA Experiment ID: 108544 Result: Down-regulated in Transcription
  misc_feature: MA Experiment ID: 108559 Result: Down-regulated in Transcription
  misc_feature: MA Experiment 108559 PARAMETER Experiment Name: Zm_5mM_NO_P Parameter: Age (day) Value: 8
  misc_feature: MA Experiment 108559 PARAMETER Experiment Name: Zm_5mM_NO_P Parameter: Organism Value: Zea mays
  misc_feature: MA Experiment 108559 PARAMETER Experiment Name: Zm_5mM_NO_P Parameter: Plant Line Value: 35A19
  misc_feature: MA Experiment 108559 PARAMETER Experiment Name: Zm_5mM_NO_P Parameter: Timepoint (hr) Value: 12
  misc_feature: MA Experiment 108559 PARAMETER Experiment Name: Zm_5mM_NO_P Parameter: Tissue Value: Aerial
  misc_feature: MA Experiment 108559 PARAMETER Experiment Name: Zm_5mM_NO_P Parameter: Treatment Value: 5mM NO vs. No Treatment
  misc_feature: MA Experiment ID: 108687 Result: Down-regulated in Transcription
  misc_feature: MA Experiment 108687 PARAMETER Experiment Name: Zm_Embryos-Flowers__P Parameter: Tissue Value: Embryo vs. Aerial+
  misc_feature: MA Experiment ID: 108689 Result: Up-regulated in Transcription
  misc_feature: MA Experiment 108689 PARAMETER Experiment Name: Zm_Drought_Roots_P Parameter: Age (day) Value: 9
  misc_feature: MA Experiment 108689 PARAMETER Experiment Name: Zm_Drought_Roots_P Parameter: Organism Value: Zea mays
  misc_feature: MA Experiment 108689 PARAMETER Experiment Name: Zm_Drought_Roots_P Parameter: Plant Line Value: 35A19
  misc_feature: MA Experiment 108689 PARAMETER Experiment Name: Zm_Drought_Roots_P Parameter: Timepoint (hr) Value: 24
  misc_feature: MA Experiment 108689 PARAMETER Experiment Name: Zm_Drought_Roots_P Parameter: Tissue Value: Roots
  misc_feature: MA Experiment 108689 PARAMETER Experiment Name: Zm_Drought_Roots_P Parameter: Treatment Value: Drought vs. No Drought
  misc_feature: MA Experiment ID: 20000477 Result: Down-regulated in Transcription
  misc_feature: MA Experiment 20000477 PARAMETER Experiment Name: Zm_5mM_SA_P Parameter: Age (day) Value: 10
  misc_feature: MA Experiment 20000477 PARAMETER Experiment Name: Zm_5mM_SA_P Parameter: Organism Value: Zea mays
  misc_feature: MA Experiment 20000477 PARAMETER Experiment Name: Zm_5mM_SA_P Parameter: Plant Line Value: 35A19
  misc_feature: MA Experiment 20000477 PARAMETER Experiment Name: Zm_5mM_SA_P Parameter: Timepoint (hr) Value: 48
  misc_feature: MA Experiment 20000477 PARAMETER Experiment Name: Zm_5mM_SA_P Parameter: Tissue Value: Aerial
  misc_feature: MA Experiment 20000477 PARAMETER Experiment Name: Zm_5mM_SA_P Parameter: Treatment Value: 5mM SA vs. No Treatment
  misc_feature: MA Experiment ID: 20000478 Result: Down-regulated in Transcription
  misc_feature: MA Experiment 20000478 PARAMETER Experiment Name: Zm_5mM_SA_P Parameter: Age (day) Value: 11
  misc_feature: MA Experiment 20000478 PARAMETER Experiment Name: Zm_5mM_SA_P Parameter: Organism Value: Zea mays
  misc_feature: MA Experiment 20000478 PARAMETER Experiment Name: Zm_5mM_SA_P Parameter: Plant Line Value: 35A19
  misc_feature: MA Experiment 20000478 PARAMETER Experiment Name: Zm_5mM_SA_P Parameter: Timepoint (hr) Value: 72
  misc_feature: MA Experiment 20000478 PARAMETER Experiment Name: Zm_5mM_SA_P Parameter: Tissue Value: Aerial
  misc_feature: MA Experiment 20000478 PARAMETER Experiment Name: Zm_5mM_SA_P Parameter: Treatment Value: 5mM SA vs. No Treatment
  misc_feature: MA Experiment ID: 20000488 Result: Down-regulated in Transcription
  misc_feature: MA Experiment 20000488 PARAMETER Experiment Name: Zm_50mM_NH4NO3_L_to_H_P Parameter: Organism Value: Zea mays
  misc_feature: MA Experiment 20000488 PARAMETER Experiment Name: Zm_50mM_NH4NO3_L_to_H_P Parameter: Timepoint (hr) Value: 8
  misc_feature: MA Experiment 20000488 PARAMETER Experiment Name: Zm_50mM_NH4NO3_L_to_H_P Parameter: Tissue Value: Leaves
  misc_feature: MA Experiment 20000488 PARAMETER Experiment Name: Zm_50mM_NH4NO3_L_to_H_P Parameter: Treatment Value: 50mM NH4NO3 vs. 100mM Mannitol
  misc_feature: MA Experiment ID: 20000626 Result: Up-regulated in Transcription
  misc_feature: MA Experiment 20000626 PARAMETER Experiment Name: Zm_Herbicide-Treatments_P Parameter: Timepoint (hr) Value: 12
  misc_feature: MA Experiment 20000626 PARAMETER Experiment Name: Zm_Herbicide-Treatments_P Parameter: Tissue Value: Aerial
  misc_feature: MA Experiment 20000626 PARAMETER Experiment Name: Zm_Herbicide-Treatments_P Parameter: Treatment Value: Roundup vs. No Treatment
  misc_feature: MA Experiment ID: 20000627 Result: Up-regulated in Transcription
  misc_feature: MA Experiment 20000627 PARAMETER Experiment Name: Zm_Herbicide-Treatments_P Parameter: Timepoint (hr) Value: 12
  misc_feature: MA Experiment 20000627 PARAMETER Experiment Name: Zm_Herbicide-Treatments_P Parameter: Tissue Value: Aerial
  misc_feature: MA Experiment 20000627 PARAMETER Experiment Name: Zm_Herbicide-Treatments_P Parameter: Treatment Value: Finale vs. No Treatment
  misc_feature: MA Experiment ID: 20000628 Result: Up-regulated in Transcription
  misc_feature: MA Experiment 20000628 PARAMETER Experiment Name: Zm_Herbicide-Treatments_P Parameter: Timepoint (hr) Value: 12
  misc_feature: MA Experiment 20000628 PARAMETER Experiment Name: Zm_Herbicide-Treatments_P Parameter: Tissue Value: Aerial
  misc_feature: MA Experiment 20000628 PARAMETER Experiment Name: Zm_Herbicide-Treatments_P Parameter: Treatment Value: Glean vs. No Treatment
  misc_feature: MA Experiment ID: 20000629 Result: Up-regulated in Transcription
  misc_feature: MA Experiment 20000629 PARAMETER Experiment Name: Zm_Herbicide-Treatments_P Parameter: Timepoint (hr) Value: 12
  misc_feature: MA Experiment 20000629 PARAMETER Experiment Name: Zm_Herbicide-Treatments_P Parameter: Tissue Value: Aerial
  misc_feature: MA Experiment 20000629 PARAMETER Experiment Name: Zm_Herbicide-Treatments_P Parameter: Treatment Value: Trimec vs. No Treatment
aacgacgagcagtgcaagccaagcattctcacgctagctgttctcttcttgcgcctcatccatcttgcatctatattctcggcgcgagttacgttttcgtcgtccggccggccggcgagcattttgcttctgcgatcgatcggcgcgacgtgtgcacggccatggagatgatcgacgcagagctgcgtctgggtccgcccggcagcaccaacagagacgtcatcaacgtcgtgcagccggcgttggcggcggcgaaacggccgtcgtcgtcggtggtggagagcgaggcgtccgggacggacgaccatgacgacgctgcaccgacctccaaggtgcaggtggtggggtggccgccggtgagagtgtaccggaagaacgcgttccacgcggcggcggaggcgaggaggaccaggcggggcgagcagcaaggaggaggaggcctgtacgtgaaggtgagcatggacggggcgccatacctccggaaggtggacctgcggacctacggcggctaccgtgagctgagggacgcactggacgcgctcttcggctgcttctcctcctcggccgacggcggatgccagttcgccgtcgcctacgaggacaaggacggcgacctcatgctcgccggcgacgtgccatgggagatgttcatctgttcttgcaagaagctgaggatcatgagggggtccgaaacaagataaccaagcaacgaggatgcaagaaccctgttggatgcatatgcatggagaggccggccggactcatggtgtcatgcacgagagagaagaagaagaagacgacgacctgctggaactgaaggcggttgggtatacctgcatgcatggggagggagcccacgcatgcacgcgcgcgtcgtcgtgttctagccaccagaccggccgccggcccatatgctcaccacggagatggaggtgatggttcaaggatcacggcggcgtacgcgtcatcagtcacgccgtcgtcctgtcatcagatgagagatggaggggtgatgcatgagggcagtgctgtcgacggctggctggacgtgcagatcggagcgagattgtactgtgcacgcacatgagctttgtaattcattctaggggtgcagccgcacccacgtagaaataaataagaataccgccgtggttagagccaaattttttgccatttatattgttagcgtctcgtcagcgcagagaggagaagagaagaatcgggatgcgtggagaagaagaatagtgtagcgacgaggggaaatgtgtaatgtaagtatatgttcttttgatgcct

SEQ ID NO: 17348 - protein, 232 aa, Zea mays subsp. mays
  peptide (1)..(232): Ceres Seq. ID no. 12366186
  misc_feature (58)..(232): Pfam Name: AUX/IAA family Pfam Description: AUX/IAA family
  misc_feature (60)..(232): Homolog of NCBI NO: 416641 NR Description: Auxin-induced protein 22B (Indole-3-acetic acid
  misc_feature (54)..(232): Homolog of NCBI NO: 1352057 NR Description: AUXIN-INDUCED PROTEIN IAA4
  misc_feature (60)..(232): Homolog of NCBI NO: 4887018 NR Description: Nt-iaa4.5 deduced protein [Nicotiana tabacum]
  misc_feature (191)..(230): Homolog of NCBI NO: 29465672 NR Description: Aux/IAA protein [Vitis vinifera]
  misc_feature (19)..(185): Homolog of NCBI NO: 29465672 NR Description: Aux/IAA protein [Vitis vinifera]
  misc_feature (60)..(232): Homolog of NCBI NO: 11131103 NR Description: Auxin-induced protein 22D (Indole-3-acetic acid
  misc_feature (58)..(232): Homolog of NCBI NO: 15219692 NR Description: putative auxin-induced protein AUX2-11
  misc_feature (60)..(232): Homolog of NCBI NO: 34550779 NR Description: Gbiaa-Re [Gossypium barbadense]
  misc_feature (94)..(232): Homolog of NCBI NO: 34393534 NR Description: putative auxin-induced protein
  misc_feature (53)..(232): Homolog of NCBI NO: 34897206 NR Description: putative auxin-induced protein
RRAVQAKHSHASCSLLAPHPSCIYILGASYVFVVRPAGEHFASAIDRRDVCTAMEMIDAELRLGPPGSTNRDVINVVQPALAAAKRPSSSVVESEASGTDDHDDAAPTSKVQVVGWPPVRVYRKNAFHAAAEARRTRRGEQQGGGGLYVKVSMDGAPYLRKVDLRTYGGYRELRDALDALFGCFSSSADGGCQFAVAYEDKDGDLMLAGDVPWEMFICSCKKLRIMRGSETR

SEQ ID NO: 17349 - protein, 179 aa, Zea mays subsp. mays
  peptide (1)..(179): Ceres Seq. ID no. 12366187
  misc_feature (5)..(179): Pfam Name: AUX/IAA family Pfam Description: AUX/IAA family
  misc_feature (7)..(179): Homolog of NCBI NO: 416641 NR Description: Auxin-induced protein 22B (Indole-3-acetic acid
  misc_feature (1)..(179): Homolog of NCBI NO: 1352057 NR Description: AUXIN-INDUCED PROTEIN IAA4
  misc_feature (7)..(179): Homolog of NCBI NO: 4887018 NR Description: Nt-iaa4.5 deduced protein [Nicotiana tabacum]
  misc_feature (138)..(177): Homolog of NCBI NO: 29465672 NR Description: Aux/IAA protein [Vitis vinifera]
  misc_feature (1)..(132): Homolog of NCBI NO: 29465672 NR Description: Aux/IAA protein [Vitis vinifera]
  misc_feature (7)..(179): Homolog of NCBI NO: 11131103 NR Description: Auxin-induced protein 22D (Indole-3-acetic acid
  misc_feature (5)..(179): Homolog of NCBI NO: 15219692 NR Description: putative auxin-induced protein AUX2-11
  misc_feature (7)..(179): Homolog of NCBI NO: 34550779 NR Description: Gbiaa-Re [Gossypium barbadense]
  misc_feature (41)..(179): Homolog of NCBI NO: 34393534 NR Description: putative auxin-induced protein
  misc_feature (1)..(179): Homolog of NCBI NO: 34897206 NR Description: putative auxin-induced protein
MEMIDAELRLGPPGSTNRDVINVVQPALAAAKRPSSSVVESEASGTDDHDDAAPTSKVQVVGWPPVRVYRKNAFHAAAEARRTRRGEQQGGGGLYVKVSMDGAPYLRKVDLRTYGGYRELRDALDALFGCFSSSADGGCQFAVAYEDKDGDLMLAGDVPWEMFICSCKKLRIMRGSETR

SEQ ID NO: 17350 - protein, 177 aa, Zea mays subsp. mays
  peptide (1)..(177): Ceres Seq. ID no. 12366188
  misc_feature (3)..(177): Pfam Name: AUX/IAA family Pfam Description: AUX/IAA family
  misc_feature (5)..(177): Homolog of NCBI NO: 416641 NR Description: Auxin-induced protein 22B (Indole-3-acetic acid
  misc_feature (1)..(177): Homolog of NCBI NO: 1352057 NR Description: AUXIN-INDUCED PROTEIN IAA4
  misc_feature (5)..(177): Homolog of NCBI NO: 4887018 NR Description: Nt-iaa4.5 deduced protein [Nicotiana tabacum]
  misc_feature (136)..(175): Homolog of NCBI NO: 29465672 NR Description: Aux/IAA protein [Vitis vinifera]
  misc_feature (1)..(130): Homolog of NCBI NO: 29465672 NR Description: Aux/IAA protein [Vitis vinifera]
  misc_feature (5)..(177): Homolog of NCBI NO: 11131103 NR Description: Auxin-induced protein 22D (Indole-3-acetic acid
  misc_feature (3)..(177): Homolog of NCBI NO: 15219692 NR Description: putative auxin-induced protein AUX2-11
  misc_feature (5)..(177): Homolog of NCBI NO: 34550779 NR Description: Gbiaa-Re [Gossypium barbadense]
  misc_feature (39)..(177): Homolog of NCBI NO: 34393534 NR Description: putative auxin-induced protein
  misc_feature (1)..(177): Homolog of NCBI NO: 34897206 NR Description: putative auxin-induced protein
MIDAELRLGPPGSTNRDVINVVQPALAAAKRPSSSVVESEASGTDDHDDAAPTSKVQVVGWPPVRVYRKNAFHAAAEARRTRRGEQQGGGGLYVKVSMDGAPYLRKVDLRTYGGYRELRDALDALFGCFSSSADGGCQFAVAYEDKDGDLMLAGDVPWEMFICSCKKLRIMRGSETR

SEQ ID NO: 17351 - DNA, 1198 bp, Zea mays subsp. mays
  misc_feature (1)..(1198): Ceres Seq. ID no. 12435386
  misc_feature: MA Experiment ID: 108528 Result: Down-regulated in Transcription
  misc_feature: MA Experiment 108528 PARAMETER Experiment Name: Zm_Imbibed_Seeds_P Parameter: Age (day) Value: 5 vs. 2
  misc_feature: MA Experiment 108528 PARAMETER Experiment Name: Zm_Imbibed_Seeds_P Parameter: Organism Value: Zea mays
  misc_feature: MA Experiment 108528 PARAMETER Experiment Name: Zm_Imbibed_Seeds_P Parameter: Plant Line Value: 35A19
  misc_feature: MA Experiment 108528 PARAMETER Experiment Name: Zm_Imbibed_Seeds_P Parameter: Tissue Value: Aerial vs. Embryo
  misc_feature: MA Experiment ID: 108529 Result: Down-regulated in Transcription
  misc_feature: MA Experiment 108529 PARAMETER Experiment Name: Zm_Imbibed_Seeds_P Parameter: Age (day) Value: 5 vs. 2
  misc_feature: MA Experiment 108529 PARAMETER Experiment Name: Zm_Imbibed_Seeds_P Parameter: Organism Value: Zea mays
  misc_feature: MA Experiment 108529 PARAMETER Experiment Name: Zm_Imbibed_Seeds_P Parameter: Plant Line Value: 35A19
  misc_feature: MA Experiment 108529 PARAMETER Experiment Name: Zm_Imbibed_Seeds_P Parameter: Tissue Value: Roots vs. Embryo
  misc_feature: MA Experiment ID: 108530 Result: Down-regulated in Transcription
  misc_feature: MA Experiment 108530 PARAMETER Experiment Name: Zm_Imbibed_Seeds_P Parameter: Age (day) Value: 6 vs. 2
  misc_feature: MA Experiment 108530 PARAMETER Experiment Name: Zm_Imbibed_Seeds_P Parameter: Organism Value: Zea mays
  misc_feature: MA Experiment 108530 PARAMETER Experiment Name: Zm_Imbibed_Seeds_P Parameter: Plant Line Value: 35A19
  misc_feature: MA Experiment 108530 PARAMETER Experiment Name: Zm_Imbibed_Seeds_P Parameter: Tissue Value: Aerial vs. Embryo
  misc_feature: MA Experiment ID: 108534 Result: Down-regulated in Transcription
  misc_feature: MA Experiment 108534 PARAMETER Experiment Name: Zm_4deg_Cold_P Parameter: Age (hr) Value: 8
  misc_feature: MA Experiment 108534 PARAMETER Experiment Name: Zm_4deg_Cold_P Parameter: Organism Value: Zea mays
  misc_feature: MA Experiment 108534 PARAMETER Experiment Name: Zm_4deg_Cold_P Parameter: Plant Line Value: 35A19
  misc_feature: MA Experiment 108534 PARAMETER Experiment Name: Zm_4deg_Cold_P Parameter: Temperature (deg C) Value: 4 vs. 22
  misc_feature: MA Experiment 108534 PARAMETER Experiment Name: Zm_4deg_Cold_P Parameter: Timepoint (hr) Value: 6
  misc_feature: MA Experiment 108534 PARAMETER Experiment Name: Zm_4deg_Cold_P Parameter: Tissue Value: Aerial
  misc_feature: MA Experiment ID: 108535 Result: Down-regulated in Transcription
  misc_feature: MA Experiment 108535 PARAMETER Experiment Name: Zm_Meristem_P Parameter: Age (day) Value: 8
  misc_feature: MA Experiment 108535 PARAMETER Experiment Name: Zm_Meristem_P Parameter: Organism Value: Zea mays
  misc_feature: MA Experiment 108535 PARAMETER Experiment Name: Zm_Meristem_P Parameter: Plant Line Value: 35A19
  misc_feature: MA Experiment 108535 PARAMETER Experiment Name: Zm_Meristem_P Parameter: Tissue Value: Root Meristem vs. Above Root Meristem
  misc_feature: MA Experiment ID: 108543 Result: Up-regulated in Transcription
  misc_feature: MA Experiment ID: 108544 Result: Up-regulated in Transcription
  misc_feature: MA Experiment ID: 108545 Result: Down-regulated in Transcription
  misc_feature: MA Experiment 108545 PARAMETER Experiment Name: Zm_Imbibed_Seeds_P Parameter: Age (day) Value: 3 vs. 2
  misc_feature: MA Experiment 108545 PARAMETER Experiment Name: Zm_Imbibed_Seeds_P Parameter: Organism Value: Zea mays
  misc_feature: MA Experiment 108545 PARAMETER Experiment Name: Zm_Imbibed_Seeds_P Parameter: Plant Line Value: 35A19
  misc_feature: MA Experiment 108545 PARAMETER Experiment Name: Zm_Imbibed_Seeds_P Parameter: Tissue Value: Aerial vs. Embryo
  misc_feature: MA Experiment ID: 108547 Result: Down-regulated in Transcription
  misc_feature: MA Experiment 108547 PARAMETER Experiment Name: Zm_Imbibed_Seeds_P Parameter: Age (day) Value: 4 vs. 2
  misc_feature: MA Experiment 108547 PARAMETER Experiment Name: Zm_Imbibed_Seeds_P Parameter: Organism Value: Zea mays
  misc_feature: MA Experiment 108547 PARAMETER Experiment Name: Zm_Imbibed_Seeds_P Parameter: Plant Line Value: 35A19
  misc_feature: MA Experiment 108547 PARAMETER Experiment Name: Zm_Imbibed_Seeds_P Parameter: Tissue Value: Aerial vs. Embryo
  misc_feature: MA Experiment ID: 20000535 Result: Down-regulated in Transcription
  misc_feature: MA Experiment 20000535 PARAMETER Experiment Name: Zm_Hybrid_Seed_Dev_P Parameter: DAP Value: 30 vs. 12
  misc_feature: MA Experiment 20000535 PARAMETER Experiment Name: Zm_Hybrid_Seed_Dev_P Parameter: Organism Value: Zea mays
  misc_feature: MA Experiment 20000535 PARAMETER Experiment Name: Zm_Hybrid_Seed_Dev_P Parameter: Plant Line Value: 35A19
  misc_feature: MA Experiment 20000535 PARAMETER Experiment Name: Zm_Hybrid_Seed_Dev_P Parameter: Tissue Value: Embryo vs. Unfert Floret
  misc_feature: MA Experiment ID: 20000626 Result: Up-regulated in Transcription
  misc_feature: MA Experiment 20000626 PARAMETER Experiment Name: Zm_Herbicide-Treatments_P Parameter: Timepoint (hr) Value: 12
  misc_feature: MA Experiment 20000626 PARAMETER Experiment Name: Zm_Herbicide-Treatments_P Parameter: Tissue Value: Aerial
  misc_feature: MA Experiment 20000626 PARAMETER Experiment Name: Zm_Herbicide-Treatments_P Parameter: Treatment Value: Roundup vs. No Treatment
gtgttccacttgctagtccactcccctctcagtcgaggcaatggccttcgcttccagtagcttccgcctcgctctgttcttggttctgctggcgtttgtcagcttggcacggcacgccacgggggaggccagcccgagcaggaggctcatggagctgtacaagccaccgcccagcgatctcctaaggtaccacgacggcgccgtgctgagcggcgacatccccgtctccgtcctctggtacggccgcttcacgcccgcgcagaaggccatcgtcaccgacttcctcctctccctctccgccgcgccgacgtcccctgcgccttccgtctcccagtggtggggcaccatcgaccggctctacctatcgaaggcggcggacgcggccgccgtcgggaagagcggcgcgcacggcggcggtggtggcaggaaaggcgctcgggtggtcctggccggccaggtctccgacgaagggtgctcgctggggaagagcctgacgctcgcccagctcccggcgctggcggccgcggcgcgccccgcgaagggcggcctcgcgctgctgctcacggcgcaggacgtgctggtggagggcttctgcatgagccggtgcggccaccacgggtcgtacggcgcgcggccccgcgtggcggcggcggcgtacgcgtgggtcgggaacccgggcacgcagtgccccggccagtgcgcgtggncgttccaccagccgccgtacgggccgcaggcgccgccgctggtgccgccgaacggggacgcgggcatggacggcgccatgatcagcgtggccagcatggtggccggcgcggtcaccaaccccttcggagacgggttctaccagggcgaccgcgccgcgccgcttgaggccgccacggcgtgcgcgggcgtctacggcaacggcgcgtaccccggctacgccggccagctgctcgtggacgcggccacgggtgccagctacaacgccaacggggcgcgcgggaggaagtacctgctccccgcgctgtacgatcccgacacggctgcctgcaccaccttggtttgagcaaacgcgcggcgccgtgttttggcatctgtcaccgtaggtgggcggggatacagtgaagtgataatgcgcttgtgttaggcgcatgtatatatataataattagatggatacccgtgcgttacaatataaacatataataccatg

SEQ ID NO: 17352 - protein, 336 aa, Zea mays subsp. mays
  peptide (1)..(336): Ceres Seq. ID no. 12435387
  misc_feature (48)..(336): Pfam Name: Phosphate-induced protein 1 conserved region Pfam Description: Phosphate-induced protein 1 conserved region
  misc_feature (129)..(336): Homolog of NCBI NO: 31074969 NR Description: erg-1 [Solanum tuberosum]
  misc_feature (56)..(119): Homolog of NCBI NO: 15242420 NR Description: putative protein
  misc_feature (129)..(336): Homolog of NCBI NO: 15242420 NR Description: putative protein
  misc_feature (159)..(335): Homolog of NCBI NO: 13194680 NR Description: phosphate-induced protein 1-like protein
  misc_feature (47)..(336): Homolog of NCBI NO: 15237656 NR Description: phi-1-like protein
  misc_feature (39)..(332): Homolog of NCBI NO: 37533672 NR Description: putative phosphate-induced protein
  misc_feature (49)..(335): Homolog of NCBI NO: 15219504 NR Description: phosphate-induced (phi-1) protein, putative
  misc_feature (12)..(336): Homolog of NCBI NO: 15236667 NR Description: putative phi-1-like phosphate-induced protein
  misc_feature (11)..(336): Homolog of NCBI NO: 21593043 NR Description: putative phi-1-like phosphate-induced protein
  misc_feature (33)..(336): Homolog of NCBI NO: 3759184 NR Description: phi-1 [Nicotiana tabacum]
  misc_feature (223)..(223): Xaa is any aa, unknown or other
MAFASSSFRLALFLVLLAFVSLARHATGEASPSRRLMELYKPPPSDLLRYHDGAVLSGDIPVSVLWYGRFTPAQKAIVTDFLLSLSAAPTSPAPSVSQWWGTIDRLYLSKAADAAAVGKSGAHGGGGGRKGARVVLAGQVSDEGCSLGKSLTLAQLPALAAAARPAKGGLALLLTAQDVLVEGFCMSRCGHHGSYGARPRVAAAAYAWVGNPGTQCPGQCAWXFHQPPYGPQAPPLVPPNGDAGMDGAMISVASMVAGAVTNPFGDGFYQGDRAAPLEAATACAGVYGNGAYPGYAGQLLVDAATGASYNANGARGRKYLLPALYDPDTAACTTLV

SEQ ID NO: 17353 - protein, 300 aa, Zea mays subsp. mays
  peptide (1)..(300): Ceres Seq. ID no. 12435388
  misc_feature (12)..(300): Pfam Name: Phosphate-induced protein 1 conserved region Pfam Description: Phosphate-induced protein 1 conserved region
  misc_feature (93)..(300): Homolog of NCBI NO: 31074969 NR Description: erg-1 [Solanum tuberosum]
  misc_feature (20)..(83): Homolog of NCBI NO: 15242420 NR Description: putative protein
  misc_feature (93)..(300): Homolog of NCBI NO: 15242420 NR Description: putative protein
  misc_feature (123)..(299): Homolog of NCBI NO: 13194680 NR Description: phosphate-induced protein 1-like protein
  misc_feature (11)..(300): Homolog of NCBI NO: 15237656 NR Description: phi-1-like protein
  misc_feature (3)..(296): Homolog of NCBI NO: 37533672 NR Description: putative phosphate-induced protein
  misc_feature (13)..(299): Homolog of NCBI NO: 15219504 NR Description: phosphate-induced (phi-1) protein, putative
  misc_feature (1)..(300): Homolog of NCBI NO: 15236667 NR Description: putative phi-1-like phosphate-induced protein
  misc_feature (1)..(300): Homolog of NCBI NO: 21593043 NR Description: putative phi-1-like phosphate-induced protein
  misc_feature (1)..(300): Homolog of NCBI NO: 3759184 NR Description: phi-1 [Nicotiana tabacum]
  misc_feature (187)..(187): Xaa is any aa, unknown or other
MELYKPPPSDLLRYHDGAVLSGDIPVSVLWYGRFTPAQKAIVTDFLLSLSAAPTSPAPSVSQWWGTIDRLYLSKAADAAAVGKSGAHGGGGGRKGARVVLAGQVSDEGCSLGKSLTLAQLPALAAAARPAKGGLALLLTAQDVLVEGFCMSRCGHHGSYGARPRVAAAAYAWVGNPGTQCPGQCAWXFHQPPYGPQAPPLVPPNGDAGMDGAMISVASMVAGAVTNPFGDGFYQGDRAAPLEAATACAGVYGNGAYPGYAGQLLVDAATGASYNANGARGRKYLLPALYDPDTAACTTLV

SEQ ID NO: 17354 - DNA, 457 bp, Zea mays subsp. mays
  misc_feature (1)..(457): Ceres Seq. ID no. 1673321
  misc_feature: MA Experiment ID: 108530 Result: Down-regulated in Transcription
  misc_feature: MA Experiment 108530 PARAMETER Experiment Name: Zm_Imbibed_Seeds_P Parameter: Age (day) Value: 6 vs. 2
  misc_feature: MA Experiment 108530 PARAMETER Experiment Name: Zm_Imbibed_Seeds_P Parameter: Organism Value: Zea mays
  misc_feature: MA Experiment 108530 PARAMETER Experiment Name: Zm_Imbibed_Seeds_P Parameter: Plant Line Value: 35A19
  misc_feature: MA Experiment 108530 PARAMETER Experiment Name: Zm_Imbibed_Seeds_P Parameter: Tissue Value: Aerial vs. Embryo
  misc_feature: MA Experiment ID: 108535 Result: Up-regulated in Transcription
  misc_feature: MA Experiment 108535 PARAMETER Experiment Name: Zm_Meristem_P Parameter: Age (day) Value: 8
  misc_feature: MA Experiment 108535 PARAMETER Experiment Name: Zm_Meristem_P Parameter: Organism Value: Zea mays
  misc_feature: MA Experiment 108535 PARAMETER Experiment Name: Zm_Meristem_P Parameter: Plant Line Value: 35A19
  misc_feature: MA Experiment 108535 PARAMETER Experiment Name: Zm_Meristem_P Parameter: Tissue Value: Root Meristem vs. Above Root Meristem
  misc_feature: MA Experiment ID: 108556 Result: Down-regulated in Transcription
  misc_feature: MA Experiment 108556 PARAMETER Experiment Name: Zm_Drought_P Parameter: Age (day) Value: 9
  misc_feature: MA Experiment 108556 PARAMETER Experiment Name: Zm_Drought_P Parameter: Organism Value: Zea mays
  misc_feature: MA Experiment 108556 PARAMETER Experiment Name: Zm_Drought_P Parameter: Plant Line Value: 35A19
  misc_feature: MA Experiment 108556 PARAMETER Experiment Name: Zm_Drought_P Parameter: Timepoint (hr) Value: 24
  misc_feature: MA Experiment 108556 PARAMETER Experiment Name: Zm_Drought_P Parameter: Tissue Value: Aerial
  misc_feature: MA Experiment 108556 PARAMETER Experiment Name: Zm_Drought_P Parameter: Treatment Value: Drought vs. No Drought
  misc_feature: MA Experiment ID: 20000108 Result: Up-regulated in Transcription
  misc_feature: MA Experiment 20000108 PARAMETER Experiment Name: Zm_Root-Tips_P Parameter: Age (day) Value: 12
  misc_feature: MA Experiment 20000108 PARAMETER Experiment Name: Zm_Root-Tips_P Parameter: Organism Value: Zea mays
  misc_feature: MA Experiment 20000108 PARAMETER Experiment Name: Zm_Root-Tips_P Parameter: Tissue Value: Root tips vs. Root mid region    35
  misc_feature: MA Experiment 20000108 PARAMETER Experiment Name: Zm_Root-Tips_P Parameter: Tissue Value: Root tips vs. Root mid region   Sequence Listing-Misc Features (4)
  misc_feature: MA Experiment ID: 20000492 Result: Up-regulated in Transcription
  misc_feature: MA Experiment 20000492 PARAMETER Experiment Name: Zm_Hybrid_Seed_Dev_P Parameter: DAP Value: 12
  misc_feature: MA Experiment 20000492 PARAMETER Experiment Name: Zm_Hybrid_Seed_Dev_P Parameter: Organism Value: Zea mays
  misc_feature: MA Experiment 20000492 PARAMETER Experiment Name: Zm_Hybrid_Seed_Dev_P Parameter: Plant Line Value: 35A19
  misc_feature: MA Experiment 20000492 PARAMETER Experiment Name: Zm_Hybrid_Seed_Dev_P Parameter: Tissue Value: Fert Kernel vs. Unfert Floret
  misc_feature: MA Experiment ID: 20001606 Result: Up-regulated in Transcription
  misc_feature: MA Experiment 20001606 PARAMETER Experiment Name: Zm_50ppm_KNO3_L-to-H_P Parameter: Age (day) Value: 19
  misc_feature: MA Experiment 20001606 PARAMETER Experiment Name: Zm_50ppm_KNO3_L-to-H_P Parameter: Organism Value: Zea mays
  misc_feature: MA Experiment 20001606 PARAMETER Experiment Name: Zm_50ppm_KNO3_L-to-H_P Parameter: Plant Line Value: 35A19
  misc_feature: MA Experiment 20001606 PARAMETER Experiment Name: Zm_50ppm_KNO3_L-to-H_P Parameter: Timepoint (hr) Value: 8
  misc_feature: MA Experiment 20001606 PARAMETER Experiment Name: Zm_50ppm_KNO3_L-to-H_P Parameter: Tissue Value: Shoots
  misc_feature: MA Experiment 20001606 PARAMETER Experiment Name: Zm_50ppm_KNO3_L-to-H_P Parameter: Treatment Value: 50ppm KNO3 vs. 50ppm KCl
gtacgctctgccgcgccaagctccgcctccatccgcgcggatctgagtttgtgctgtctggctctctgcgcagatgtcggctgcagaggcgaaggcggcggcggtcccggagtctgtgctgcggaagcgcaagcgggaggagcaatgggcagcggacaagaaggagaaggcgctcgcggacaggaagaaggcgctcgagagccgcaagatcatcttcgcccgcgccaagcagtacgccgaggagtaccacgcccaggagaaggagcttgtgcagctcaagcgtgaggcccggttgaagggtgggttctatgtgagcccagaggccaagcttctgtttgtggttcgcatccgtggtatcaatgccatgcaccccaagacccgcaagatcttgcagctcctgcgattgaggcagatcttcaacggtgtcttcctcaaggttaacaaggcaaccattaac

SEQ ID NO: 17355 - protein, 94 aa, Zea mays subsp. mays
  peptide (1)..(94): Ceres Seq. ID no. 1673322
VRSAAPSSASIRADLSLCCLALCADVGCRGEGGGGPGVCAAEAQAGGAMGSGQEGEGARGQEEGAREPQDHLRPRQAVRRGVPRPGEGACAAQA

SEQ ID NO: 17356 - protein, 97 aa, Zea mays subsp. mays
  peptide (1)..(97): Ceres Seq. ID no. 1673323
  misc_feature (9)..(87): Pfam Name: Cupin Pfam Description: Cupin
TLCRAKLRLHPRGSEFVLSGSLRRCRLQRRRRRRSRSLCCGSASGRSNGQRTRRRRRSRTGRRRSRAARSSSPAPSSTPRSTTPRRRSLCSSSVRPG

SEQ ID NO: 17357 - protein, 128 aa, Zea mays subsp. mays
  peptide (1)..(128): Ceres Seq. ID no. 1673324
  misc_feature (85)..(127): Pfam Name: Ribosomal protein L30p/L7e Pfam Description: Ribosomal protein L30p/L7e
  misc_feature (4)..(127): Homolog of NCBI NO: 27311547 NR Description: Unknown protein [Arabidopsis thaliana]
  misc_feature (1)..(127): Homolog of NCBI NO: 15231288 NR Description: ribosomal protein, putative
  misc_feature (4)..(127): Homolog of NCBI NO: 22758864 NR Description: ribosomal protein L7 [Argopecten irradians]
  misc_feature (11)..(127): Homolog of NCBI NO: 445613 NR Description: ribosomal protein L7
  misc_feature (4)..(127): Homolog of NCBI NO: 30689623 NR Description: 60S ribosomal protein L7 (RPL7C) [Arabidopsis
  misc_feature (4)..(127): Homolog of NCBI NO: 30689617 NR Description: 60S ribosomal protein L7 (RPL7C) [Arabidopsis
  misc_feature (5)..(127): Homolog of NCBI NO: 15226212 NR Description: putative ribosomal protein L7
  misc_feature (6)..(127): Homolog of NCBI NO: 28630259 NR Description: ribosomal protein L7 [Branchiostoma lanceolatum]
  misc_feature (3)..(127): Homolog of NCBI NO: 38346542 NR Description: OSJNBa0035M09.3 [Oryza sativa (japonica
  misc_feature (1)..(127): Homolog of NCBI NO: 38637548 NR Description: putative 60S ribosomal protein L7
MSAAEAKAAAVPESVLRKRKREEQWAADKKEKALADRKKALESRKIIFARAKQYAEEYHAQEKELVQLKREARLKGGFYVSPEAKLLFVVRIRGINAMHPKTRKILQLLRLRQIFNGVFLKVNKATIN

SEQ ID NO: 17358 - DNA, 1080 bp, Zea mays subsp. mays
  misc_feature (1)..(1080): Ceres Seq. ID no. 12417528
  misc_feature: MA Experiment ID: 108535 Result: Up-regulated in Transcription
  misc_feature: MA Experiment 108535 PARAMETER Experiment Name: Zm_Meristem_P Parameter: Age (day) Value: 8
  misc_feature: MA Experiment 108535 PARAMETER Experiment Name: Zm_Meristem_P Parameter: Organism Value: Zea mays
  misc_feature: MA Experiment 108535 PARAMETER Experiment Name: Zm_Meristem_P Parameter: Plant Line Value: 35A19
  misc_feature: MA Experiment 108535 PARAMETER Experiment Name: Zm_Meristem_P Parameter: Tissue Value: Root Meristem vs. Above Root Meristem
  misc_feature: MA Experiment ID: 108544 Result: Down-regulated in Transcription
  misc_feature: MA Experiment ID: 20000108 Result: Up-regulated in Transcription
  misc_feature: MA Experiment 20000108 PARAMETER Experiment Name: Zm_Root-Tips_P Parameter: Age (day) Value: 12
  misc_feature: MA Experiment 20000108 PARAMETER Experiment Name: Zm_Root-Tips_P Parameter: Organism Value: Zea mays
  misc_feature: MA Experiment 20000108 PARAMETER Experiment Name: Zm_Root-Tips_P Parameter: Tissue Value: Root tips vs. Root mid region    35
  misc_feature: MA Experiment 20000108 PARAMETER Experiment Name: Zm_Root-Tips_P Parameter: Tissue Value: Root tips vs. Root mid region   Sequence Listing-Misc Features (4)
  misc_feature: MA Experiment ID: 20000480 Result: Up-regulated in Transcription
  misc_feature: MA Experiment 20000480 PARAMETER Experiment Name: Zm_Drought_P Parameter: Age (day) Value: 11
  misc_feature: MA Experiment 20000480 PARAMETER Experiment Name: Zm_Drought_P Parameter: Organism Value: Zea mays
  misc_feature: MA Experiment 20000480 PARAMETER Experiment Name: Zm_Drought_P Parameter: Plant Line Value: 35A19
  misc_feature: MA Experiment 20000480 PARAMETER Experiment Name: Zm_Drought_P Parameter: Timepoint (hr) Value: 72
  misc_feature: MA Experiment 20000480 PARAMETER Experiment Name: Zm_Drought_P Parameter: Tissue Value: Aerial
  misc_feature: MA Experiment 20000480 PARAMETER Experiment Name: Zm_Drought_P Parameter: Treatment Value: Drought vs. No Drought
  misc_feature: MA Experiment ID: 20000487 Result: Up-regulated in Transcription
  misc_feature: MA Experiment 20000487 PARAMETER Experiment Name: Zm_50mM_NH4NO3_L_to_H_P Parameter: Organism Value: Zea mays
  misc_feature: MA Experiment 20000487 PARAMETER Experiment Name: Zm_50mM_NH4NO3_L_to_H_P Parameter: Timepoint (hr) Value: 4
  misc_feature: MA Experiment 20000487 PARAMETER Experiment Name: Zm_50mM_NH4NO3_L_to_H_P Parameter: Tissue Value: Leaves
  misc_feature: MA Experiment 20000487 PARAMETER Experiment Name: Zm_50mM_NH4NO3_L_to_H_P Parameter: Treatment Value: 50mM NH4NO3 vs. 100mM Mannitol
  misc_feature: MA Experiment ID: 20000488 Result: Up-regulated in Transcription
  misc_feature: MA Experiment 20000488 PARAMETER Experiment Name: Zm_50mM_NH4NO3_L_to_H_P Parameter: Organism Value: Zea mays
  misc_feature: MA Experiment 20000488 PARAMETER Experiment Name: Zm_50mM_NH4NO3_L_to_H_P Parameter: Timepoint (hr) Value: 8
  misc_feature: MA Experiment 20000488 PARAMETER Experiment Name: Zm_50mM_NH4NO3_L_to_H_P Parameter: Tissue Value: Leaves
  misc_feature: MA Experiment 20000488 PARAMETER Experiment Name: Zm_50mM_NH4NO3_L_to_H_P Parameter: Treatment Value: 50mM NH4NO3 vs. 100mM Mannitol
  misc_feature: MA Experiment ID: 20000626 Result: Up-regulated in Transcription
  misc_feature: MA Experiment 20000626 PARAMETER Experiment Name: Zm_Herbicide-Treatments_P Parameter: Timepoint (hr) Value: 12
  misc_feature: MA Experiment 20000626 PARAMETER Experiment Name: Zm_Herbicide-Treatments_P Parameter: Tissue Value: Aerial
  misc_feature: MA Experiment 20000626 PARAMETER Experiment Name: Zm_Herbicide-Treatments_P Parameter: Treatment Value: Roundup vs. No Treatment
  misc_feature: MA Experiment ID: 20001605 Result: Up-regulated in Transcription
  misc_feature: MA Experiment 20001605 PARAMETER Experiment Name: Zm_50ppm_KNO3_L-to-H_P Parameter: Age (day) Value: 19
  misc_feature: MA Experiment 20001605 PARAMETER Experiment Name: Zm_50ppm_KNO3_L-to-H_P Parameter: Organism Value: Zea mays
  misc_feature: MA Experiment 20001605 PARAMETER Experiment Name: Zm_50ppm_KNO3_L-to-H_P Parameter: Plant Line Value: 35A19
  misc_feature: MA Experiment 20001605 PARAMETER Experiment Name: Zm_50ppm_KNO3_L-to-H_P Parameter: Timepoint (hr) Value: 4
  misc_feature: MA Experiment 20001605 PARAMETER Experiment Name: Zm_50ppm_KNO3_L-to-H_P Parameter: Tissue Value: Shoots
  misc_feature: MA Experiment 20001605 PARAMETER Experiment Name: Zm_50ppm_KNO3_L-to-H_P Parameter: Treatment Value: 50ppm KNO3 vs. 50ppm KCl
  misc_feature: MA Experiment ID: 20001612 Result: Up-regulated in Transcription
  misc_feature: MA Experiment 20001612 PARAMETER Experiment Name: Zm_50ppm_KNO3_L-to-H_P Parameter: Age (day) Value: 19
  misc_feature: MA Experiment 20001612 PARAMETER Experiment Name: Zm_50ppm_KNO3_L-to-H_P Parameter: Organism Value: Zea mays
  misc_feature: MA Experiment 20001612 PARAMETER Experiment Name: Zm_50ppm_KNO3_L-to-H_P Parameter: Plant Line Value: 35A19
  misc_feature: MA Experiment 20001612 PARAMETER Experiment Name: Zm_50ppm_KNO3_L-to-H_P Parameter: Timepoint (hr) Value: 8
  misc_feature: MA Experiment 20001612 PARAMETER Experiment Name: Zm_50ppm_KNO3_L-to-H_P Parameter: Tissue Value: Roots
  misc_feature: MA Experiment 20001612 PARAMETER Experiment Name: Zm_50ppm_KNO3_L-to-H_P Parameter: Treatment Value: 50ppm KNO3 vs. 50ppm KCl
gattttgaaaccctcgcctccctcttcctttccggccgccgcctgccgccggaaggagaaaaaatgggtgccggtggggaggaagcgccgcggataatcgtgcctatggcggtggagggtaccccgaatcagctggcgtttgtagaggagtcgaagctgcagaagcgcaaggagaacgtggactgggccgtgaggaaccgggagcgcagggcggccaagcgccagcgcatccgcgacaagcacaaggtcgccgtcaggcggcccgaggagttcgtcaccgcgttccgtaacaaggagcgcgacttcctgcggatgaggacccgcatcaaggtccgcagccagccgcccgtcgaggcgctcggctccaggctcgtcttcgcgattcgcatccctggctccgtggacttgcacccgcacatcaggaaggttttgaggaaactacgactgacgaaggtcctcactggggtgttcctcagggccaccgagttgacgctgaagaggctgcttgtggtcgaaccctttgtcacatacgggtttccgaacttaaagagtgtgaaagagcttatctacaagaagggccgcgggttctttgacatggaacctttccctcttaccagcaacgatctaattgagaaggctcttggagatcatggcatcatatgcttggaagaccttgtgtacgagatcgccactgtaggcccgcacttccgagaagcatctaggttcctcatgcccttccagctcaagtgtccggagaggaggctgcagatgaagaggaaaccgtacagggatggtggcgactcaggcaaccggggcgacaaagtcaacgaactaattgaaaaattgaattaaagcagagttgttcgcttcggactaatctatagagacaaaaatactgtataagtagtagaaactggtacggattaaaaccaagcgaacagacttgtctctctctagttgtgattttgtggtggagtgatggatctgttactttgtcagttttgtaatagcatagctggatgtaatctcgaggtgctgtttggtttacgaaatataatgctaacgataatgattcacacc

SEQ ID NO: 17359 - protein, 283 aa, Zea mays subsp. mays
  peptide (1)..(283): Ceres Seq. ID no. 12417529
  misc_feature (124)..(175): Pfam Name: Ribosomal protein L30p/L7e Pfam Description: Ribosomal protein L30p/L7e
  misc_feature (48)..(283): Homolog of NCBI NO: 38346542 NR Description: OSJNBa0035M09.3 [Oryza sativa (japonica
  misc_feature (48)..(283): Homolog of NCBI NO: 30689623 NR Description: 60S ribosomal protein L7 (RPL7C) [Arabidopsis
  misc_feature (48)..(283): Homolog of NCBI NO: 30689617 NR Description: 60S ribosomal protein L7 (RPL7C) [Arabidopsis
  misc_feature (48)..(283): Homolog of NCBI NO: 27311547 NR Description: Unknown protein [Arabidopsis thaliana]
  misc_feature (46)..(283): Homolog of NCBI NO: 38637548 NR Description: putative 60S ribosomal protein L7
  misc_feature (48)..(283): Homolog of NCBI NO: 445613 NR Description: ribosomal protein L7
  misc_feature (48)..(283): Homolog of NCBI NO: 15231288 NR Description: ribosomal protein, putative
  misc_feature (45)..(283): Homolog of NCBI NO: 15220825 NR Description: ribosomal protein L7, putative; protein id:
  misc_feature (48)..(283): Homolog of NCBI NO: 15226212 NR Description: putative ribosomal protein L7
  misc_feature (36)..(283): Homolog of NCBI NO: 38636688 NR Description: putative 60S ribosomal protein L7 (RPL7A)
DFETLASLFLSGRRLPPEGEKMGAGGEEAPRIIVPMAVEGTPNQLAFVEESKLQKRKENVDWAVRNRERRAAKRQRIRDKHKVAVRRPEEFVTAFRNKERDFLRMRTRIKVRSQPPVEALGSRLVFAIRIPGSVDLHPHIRKVLRKLRLTKVLTGVFLRATELTLKRLLVVEPFVTYGFPNLKSVKELIYKKGRGFFDMEPFPLTSNDLIEKALGDHGIICLEDLVYEIATVGPHFREASRFLMPFQLKCPERRLQMKRKPYRDGGDSGNRGDKVNELIEKLN

SEQ ID NO: 17360 - protein, 262 aa, Zea mays subsp. mays
  peptide (1)..(262): Ceres Seq. ID no. 12417530
  misc_feature (103)..(154): Pfam Name: Ribosomal protein L30p/L7e Pfam Description: Ribosomal protein L30p/L7e
  misc_feature (27)..(262): Homolog of NCBI NO: 38346542 NR Description: OSJNBa0035M09.3 [Oryza sativa (japonica
  misc_feature (27)..(262): Homolog of NCBI NO: 30689623 NR Description: 60S ribosomal protein L7 (RPL7C) [Arabidopsis
  misc_feature (27)..(262): Homolog of NCBI NO: 30689617 NR Description: 60S ribosomal protein L7 (RPL7C) [Arabidopsis
  misc_feature (27)..(262): Homolog of NCBI NO: 27311547 NR Description: Unknown protein [Arabidopsis thaliana]
  misc_feature (25)..(262): Homolog of NCBI NO: 38637548 NR Description: putative 60S ribosomal protein L7
  misc_feature (27)..(262): Homolog of NCBI NO: 445613 NR Description: ribosomal protein L7
  misc_feature (27)..(262): Homolog of NCBI NO: 15231288 NR Description: ribosomal protein, putative
  misc_feature (24)..(262): Homolog of NCBI NO: 15220825 NR Description: ribosomal protein L7, putative; protein id:
  misc_feature (27)..(262): Homolog of NCBI NO: 15226212 NR Description: putative ribosomal protein L7
  misc_feature (15)..(262): Homolog of NCBI NO: 38636688 NR Description: putative 60S ribosomal protein L7 (RPL7A)
MGAGGEEAPRIIVPMAVEGTPNQLAFVEESKLQKRKENVDWAVRNRERRAAKRQRIRDKHKVAVRRPEEFVTAFRNKERDFLRMRTRIKVRSQPPVEALGSRLVFAIRIPGSVDLHPHIRKVLRKLRLTKVLTGVFLRATELTLKRLLVVEPFVTYGFPNLKSVKELIYKKGRGFFDMEPFPLTSNDLIEKALGDHGIICLEDLVYEIATVGPHFREASRFLMPFQLKCPERRLQMKRKPYRDGGDSGNRGDKVNELIEKLN

SEQ ID NO: 17361 - protein, 248 aa, Zea mays subsp. mays
  peptide (1)..(248): Ceres Seq. ID no. 12417531
  misc_feature (89)..(140): Pfam Name: Ribosomal protein L30p/L7e Pfam Description: Ribosomal protein L30p/L7e
  misc_feature (13)..(248): Homolog of NCBI NO: 38346542 NR Description: OSJNBa0035M09.3 [Oryza sativa (japonica
  misc_feature (13)..(248): Homolog of NCBI NO: 30689623 NR Description: 60S ribosomal protein L7 (RPL7C) [Arabidopsis
  misc_feature (13)..(248): Homolog of NCBI NO: 30689617 NR Description: 60S ribosomal protein L7 (RPL7C) [Arabidopsis
  misc_feature (13)..(248): Homolog of NCBI NO: 27311547 NR Description: Unknown protein [Arabidopsis thaliana]
  misc_feature (11)..(248): Homolog of NCBI NO: 38637548 NR Description: putative 60S ribosomal protein L7
  misc_feature (13)..(248): Homolog of NCBI NO: 445613 NR Description: ribosomal protein L7
  misc_feature (13)..(248): Homolog of NCBI NO: 15231288 NR Description: ribosomal protein, putative
  misc_feature (10)..(248): Homolog of NCBI NO: 15220825 NR Description: ribosomal protein L7, putative; protein id:
  misc_feature (13)..(248): Homolog of NCBI NO: 15226212 NR Description: putative ribosomal protein L7
  misc_feature (1)..(248): Homolog of NCBI NO: 38636688 NR Description: putative 60S ribosomal protein L7 (RPL7A)
MAVEGTPNQLAFVEESKLQKRKENVDWAVRNRERRAAKRQRIRDKHKVAVRRPEEFVTAFRNKERDFLRMRTRIKVRSQPPVEALGSRLVFAIRIPGSVDLHPHIRKVLRKLRLTKVLTGVFLRATELTLKRLLVVEPFVTYGFPNLKSVKELIYKKGRGFFDMEPFPLTSNDLIEKALGDHGIICLEDLVYEIATVGPHFREASRFLMPFQLKCPERRLQMKRKPYRDGGDSGNRGDKVNELIEKLN

SEQ ID NO: 17362 - DNA, 2740 bp, Zea mays subsp. mays
  misc_feature (1)..(2740): Ceres Seq. ID no. 12362470
  misc_feature: MA Experiment ID: 108535 Result: Up-regulated in Transcription
  misc_feature: MA Experiment 108535 PARAMETER Experiment Name: Zm_Meristem_P Parameter: Age (day) Value: 8
  misc_feature: MA Experiment 108535 PARAMETER Experiment Name: Zm_Meristem_P Parameter: Organism Value: Zea mays
  misc_feature: MA Experiment 108535 PARAMETER Experiment Name: Zm_Meristem_P Parameter: Plant Line Value: 35A19
  misc_feature: MA Experiment 108535 PARAMETER Experiment Name: Zm_Meristem_P Parameter: Tissue Value: Root Meristem vs. Above Root Meristem
  misc_feature: MA Experiment ID: 20000488 Result: Up-regulated in Transcription
  misc_feature: MA Experiment 20000488 PARAMETER Experiment Name: Zm_50mM_NH4NO3_L_to_H_P Parameter: Organism Value: Zea mays
  misc_feature: MA Experiment 20000488 PARAMETER Experiment Name: Zm_50mM_NH4NO3_L_to_H_P Parameter: Timepoint (hr) Value: 8
  misc_feature: MA Experiment 20000488 PARAMETER Experiment Name: Zm_50mM_NH4NO3_L_to_H_P Parameter: Tissue Value: Leaves
  misc_feature: MA Experiment 20000488 PARAMETER Experiment Name: Zm_50mM_NH4NO3_L_to_H_P Parameter: Treatment Value: 50mM NH4NO3 vs. 100mM Mannitol
  misc_feature: MA Experiment ID: 20000626 Result: Up-regulated in Transcription
  misc_feature: MA Experiment 20000626 PARAMETER Experiment Name: Zm_Herbicide-Treatments_P Parameter: Timepoint (hr) Value: 12
  misc_feature: MA Experiment 20000626 PARAMETER Experiment Name: Zm_Herbicide-Treatments_P Parameter: Tissue Value: Aerial
  misc_feature: MA Experiment 20000626 PARAMETER Experiment Name: Zm_Herbicide-Treatments_P Parameter: Treatment Value: Roundup vs. No Treatment
gcacgagaccattacctagaacatcctaatcgaaaaacactcctgaagtgcggaaatccaaagtgtgttgcgttgcctgcccgccgccaaaacccataaaccctaccctctacagcgcctccgtcgctcgctcccggcggcgatggggggtgggccgcgcacgttcccgggcgggctgtctaagtggcagtacaaacgcatgcacgagaagctggcgcggcagaagcagcgggggctcctccgccacgagaagcagctctacctagcccgcctccgctccgagatccgcgcctcccgcctccctggcgccgccgcggaagctccaccggggggcgaggggcccacctcgtcgcgcgcccacatccgcgcccttgccgaccgcttccgcaggcccggcgccgaggacctctggaacgaggacgacgggcccctccgccgcgtcaagcggccgcccactgggatcgcgtcgggtgtccggcaccagcagcagcagttggactcggggaagccccgcggaggaccgagttgggaggacctgacctctctggatcaaccgaggcctttagacaggggaaaagggccgacctcggccgcgttcaatccgagaagagagtacctaacggtggtggcgccctggtgcccgcgttgggatccgcgacctctcggtttcgttgctcccaaaaagtcttatccggtgatgactcgttgctccgtgagttgccagccatgtgtcgacctgaggccattggttgctagtgggcttactgaggatgggaatggaaggaaggacacgccattggcacagtttaatcaggagaggttctactcggtggctgcgaggcgattcggcaggaaatggagaccagattcgtcggaccaggatgacaagggcacgtctgcgcccaagaagaatctgaggttcggaaaaaagtttggggcttcgagcgaagaggattcagaaattgacgagtctggggacacaggtgccatcaggaggaggtggagcagtgctgctctcaggaactgcgatgtgaagaaggaaaggcgggtgctcaagtcttacgaggaggaaagcaatgatctcgcgggtagaatccaagagctgcgagaggagattagaaatagggaggttttgggcactgagaggaggcgttacgagtccaggggtgaatctctgcttaccagtaaaagatttgatcagtgtggtgtctccgcgctgacagtcaaagcacttactgatgctggatatgtacagacaactgtggttcaagaggcagctcttcctatatgtcttgaaggtaaagatgttcttgtcaaggccaaaactggaaccggcaaaagtgcagcttttctgcttcctgcaattgaatcagtcttgaatgctatgaagagcaatacaaatcagcgagtatctccaatatttgctcttgtcctatgccctacaagagagcttgctattcagcttacagctgaagcaaatgtcttgttaaagtaccatgaaggaattggtgttcaatctcttattggtggcactagattcaagccgatcagagacgattagaatctgatccatgccagattttagttgcaacacctggtagactgctggatcacattgaaaacaaatcatcattctctgttcgtttgatgagattgaaattgcttgtgttggatgaagctgatcatttgctagatctgggtttccgtaaagacatagaaaagattgtcgataccttgccacgtcaaagacaaacattgctcttctcagctactattccaaaagaggttcgaagagtttcacagctagtattaaagagggatcacgttttttgttgacacagtgggccttggagctgttgaaaccccaactaaggttcagcagtcatgtcttgtggtgccacatgagctgcattttcatacggttcatcacctgcttcgagagcatattgatcgtgaagttgattacaaggttattgttttctgcacgacagccatggtgactgagtttatgtatatcatgcttcgagatttgaagttaaatgtcagggaaattcactcgaggaaacctcagctctatagaactcgcatatctgaagagttccggggctctaaccgcatagttctcgtaacgtcagatgtttctactcgtggggtgaactatccagatgtcacccttgtgattcaggttggtgttcctcccgatagagagcattacatccatcggcttggaaggactgcaagggaaggtaaatctggcaagggaattcttttgcttgcgccatgggaacaatacttcttggacgagataggcgatctcccgattgacaagtatccagcaccagacgttgaccaggagatgaagcaaaaggttgacgattcaatagagatggttgacatgagcatcaaagaagcagcataccatgcgtggctgggttactacaactccatcgctgacataggtagagataaaagaatggttgttgacctagcaaatcgatttggtgcctcgattggcctggagaagcctccagcgatataccggaagaccgctctgaagatggggctcaaagatgtccctgggattcgaataaggaaatgacatgttcctccacagcaataagggaccttttagcctcgacattggattggaggacatgtaattgaattgggttcaaaatatacaaaattactcacctctgttgcaatgacctaactccttaaatgcatcttcgatttcttc

SEQ ID NO: 17363 - protein, 472 aa, Zea mays subsp. mays
  peptide (1)..(472): Ceres Seq. ID no. 12362471
  misc_feature (362)..(467): Pfam Name: DEAD/DEAH box helicase Pfam Description: DEAD/DEAH box helicase
  misc_feature (282)..(465): Homolog of NCBI NO: 34912712 NR Description: putative RNA helicase [Oryza sativa (japonica
  misc_feature (343)..(465): Homolog of NCBI NO: 14334882 NR Description: putative RNA helicase [Arabidopsis thaliana]
  misc_feature (343)..(465): Homolog of NCBI NO: 15242323 NR Description: DEAD/DEAH box RNA helicase, putative; protein id:
  misc_feature (306)..(465): Homolog of NCBI NO: 30682500 NR Description: DEAD box RNA helicase, putative [Arabidopsis
  misc_feature (306)..(465): Homolog of NCBI NO: 9759355 NR Description: RNA helicase-like protein [Arabidopsis thaliana]
  misc_feature (334)..(465): Homolog of NCBI NO: 15242854 NR Description: DEAD/DEAH box RNA helicase, putative; protein id:
  misc_feature (1)..(99): Homolog of NCBI NO: 15226161 NR Description: DEAD/DEAH box RNA helicase, putative; protein id:
  misc_feature (262)..(467): Homolog of NCBI NO: 15226161 NR Description: DEAD/DEAH box RNA helicase, putative; protein id:
  misc_feature (1)..(110): Homolog of NCBI NO: 15221724 NR Description: DEAD/DEAH box RNA helicase, putative; protein id:
  misc_feature (262)..(467): Homolog of NCBI NO: 15221724 NR Description: DEAD/DEAH box RNA helicase, putative; protein id:
MGGGPRTFPGGLSKWQYKRMHEKLARQKQRGLLRHEKQLYLARLRSEIRASRLPGAAAEAPPGGEGPTSSRAHIRALADRFRRPGAEDLWNEDDGPLRRVKRPPTGIASGVRHQQQQLDSGKPRGGPSWEDLTSLDQPRPLDRGKGPTSAAFNPRREYLTVVAPWCPRWDPRPLGFVAPKKSYPVMTRCSVSCQPCVDLRPLVASGLTEDGNGRKDTPLAQFNQERFYSVAARRFGRKWRPDSSDQDDKGTSAPKKNLRFGKKFGASSEEDSEIDESGDTGAIRRRWSSAALRNCDVKKERRVLKSYEEESNDLAGRIQELREEIRNREVLGTERRRYESRGESLLTSKRFDQCGVSALTVKALTDAGYVQTTVVQEAALPICLEGKDVLVKAKTGTGKSAAFLLPAIESVLNAMKSNTNQRVSPIFALVLCPTRELAIQLTAEANVLLKYHEGIGVQSLIGGTRFKPIRDD

SEQ ID NO: 17364 - protein, 453 aa, Zea mays subsp. mays
  peptide (1)..(453): Ceres Seq. ID no. 12362472
  misc_feature (343)..(448): Pfam Name: DEAD/DEAH box helicase Pfam Description: DEAD/DEAH box helicase
  misc_feature (263)..(446): Homolog of NCBI NO: 34912712 NR Description: putative RNA helicase [Oryza sativa (japonica
  misc_feature (324)..(446): Homolog of NCBI NO: 14334882 NR Description: putative RNA helicase [Arabidopsis thaliana]
  misc_feature (324)..(446): Homolog of NCBI NO: 15242323 NR Description: DEAD/DEAH box RNA helicase, putative; protein id:
  misc_feature (287)..(446): Homolog of NCBI NO: 30682500 NR Description: DEAD box RNA helicase, putative [Arabidopsis
  misc_feature (287)..(446): Homolog of NCBI NO: 9759355 NR Description: RNA helicase-like protein [Arabidopsis thaliana]
  misc_feature (315)..(446): Homolog of NCBI NO: 15242854 NR Description: DEAD/DEAH box RNA helicase, putative; protein id:
  misc_feature (1)..(80): Homolog of NCBI NO: 15226161 NR Description: DEAD/DEAH box RNA helicase, putative; protein id:
  misc_feature (243)..(448): Homolog of NCBI NO: 15226161 NR Description: DEAD/DEAH box RNA helicase, putative; protein id:
  misc_feature (1)..(91): Homolog of NCBI NO: 15221724 NR Description: DEAD/DEAH box RNA helicase, putative; protein id:
  misc_feature (243)..(448): Homolog of NCBI NO: 15221724 NR Description: DEAD/DEAH box RNA helicase, putative; protein id:
MHEKLARQKQRGLLRHEKQLYLARLRSEIRASRLPGAAAEAPPGGEGPTSSRAHIRALADRFRRPGAEDLWNEDDGPLRRVKRPPTGIASGVRHQQQQLDSGKPRGGPSWEDLTSLDQPRPLDRGKGPTSAAFNPRREYLTVVAPWCPRWDPRPLGFVAPKKSYPVMTRCSVSCQPCVDLRPLVASGLTEDGNGRKDTPLAQFNQERFYSVAARRFGRKWRPDSSDQDDKGTSAPKKNLRFGKKFGASSEEDSEIDESGDTGAIRRRWSSAALRNCDVKKERRVLKSYEEESNDLAGRIQELREEIRNREVLGTERRRYESRGESLLTSKRFDQCGVSALTVKALTDAGYVQTTVVQEAALPICLEGKDVLVKAKTGTGKSAAFLLPAIESVLNAMKSNTNQRVSPIFALVLCPTRELAIQLTAEANVLLKYHEGIGVQSLIGGTRFKPIRDD

SEQ ID NO: 17365 - protein, 287 aa, Zea mays subsp. mays
  peptide (1)..(287): Ceres Seq. ID no. 12362473
  misc_feature (177)..(282): Pfam Name: DEAD/DEAH box helicase Pfam Description: DEAD/DEAH box helicase
  misc_feature (243)..(280): Homolog of NCBI NO: 11358810 NR Description: RNA helicase RH31 [imported] - Arabidopsis
  misc_feature (159)..(280): Homolog of NCBI NO: 34912714 NR Description: putative RNA helicase [Oryza sativa (japonica
  misc_feature (97)..(280): Homolog of NCBI NO: 34912712 NR Description: putative RNA helicase [Oryza sativa (japonica
  misc_feature (158)..(280): Homolog of NCBI NO: 14334882 NR Description: putative RNA helicase [Arabidopsis thaliana]
  misc_feature (158)..(280): Homolog of NCBI NO: 15242323 NR Description: DEAD/DEAH box RNA helicase, putative; protein id:
  misc_feature (121)..(280): Homolog of NCBI NO: 30682500 NR Description: DEAD box RNA helicase, putative [Arabidopsis
  misc_feature (121)..(280): Homolog of NCBI NO: 9759355 NR Description: RNA helicase-like protein [Arabidopsis thaliana]
  misc_feature (149)..(280): Homolog of NCBI NO: 15242854 NR Description: DEAD/DEAH box RNA helicase, putative; protein id:
  misc_feature (77)..(282): Homolog of NCBI NO: 15226161 NR Description: DEAD/DEAH box RNA helicase, putative; protein id:
  misc_feature (77)..(282): Homolog of NCBI NO: 15221724 NR Description: DEAD/DEAH box RNA helicase, putative; protein id:
MTRCSVSCQPCVDLRPLVASGLTEDGNGRKDTPLAQFNQERFYSVAARRFGRKWRPDSSDQDDKGTSAPKKNLRFGKKFGASSEEDSEIDESGDTGAIRRRWSSAALRNCDVKKERRVLKSYEEESNDLAGRIQELREEIRNREVLGTERRRYESRGESLLTSKRFDQCGVSALTVKALTDAGYVQTTVVQEAALPICLEGKDVLVKAKTGTGKSAAFLLPAIESVLNAMKSNTNQRVSPIFALVLCPTRELAIQLTAEANVLLKYHEGIGVQSLIGGTRFKPIRDD

SEQ ID NO: 17366 - DNA, 2275 bp, Zea mays subsp. mays; identical to SEQ ID NO: 17180
  misc_feature (1)..(2275): Ceres Seq. ID no. 13495441
  misc_feature: MA Experiment ID: 20000488 Result: Down-regulated in Transcription
  misc_feature: MA Experiment 20000488 PARAMETER Experiment Name: Zm_50mM_NH4NO3_L_to_H_P Parameter: Organism Value: Zea mays
  misc_feature: MA Experiment 20000488 PARAMETER Experiment Name: Zm_50mM_NH4NO3_L_to_H_P Parameter: Timepoint (hr) Value: 8
  misc_feature: MA Experiment 20000488 PARAMETER Experiment Name: Zm_50mM_NH4NO3_L_to_H_P Parameter: Tissue Value: Leaves
  misc_feature: MA Experiment 20000488 PARAMETER Experiment Name: Zm_50mM_NH4NO3_L_to_H_P Parameter: Treatment Value: 50mM NH4NO3 vs. 100mM Mannitol
  misc_feature: MA Experiment ID: 20000535 Result: Up-regulated in Transcription
  misc_feature: MA Experiment 20000535 PARAMETER Experiment Name: Zm_Hybrid_Seed_Dev_P Parameter: DAP Value: 30 vs. 12
  misc_feature: MA Experiment 20000535 PARAMETER Experiment Name: Zm_Hybrid_Seed_Dev_P Parameter: Organism Value: Zea mays
  misc_feature: MA Experiment 20000535 PARAMETER Experiment Name: Zm_Hybrid_Seed_Dev_P Parameter: Plant Line Value: 35A19
  misc_feature: MA Experiment 20000535 PARAMETER Experiment Name: Zm_Hybrid_Seed_Dev_P Parameter: Tissue Value: Embryo vs. Unfert Floret

SEQ ID NO: 17367 - protein, 574 aa, Zea mays subsp. mays; identical to SEQ ID NO: 17181
  peptide (1)..(574): Ceres Seq. ID no. 13495442
  misc_feature (115)..(504): Pfam Name: POT family Pfam Description: POT family
  misc_feature (115)..(504): Pfam Name: POT family Pfam Description: POT family
  misc_feature (21)..(559): Homolog of NCBI NO: 30683214 NR Description: nitrate transporter -related [Arabidopsis
  misc_feature (20)..(574): Homolog of NCBI NO: 30687920 NR Description: oligopeptide transporter -related [Arabidopsis
  misc_feature (42)..(567): Homolog of NCBI NO: 38567969 NR Description: OSJNBa0093F12.10 [Oryza sativa (japonica
  misc_feature (1)..(566): Homolog of NCBI NO: 31088360 NR Description: peptide transporter 1 [Vicia faba]
  misc_feature (24)..(562): Homolog of NCBI NO: 30696666 NR Description: oligopeptide transporter -related [Arabidopsis
  misc_feature (1)..(566): Homolog of NCBI NO: 31088360 NR Description: peptide transporter 1 [Vicia faba]
  misc_feature (1)..(566): Homolog of NCBI NO: 15226861 NR Description: histidine transport protein (PTR2-B) [Arabidopsis
  misc_feature (1)..(566): Homolog of NCBI NO: 15076661 NR Description: peptide transporter [Oryza sativa (japonica
  misc_feature (42)..(567): Homolog of NCBI NO: 38567969 NR Description: OSJNBa0093F12.10 [Oryza sativa (japonica
  misc_feature (20)..(574): Homolog of NCBI NO: 30687920 NR Description: oligopeptide transporter -related [Arabidopsis
  misc_feature (21)..(559): Homolog of NCBI NO: 30683214 NR Description: nitrate transporter -related [Arabidopsis
  misc_feature (1)..(548): Homolog of NCBI NO: 37530496 NR Description: putative LeOPT1 - oligopeptide transporter
  misc_feature (1)..(574): Homolog of NCBI NO: 37530498 NR Description: putative LeOPT1 - oligopeptide transporter
  misc_feature (19)..(562): Homolog of NCBI NO: 4102839 NR Description: LeOPT1 [Lycopersicon esculentum]
  misc_feature (24)..(562): Homolog of NCBI NO: 30696666 NR Description: oligopeptide transporter -related [Arabidopsis
  misc_feature (1)..(566): Homolog of NCBI NO: 15226861 NR Description: histidine transport protein (PTR2-B) [Arabidopsis
  misc_feature (19)..(562): Homolog of NCBI NO: 4102839 NR Description: LeOPT1 [Lycopersicon esculentum]
  misc_feature (1)..(566): Homolog of NCBI NO: 15076661 NR Description: peptide transporter [Oryza sativa (japonica
  misc_feature (1)..(574): Homolog of NCBI NO: 37530498 NR Description: putative LeOPT1 - oligopeptide transporter
  misc_feature (1)..(548): Homolog of NCBI NO: 37530496 NR Description: putative LeOPT1 - oligopeptide transporter

SEQ ID NO: 17368 - protein, 523 aa, Zea mays subsp. mays; identical to SEQ ID NO: 17182
  peptide (1)..(523): Ceres Seq. ID no. 13495443
  misc_feature (64)..(453): Pfam Name: POT family Pfam Description: POT family
  misc_feature (64)..(453): Pfam Name: POT family Pfam Description: POT family
  misc_feature (1)..(508): Homolog of NCBI NO: 30683214 NR Description: nitrate transporter -related [Arabidopsis
  misc_feature (1)..(523): Homolog of NCBI NO: 30687920 NR Description: oligopeptide transporter -related [Arabidopsis
  misc_feature (1)..(516): Homolog of NCBI NO: 38567969 NR Description: OSJNBa0093F12.10 [Oryza sativa (japonica
  misc_feature (1)..(515): Homolog of NCBI NO: 31088360 NR Description: peptide transporter 1 [Vicia faba]
  misc_feature (1)..(511): Homolog of NCBI NO: 30696666 NR Description: oligopeptide transporter -related [Arabidopsis
  misc_feature (1)..(508): Homolog of NCBI NO: 30683214 NR Description: nitrate transporter -related [Arabidopsis
  misc_feature (1)..(516): Homolog of NCBI NO: 38567969 NR Description: OSJNBa0093F12.10 [Oryza sativa (japonica
  misc_feature (1)..(511): Homolog of NCBI NO: 30696666 NR Description: oligopeptide transporter -related [Arabidopsis
  misc_feature (1)..(497): Homolog of NCBI NO: 37530496 NR Description: putative LeOPT1 - oligopeptide transporter
  misc_feature (1)..(523): Homolog of NCBI NO: 37530498 NR Description: putative LeOPT1 - oligopeptide transporter
  misc_feature (1)..(515): Homolog of NCBI NO: 15076661 NR Description: peptide transporter [Oryza sativa (japonica
  misc_feature (1)..(511): Homolog of NCBI NO: 4102839 NR Description: LeOPT1 [Lycopersicon esculentum]
  misc_feature (1)..(515): Homolog of NCBI NO: 15226861 NR Description: histidine transport protein (PTR2-B) [Arabidopsis
  misc_feature (1)..(515): Homolog of NCBI NO: 31088360 NR Description: peptide transporter 1 [Vicia faba]
  misc_feature (1)..(523): Homolog of NCBI NO: 30687920 NR Description: oligopeptide transporter -related [Arabidopsis
  misc_feature (1)..(515): Homolog of NCBI NO: 15226861 NR Description: histidine transport protein (PTR2-B) [Arabidopsis
  misc_feature (1)..(511): Homolog of NCBI NO: 4102839 NR Description: LeOPT1 [Lycopersicon esculentum]
  misc_feature (1)..(515): Homolog of NCBI NO: 15076661 NR Description: peptide transporter [Oryza sativa (japonica
  misc_feature (1)..(523): Homolog of NCBI NO: 37530498 NR Description: putative LeOPT1 - oligopeptide transporter
  misc_feature (1)..(497): Homolog of NCBI NO: 37530496 NR Description: putative LeOPT1 - oligopeptide transporter

SEQ ID NO: 17369 - protein, 457 aa, Zea mays subsp. mays; identical to SEQ ID NO: 17183
  peptide (1)..(457): Ceres Seq. ID no. 13495444
  misc_feature (1)..(387): Pfam Name: POT family Pfam Description: POT family
  misc_feature (1)..(387): Pfam Name: POT family Pfam Description: POT family
  misc_feature (1)..(442): Homolog of NCBI NO: 30683214 NR Description: nitrate transporter -related [Arabidopsis
  misc_feature (1)..(457): Homolog of NCBI NO: 30687920 NR Description: oligopeptide transporter -related [Arabidopsis
  misc_feature (1)..(450): Homolog of NCBI NO: 38567969 NR Description: OSJNBa0093F12.10 [Oryza sativa (japonica
  misc_feature (1)..(449): Homolog of NCBI NO: 31088360 NR Description: peptide transporter 1 [Vicia faba]
  misc_feature (1)..(445): Homolog of NCBI NO: 30696666 NR Description: oligopeptide transporter -related [Arabidopsis
  misc_feature (1)..(442): Homolog of NCBI NO: 30683214 NR Description: nitrate transporter -related [Arabidopsis
  misc_feature (1)..(450): Homolog of NCBI NO: 38567969 NR Description: OSJNBa0093F12.10 [Oryza sativa (japonica
  misc_feature (1)..(445): Homolog of NCBI NO: 30696666 NR Description: oligopeptide transporter -related [Arabidopsis
  misc_feature (1)..(431): Homolog of NCBI NO: 37530496 NR Description: putative LeOPT1 - oligopeptide transporter
  misc_feature (1)..(457): Homolog of NCBI NO: 37530498 NR Description: putative LeOPT1 - oligopeptide transporter
  misc_feature (1)..(449): Homolog of NCBI NO: 15076661 NR Description: peptide transporter [Oryza sativa (japonica
  misc_feature (1)..(445): Homolog of NCBI NO: 4102839 NR Description: LeOPT1 [Lycopersicon esculentum]
  misc_feature (1)..(449): Homolog of NCBI NO: 15226861 NR Description: histidine transport protein (PTR2-B) [Arabidopsis
  misc_feature (1)..(449): Homolog of NCBI NO: 31088360 NR Description: peptide transporter 1 [Vicia faba]
  misc_feature (1)..(457): Homolog of NCBI NO: 30687920 NR Description: oligopeptide transporter -related [Arabidopsis
  misc_feature (1)..(449): Homolog of NCBI NO: 15226861 NR Description: histidine transport protein (PTR2-B) [Arabidopsis
  misc_feature (1)..(445): Homolog of NCBI NO: 4102839 NR Description: LeOPT1 [Lycopersicon esculentum]
  misc_feature (1)..(449): Homolog of NCBI NO: 15076661 NR Description: peptide transporter [Oryza sativa (japonica
  misc_feature (1)..(457): Homolog of NCBI NO: 37530498 NR Description: putative LeOPT1 - oligopeptide transporter
  misc_feature (1)..(431): Homolog of NCBI NO: 37530496 NR Description: putative LeOPT1 - oligopeptide transporter

SEQ ID NO: 17370 - DNA, 919 bp, Zea mays subsp. mays
  misc_feature (1)..(919): Ceres Seq. ID no. 12435382
  misc_feature: MA Experiment ID: 108535 Result: Up-regulated in Transcription
  misc_feature: MA Experiment 108535 PARAMETER Experiment Name: Zm_Meristem_P Parameter: Age (day) Value: 8
  misc_feature: MA Experiment 108535 PARAMETER Experiment Name: Zm_Meristem_P Parameter: Organism Value: Zea mays
  misc_feature: MA Experiment 108535 PARAMETER Experiment Name: Zm_Meristem_P Parameter: Plant Line Value: 35A19
  misc_feature: MA Experiment 108535 PARAMETER Experiment Name: Zm_Meristem_P Parameter: Tissue Value: Root Meristem vs. Above Root Meristem
  misc_feature: MA Experiment ID: 20000108 Result: Up-regulated in Transcription
  misc_feature: MA Experiment 20000108 PARAMETER Experiment Name: Zm_Root-Tips_P Parameter: Age (day) Value: 12
  misc_feature: MA Experiment 20000108 PARAMETER Experiment Name: Zm_Root-Tips_P Parameter: Organism Value: Zea mays
  misc_feature: MA Experiment 20000108 PARAMETER Experiment Name: Zm_Root-Tips_P Parameter: Tissue Value: Root tips vs. Root mid region    35
  misc_feature: MA Experiment 20000108 PARAMETER Experiment Name: Zm_Root-Tips_P Parameter: Tissue Value: Root tips vs. Root mid region   Sequence Listing-Misc Features (4)
ctcttcgtctgcagtctgctcgctcgcgattgcgattcccactcagccctccaggctcgaaacctaacccacccgcccggggatcccaagcggcggcggcggcggccatggagccctcccccgtcggcgacggtggctcggcggagcggtggcgcgcggaggcgtcgcgggcgttccagcactacctggaccgcgcggcgccgcacacggcggggcggtgggcgggcacgctcgtggccgcggcggtgtacgcgcttcgggtctactacgtgcgcggcttctacgtcgtcacctacgggctgggcatctacctgctcaacctcctcatcggcttcctctcccccatggtcgacccggagctcgaggcgctcgaggccgggcccgggctccccacccgcggntccgaagagttcaagcccttcgtccgccgcctccccgagttcaagttctggtatgccataacaaaagccttttgcattgctttcgtcatgaccttcttctctgtattcgatgttcctgtcttctggccaatacttctctgttactggattgtgctctttgtcctgacaatgaagcgacaaattatgcatatggncaagtacaantatgtcccattcagctttggaaagcagaggtatngcggaaagaaacgccctggagccagtgcatnaaaagagtaaagaccggagggtcttgtacctcaaagagcaaatgcctgtgttatctgtgaggcattttgctggcatcatggtattttgagtaccagctactgatagtgaatgcacaccatattcactagtggagtctgcagagaagctaaccagacttttgcattggttaatgattcctgtttcacaagtcggtagtttatgtacaatgacatggaacatagctagtaaatcagattctcagttcctct

SEQ ID NO: 17371 - protein, 225 aa, Zea mays subsp. mays
  peptide (1)..(225): Ceres Seq. ID no. 12435383
  misc_feature (42)..(211): Pfam Name: Rer1 family Pfam Description: Rer1 family
  misc_feature (23)..(222): Homolog of NCBI NO: 18400234 NR Description: putative integral membrane protein
  misc_feature (49)..(209): Homolog of NCBI NO: 30680307 NR Description: integral membrane protein -related [Arabidopsis
  misc_feature (49)..(209): Homolog of NCBI NO: 25411844 NR Description: probable integral membrane protein
  misc_feature (49)..(209): Homolog of NCBI NO: 18398679 NR Description: putative integral membrane protein; protein id:
  misc_feature (151)..(210): Homolog of NCBI NO: 35210534 NR Description: putative endoplasmatic reticulum retrieval
  misc_feature (28)..(151): Homolog of NCBI NO: 35210534 NR Description: putative endoplasmatic reticulum retrieval
  misc_feature (36)..(216): Homolog of NCBI NO: 15226596 NR Description: AtRer1B
  misc_feature (36)..(216): Homolog of NCBI NO: 11281669 NR Description: endoplasmatic reticulum retrieval protein Rer1B
  misc_feature (42)..(222): Homolog of NCBI NO: 15234975 NR Description: AtRer1A
  misc_feature (1)..(211): Homolog of NCBI NO: 34894094 NR Description: putative Rer1A protein (AtRer1A)
  misc_feature (133)..(133): Xaa is any aa, unknown or other
  misc_feature (198)..(198): Xaa is any aa, unknown or other
  misc_feature (201)..(201): Xaa is any aa, unknown or other
  misc_feature (213)..(213): Xaa is any aa, unknown or other
  misc_feature (223)..(223): Xaa is any aa, unknown or other
LRLQSARSRLRFPLSPPGSKPNPPARGSQAAAAAAMEPSPVGDGGSAERWRAEASRAFQHYLDRAAPHTAGRWAGTLVAAAVYALRVYYVRGFYVVTYGLGIYLLNLLIGFLSPMVDPELEALEAGPGLPTRXSEEFKPFVRRLPEFKFWYAITKAFCIAFVMTFFSVFDVPVFWPILLCYWIVLFVLTMKRQIMHMXKYXYVPFSFGKQRYXGKKRPGASAXKE

SEQ ID NO: 17372 - protein, 190 aa, Zea mays subsp. mays
  peptide (1)..(190): Ceres Seq. ID no. 12435384
  misc_feature (7)..(176): Pfam Name: Rer1 family Pfam Description: Rer1 family
  misc_feature (1)..(187): Homolog of NCBI NO: 18400234 NR Description: putative integral membrane protein
  misc_feature (14)..(174): Homolog of NCBI NO: 30680307 NR Description: integral membrane protein -related [Arabidopsis
  misc_feature (14)..(174): Homolog of NCBI NO: 25411844 NR Description: probable integral membrane protein
  misc_feature (14)..(174): Homolog of NCBI NO: 18398679 NR Description: putative integral membrane protein; protein id:
  misc_feature (116)..(175): Homolog of NCBI NO: 35210534 NR Description: putative endoplasmatic reticulum retrieval
  misc_feature (1)..(116): Homolog of NCBI NO: 35210534 NR Description: putative endoplasmatic reticulum retrieval
  misc_feature (1)..(181): Homolog of NCBI NO: 15226596 NR Description: AtRer1B
  misc_feature (1)..(181): Homolog of NCBI NO: 11281669 NR Description: endoplasmatic reticulum retrieval protein Rer1B
  misc_feature (7)..(187): Homolog of NCBI NO: 15234975 NR Description: AtRer1A
  misc_feature (1)..(176): Homolog of NCBI NO: 34894094 NR Description: putative Rer1A protein (AtRer1A)
  misc_feature (98)..(98): Xaa is any aa, unknown or other
  misc_feature (163)..(163): Xaa is any aa, unknown or other
  misc_feature (166)..(166): Xaa is any aa, unknown or other
  misc_feature (178)..(178): Xaa is any aa, unknown or other
  misc_feature (188)..(188): Xaa is any aa, unknown or other
MEPSPVGDGGSAERWRAEASRAFQHYLDRAAPHTAGRWAGTLVAAAVYALRVYYVRGFYVVTYGLGIYLLNLLIGFLSPMVDPELEALEAGPGLPTRXSEEFKPFVRRLPEFKFWYAITKAFCIAFVMTFFSVFDVPVFWPILLCYWIVLFVLTMKRQIMHMXKYXYVPFSFGKQRYXGKKRPGASAXKE

SEQ ID NO: 17373 - protein, 153 aa, Zea mays subsp. mays
  peptide (1)..(153): Ceres Seq. ID no. 12435385
  misc_feature (134)..(134): Xaa is any aa, unknown or other
LFVCSLLARDCDSHSALQARNLTHPPGDPKRRRRRPWSPPPSATVARRSGGARRRRGRSSTTWTARRRTRRGGGRARSWPRRCTRFGSTTCAASTSSPTGWASTCSTSSSASSPPWSTRSSRRSRPGPGSPPAXPKSSSPSSAASPSSSSGMP

SEQ ID NO: 17374 - DNA, 1347 bp, Zea mays subsp. mays
  misc_feature (1)..(1347): Ceres Seq. ID no. 12368098
  misc_feature: MA Experiment ID: 108529 Result: Up-regulated in Transcription
  misc_feature: MA Experiment 108529 PARAMETER Experiment Name: Zm_Imbibed_Seeds_P Parameter: Age (day) Value: 5 vs. 2
  misc_feature: MA Experiment 108529 PARAMETER Experiment Name: Zm_Imbibed_Seeds_P Parameter: Organism Value: Zea mays
  misc_feature: MA Experiment 108529 PARAMETER Experiment Name: Zm_Imbibed_Seeds_P Parameter: Plant Line Value: 35A19
  misc_feature: MA Experiment 108529 PARAMETER Experiment Name: Zm_Imbibed_Seeds_P Parameter: Tissue Value: Roots vs. Embryo
  misc_feature: MA Experiment ID: 108535 Result: Down-regulated in Transcription
  misc_feature: MA Experiment 108535 PARAMETER Experiment Name: Zm_Meristem_P Parameter: Age (day) Value: 8
  misc_feature: MA Experiment 108535 PARAMETER Experiment Name: Zm_Meristem_P Parameter: Organism Value: Zea mays
  misc_feature: MA Experiment 108535 PARAMETER Experiment Name: Zm_Meristem_P Parameter: Plant Line Value: 35A19
  misc_feature: MA Experiment 108535 PARAMETER Experiment Name: Zm_Meristem_P Parameter: Tissue Value: Root Meristem vs. Above Root Meristem
  misc_feature: MA Experiment ID: 20000487 Result: Down-regulated in Transcription
  misc_feature: MA Experiment 20000487 PARAMETER Experiment Name: Zm_50mM_NH4NO3_L_to_H_P Parameter: Organism Value: Zea mays
  misc_feature: MA Experiment 20000487 PARAMETER Experiment Name: Zm_50mM_NH4NO3_L_to_H_P Parameter: Timepoint (hr) Value: 4
  misc_feature: MA Experiment 20000487 PARAMETER Experiment Name: Zm_50mM_NH4NO3_L_to_H_P Parameter: Tissue Value: Leaves
  misc_feature: MA Experiment 20000487 PARAMETER Experiment Name: Zm_50mM_NH4NO3_L_to_H_P Parameter: Treatment Value: 50mM NH4NO3 vs. 100mM Mannitol
  misc_feature: MA Experiment ID: 20000488 Result: Down-regulated in Transcription
  misc_feature: MA Experiment 20000488 PARAMETER Experiment Name: Zm_50mM_NH4NO3_L_to_H_P Parameter: Organism Value: Zea mays
  misc_feature: MA Experiment 20000488 PARAMETER Experiment Name: Zm_50mM_NH4NO3_L_to_H_P Parameter: Timepoint (hr) Value: 8
  misc_feature: MA Experiment 20000488 PARAMETER Experiment Name: Zm_50mM_NH4NO3_L_to_H_P Parameter: Tissue Value: Leaves
  misc_feature: MA Experiment 20000488 PARAMETER Experiment Name: Zm_50mM_NH4NO3_L_to_H_P Parameter: Treatment Value: 50mM NH4NO3 vs. 100mM Mannitol
  misc_feature: MA Experiment ID: 20000535 Result: Down-regulated in Transcription
  misc_feature: MA Experiment 20000535 PARAMETER Experiment Name: Zm_Hybrid_Seed_Dev_P Parameter: DAP Value: 30 vs. 12
  misc_feature: MA Experiment 20000535 PARAMETER Experiment Name: Zm_Hybrid_Seed_Dev_P Parameter: Organism Value: Zea mays
  misc_feature: MA Experiment 20000535 PARAMETER Experiment Name: Zm_Hybrid_Seed_Dev_P Parameter: Plant Line Value: 35A19
  misc_feature: MA Experiment 20000535 PARAMETER Experiment Name: Zm_Hybrid_Seed_Dev_P Parameter: Tissue Value: Embryo vs. Unfert Floret
aaacacaaatggcgtattggcgttccacagaacaatggcacggtgtctatgggtaggcaagaacgcagccgctagcggcgctggcgcggccattcccaaacctccggctccccatcccccggcaccgcgatctctgccggccgtggacgactgcccgactctcgcattcctgcggccgaagccgaccgcggtcgggtacgccaccgcgaccgtcccgctcccggcgcactgcttccccgccctccccgtcggcgaccacctcttccaccgcctccagctcgacgggcttatacctcccgtgagcacggcgacgcggccgccggagcatgcgggcgtgacggtggagcaggcgaggaaggtggcgagggcggccgagatggaggtggcgagggcgaggctgaggtcgaacgcccagagcgtcgtgtccgggtcggaattcgccgcgctctgcgtcgacattgccggcggcgtcgagggaggccagccggctggtccgtgcgctggacgagtccggcgtcgtcatcgtcctcggcgacgccgtcttcctccgccccgacatgaaatcgggatcttgcgacgataaatcggagcgaacggcgatactggaacaaacggaaagagagagagcaaaggaaagaaaaaaagaaacagcggcggcggcacgagtcgagggccgccagaacctaggcatgcgccgccgacagcaaggtagcgaaggccatcgggagcatcctccccgggaaacagcagctgcaggcgccgcgagccggagacgggagcgaggcgcgcaagcgcgagctggaggctatggaagctcagaaggcggcgatcgacgcggacgcggccgcgcaggtgcggcgcgagctgtggtgcgggctgggcctgctggcgacgcagacgctggggttcatgcggctcaccttctgggagctgtcgtgggacgtgatggagccggtgtgcttctacgccacgtcgctctacttcatgtccggctacgccttcttcatgcgcacggccacggagccgtccttcgagggcttctaccggagccgcttcgcgtccaagcagcgccgcctcatgcgggcgcgcgggttcgacgtcgaccgctacaacgccctgcggaagggccaggggcaggggctcgttcccctcgccgaccccgacgcgtgtaggcacgtcagccatgtacaatagcgcgtcgctccgcccggacgaggtcgcttgggataaacgtgcgtcgcatcgtcggctcaccgtctaatcgtgaagcaatagctctctgtacagattcaggaggacgagccattgtagaagaaggctcgtcagaacggaaactatatctatact

SEQ ID NO: 17375 - protein, 204 aa, Zea mays subsp. mays
  peptide (1)..(204): Ceres Seq. ID no. 12368099
  misc_feature (1)..(31): Homolog of NCBI NO: 34909244 NR Description: B1148D12.10 [Oryza sativa (japonica
  misc_feature (1)..(29): Homolog of NCBI NO: 20330769 NR Description: Hypothetical protein [Oryza sativa (japonica
MKSGSCDDKSERTAILEQTERERAKERKKETAAAARVEGRQNLGMRRRQQGSEGHREHPPRETAAAGAASRRRERGAQARAGGYGSSEGGDRRGRGRAGAARAVVRAGPAGDADAGVHAAHLLGAVVGRDGAGVLLRHVALLHVRLRLLHAHGHGAVLRGLLPEPLRVQAAPPHAGARVRRRPLQRPAEGPGAGARSPRRPRRV

SEQ ID NO: 17376 - protein, 193 aa, Zea mays subsp. mays
  peptide (1)..(193): Ceres Seq. ID no. 12368100
  misc_feature (82)..(160): Homolog of NCBI NO: 15239011 NR Description: unknown protein; protein id: At5g42610.1
  misc_feature (90)..(152): Homolog of NCBI NO: 15234535 NR Description: putative protein; protein id: At4g36820.1
  misc_feature (89)..(160): Homolog of NCBI NO: 15240047 NR Description: putative protein
  misc_feature (89)..(160): Homolog of NCBI NO: 14596231 NR Description: Unknown protein [Arabidopsis thaliana]
  misc_feature (81)..(150): Homolog of NCBI NO: 24496456 NR Description: hypothetical protein [Arabidopsis thaliana]
  misc_feature (81)..(150): Homolog of NCBI NO: 15224063 NR Description: hypothetical protein; protein id: At2g23790.1
  misc_feature (41)..(163): Homolog of NCBI NO: 37535778 NR Description: unknown protein [Oryza sativa (japonica
  misc_feature (6)..(161): Homolog of NCBI NO: 20330769 NR Description: Hypothetical protein [Oryza sativa (japonica
NTNGVLAFHRTMARCLWVGKNAAASGAGAAIPKPPAPHPPAPRSLPAVDDCPTLAFLRPKPTAVGYATATVPLPAHCFPALPVGDHLFHRLQLDGLIPPVSTATRPPEHAGVTVEQARKVARAAEMEVARARLRSNAQSVVSGSEFAALCVDIAGGVEGGQPAGPCAGRVRRRHRPRRRRLPPPRHEIGILRR

SEQ ID NO: 17377 - protein, 182 aa, Zea mays subsp. mays
  peptide (1)..(182): Ceres Seq. ID no. 12368101
  misc_feature (71)..(149): Homolog of NCBI NO: 15239011 NR Description: unknown protein; protein id: At5g42610.1
  misc_feature (79)..(141): Homolog of NCBI NO: 15234535 NR Description: putative protein; protein id: At4g36820.1
  misc_feature (78)..(149): Homolog of NCBI NO: 15240047 NR Description: putative protein
  misc_feature (78)..(149): Homolog of NCBI NO: 14596231 NR Description: Unknown protein [Arabidopsis thaliana]
  misc_feature (70)..(139): Homolog of NCBI NO: 24496456 NR Description: hypothetical protein [Arabidopsis thaliana]
  misc_feature (70)..(139): Homolog of NCBI NO: 15224063 NR Description: hypothetical protein; protein id: At2g23790.1
  misc_feature (30)..(152): Homolog of NCBI NO: 37535778 NR Description: unknown protein [Oryza sativa (japonica
  misc_feature (1)..(150): Homolog of NCBI NO: 20330769 NR Description: Hypothetical protein [Oryza sativa (japonica
MARCLWVGKNAAASGAGAAIPKPPAPHPPAPRSLPAVDDCPTLAFLRPKPTAVGYATATVPLPAHCFPALPVGDHLFHRLQLDGLIPPVSTATRPPEHAGVTVEQARKVARAAEMEVARARLRSNAQSVVSGSEFAALCVDIAGGVEGGQPAGPCAGRVRRRHRPRRRRLPPPRHEIGILRR

SEQ ID NO: 17378 - DNA, 2068 bp, Zea mays subsp. mays
  misc_feature (1)..(2068): Ceres Seq. ID no. 12360559
  misc_feature: MA Experiment ID: 108522 Result: Up-regulated in Transcription
  misc_feature: MA Experiment 108522 PARAMETER Experiment Name: Zm_42deg_Heat_P Parameter: Age (day) Value: 8
  misc_feature: MA Experiment 108522 PARAMETER Experiment Name: Zm_42deg_Heat_P Parameter: Organism Value: Zea mays
  misc_feature: MA Experiment 108522 PARAMETER Experiment Name: Zm_42deg_Heat_P Parameter: Plant Line Value: 35A19
  misc_feature: MA Experiment 108522 PARAMETER Experiment Name: Zm_42deg_Heat_P Parameter: Temperature (deg C) Value: 42 vs. 22
  misc_feature: MA Experiment 108522 PARAMETER Experiment Name: Zm_42deg_Heat_P Parameter: Timepoint (hr) Value: 1
  misc_feature: MA Experiment 108522 PARAMETER Experiment Name: Zm_42deg_Heat_P Parameter: Tissue Value: Aerial
  misc_feature: MA Experiment ID: 108523 Result: Up-regulated in Transcription
  misc_feature: MA Experiment 108523 PARAMETER Experiment Name: Zm_42deg_Heat_P Parameter: Age (day) Value: 8
  misc_feature: MA Experiment 108523 PARAMETER Experiment Name: Zm_42deg_Heat_P Parameter: Organism Value: Zea mays
  misc_feature: MA Experiment 108523 PARAMETER Experiment Name: Zm_42deg_Heat_P Parameter: Plant Line Value: 35A19
  misc_feature: MA Experiment 108523 PARAMETER Experiment Name: Zm_42deg_Heat_P Parameter: Temperature (deg C) Value: 42 vs. 22
  misc_feature: MA Experiment 108523 PARAMETER Experiment Name: Zm_42deg_Heat_P Parameter: Timepoint (hr) Value: 6
  misc_feature: MA Experiment 108523 PARAMETER Experiment Name: Zm_42deg_Heat_P Parameter: Tissue Value: Aerial
gaaccaagcggcgatcgatcgaaacgaggcgtcgcgtggctgccggagatgtcgcagaagaggcagccggaggagggcgacgtcccgcggcgcgccgccgatgccggcggcggcggcggaggaggagacgagcccggtgggagctcgtcgcgctcctctctgccccagcgccacggcgagccgaagcgacagaggatcgcccttcgcgatgtgatcacggaggtgatgcggaacaccagcatcgagaagtttctaatcgcgctcgagcccctcatcaggagagtggtaaaagaagaaattgagtcggcttttgcaaaccatgcctctatgatggcaaggagtgtcacagacagtgttccatctgtgtcaaagaatttgcagctgcagttcatgaccagactttctcttccaatatttactggatccaagattgaaggagagggctcccttgagtataactattgctctagtcgacgctttgacaagacaaattgtagcaccaggcaaagagttccagataaaggttgagattgtagttctggagggggattttgaaagtggagaagatgatgactggacagctcaggagtttaacaataacattgttaaagaaagagaaggcaaaaggcccttgatttctggggatgcatccattgccctcgtcgatggcattggaacagtaggggaactttcattcacagataactccagctggacacggagccgaaagttcaggctaggagcaagaacagaggatggttctttcaatggtgtaagagtacgggaagcaaaaactgaatcatttgtggttaaggatcatcgaggagaattgtacaagaagcaccacccaccatttcttgaagatgaagtctggcgcctagagaaaattggcaaggaaggtgcttttcacaagcgtttgaatagggagaacatttgcactgtcaaagattttctcaccttgttaaatcttgatgcttctaggcttcgaaagatattaggtagtggcatgtcaacaaagatgtgggaggccactgtggaacatgcaaaaacatgtgttctaactgacaaagtgcatcactactatcctgatggtctaaacaaagctggtgttgtattcaatgtagttggagaagtaagagggttaatatctgataaatatgtttttgttgatgactttactgaaaaggagaaggccgaagcacgtgcagcagtgaagcaagcatatgaacactggaaggatgtccatacttgtgacaatgaaacgcttgtggaaaacccttcacatccattcaatttgggatctccatctttgcatgaaaatcagtataaccagttgcctacacaagtttctactgatggttttagtttgagcaattcggccatactgtcacccaacattttctcaatggagccatcgagtgctttagacccttgtagtatattggagactgaagaaagcagtgctaatcaatttcagtcggtgttgcccccagttgggggccatgaagtgcctcgagaacctcagacgctggataagttctccaactcgttggtatatgatgactgcagcgcccatccctcattcagtgaaagctattacagcagtgtagatcccagcatgtccttcgacacacaagatcttggagctgcactgaaaggcttcattgcaaccatatcgaagcctaaggcggcatatagaggatggagaacattgtcttatgtgctaggatggattttctataccaagagaattgttgcaaggagaaagaaacatgggaaataagtgaacacaagtctttgtgtagttaaatgcgaatataagcttagaaaatgagaaattatgtacattagtttgtttcttgtcacagctggtaagctctgctggtttcttcagctgtaaatggtcatgttctcagctatggttcgctatgcggctgtaaataatcaaatgaagtttgtacagggtgagggatgcgcatagcatttctgatgttttggatggatgccggagcttgctttttgatgcggcccgtgtattatctatgtagtagtatgcagtatgctgctg

SEQ ID NO: 17379 - protein, 258 aa, Zea mays subsp. mays
  peptide (1)..(258): Ceres Seq. ID no. 12360560
  misc_feature (1)..(253): Homolog of NCBI NO: 25354643 NR Description: probable calmodulin-binding protein
  misc_feature (1)..(204): Homolog of NCBI NO: 7484830 NR Description: calmodulin-binding protein homolog F14M19.80 -
  misc_feature (1)..(131): Homolog of NCBI NO: 7489107 NR Description: calmodulin-binding protein TCB60 - common tobacco
  misc_feature (1)..(124): Homolog of NCBI NO: 30697704 NR Description: calmodulin-binding protein [Arabidopsis thaliana]
  misc_feature (1)..(206): Homolog of NCBI NO: 25354646 NR Description: probable calmodulin-binding protein
  misc_feature (1)..(124): Homolog of NCBI NO: 10178088 NR Description: contains similarity to calmodulin-binding
  misc_feature (1)..(253): Homolog of NCBI NO: 22329041 NR Description: calmodulin-binding protein; protein id:
  misc_feature (1)..(89): Homolog of NCBI NO: 15242785 NR Description: calmodulin-binding protein
  misc_feature (1)..(97): Homolog of NCBI NO: 30687005 NR Description: calmodulin-binding protein [Arabidopsis thaliana]
  misc_feature (1)..(88): Homolog of NCBI NO: 32482927 NR Description: OSJNBa0058G03.4 [Oryza sativa (japonica
MSTKMWEATVEHAKTCVLTDKVHHYYPDGLNKAGVVFNVVGEVRGLISDKYVFVDDFTEKEKAEARAAVKQAYEHWKDVHTCDNETLVENPSHPFNLGSPSLHENQYNQLPTQVSTDGFSLSNSAILSPNIFSMEPSSALDPCSILETEESSANQFQSVLPPVGGHEVPREPQTLDKFSNSLVYDDCSAHPSFSESYYSSVDPSMSFDTQDLGAALKGFIATISKPKAAYRGWRTLSYVLGWIFYTKRIVARRKKHGK

SEQ ID NO: 17380 - protein, 254 aa, Zea mays subsp. mays
  peptide (1)..(254): Ceres Seq. ID no. 12360561
  misc_feature (1)..(120): Homolog of NCBI NO: 10178088 NR Description: contains similarity to calmodulin-binding
  misc_feature (1)..(249): Homolog of NCBI NO: 22329041 NR Description: calmodulin-binding protein; protein id:
  misc_feature (1)..(85): Homolog of NCBI NO: 15242785 NR Description: calmodulin-binding protein
  misc_feature (1)..(93): Homolog of NCBI NO: 30687005 NR Description: calmodulin-binding protein [Arabidopsis thaliana]
  misc_feature (1)..(84): Homolog of NCBI NO: 32482927 NR Description: OSJNBa0058G03.4 [Oryza sativa (japonica
  misc_feature (1)..(120): Homolog of NCBI NO: 30697704 NR Description: calmodulin-binding protein [Arabidopsis thaliana]
  misc_feature (1)..(202): Homolog of NCBI NO: 25354646 NR Description: probable calmodulin-binding protein
  misc_feature (1)..(249): Homolog of NCBI NO: 25354643 NR Description: probable calmodulin-binding protein
  misc_feature (1)..(200): Homolog of NCBI NO: 7484830 NR Description: calmodulin-binding protein homolog F14M19.80 -
  misc_feature (1)..(127): Homolog of NCBI NO: 7489107 NR Description: calmodulin-binding protein TCB60 - common tobacco
MWEATVEHAKTCVLTDKVHHYYPDGLNKAGVVFNVVGEVRGLISDKYVFVDDFTEKEKAEARAAVKQAYEHWKDVHTCDNETLVENPSHPFNLGSPSLHENQYNQLPTQVSTDGFSLSNSAILSPNIFSMEPSSALDPCSILETEESSANQFQSVLPPVGGHEVPREPQTLDKFSNSLVYDDCSAHPSFSESYYSSVDPSMSFDTQDLGAALKGFIATISKPKAAYRGWRTLSYVLGWIFYTKRIVARRKKHGK

SEQ ID NO: 17381 - protein, 175 aa, Zea mays subsp. mays
  peptide (1)..(175): Ceres Seq. ID no. 12360562
  misc_feature (63)..(145): Homolog of NCBI NO: 34895622 NR Description: putative calmodulin-binding protein
  misc_feature (56)..(147): Homolog of NCBI NO: 18398836 NR Description: calmodulin-binding protein
  misc_feature (56)..(96): Homolog of NCBI NO: 25354646 NR Description: probable calmodulin-binding protein
  misc_feature (76)..(147): Homolog of NCBI NO: 30697704 NR Description: calmodulin-binding protein [Arabidopsis thaliana]
  misc_feature (85)..(147): Homolog of NCBI NO: 25354646 NR Description: probable calmodulin-binding protein
  misc_feature (71)..(147): Homolog of NCBI NO: 10178088 NR Description: contains similarity to calmodulin-binding
  misc_feature (60)..(149): Homolog of NCBI NO: 22329041 NR Description: calmodulin-binding protein; protein id:
  misc_feature (60)..(147): Homolog of NCBI NO: 15242785 NR Description: calmodulin-binding protein
  misc_feature (60)..(147): Homolog of NCBI NO: 30687005 NR Description: calmodulin-binding protein [Arabidopsis thaliana]
  misc_feature (30)..(147): Homolog of NCBI NO: 32482927 NR Description: OSJNBa0058G03.4 [Oryza sativa (japonica
EPSGDRSKRGVAWLPEMSQKRQPEEGDVPRRAADAGGGGGGGDEPGGSSSRSSLPQRHGEPKRQRIALRDVITEVMRNTSIEKFLIALEPLIRRVVKEEIESAFANHASMMARSVTDSVPSVSKNLQLQFMTRLSLPIFTGSKIEGEGSLEYNYCSSRRFDKTNCSTRQRVPDKG

SEQ ID NO: 17382 - DNA, 2151 bp, Zea mays subsp. mays
  misc_feature (1)..(2151): Ceres Seq. ID no. 12383480
  misc_feature: MA Experiment ID: 108528 Result: Up-regulated in Transcription
  misc_feature: MA Experiment 108528 PARAMETER Experiment Name: Zm_Imbibed_Seeds_P Parameter: Age (day) Value: 5 vs. 2
  misc_feature: MA Experiment 108528 PARAMETER Experiment Name: Zm_Imbibed_Seeds_P Parameter: Organism Value: Zea mays
  misc_feature: MA Experiment 108528 PARAMETER Experiment Name: Zm_Imbibed_Seeds_P Parameter: Plant Line Value: 35A19
  misc_feature: MA Experiment 108528 PARAMETER Experiment Name: Zm_Imbibed_Seeds_P Parameter: Tissue Value: Aerial vs. Embryo
  misc_feature: MA Experiment ID: 108529 Result: Down-regulated in Transcription
  misc_feature: MA Experiment 108529 PARAMETER Experiment Name: Zm_Imbibed_Seeds_P Parameter: Age (day) Value: 5 vs. 2
  misc_feature: MA Experiment 108529 PARAMETER Experiment Name: Zm_Imbibed_Seeds_P Parameter: Organism Value: Zea mays
  misc_feature: MA Experiment 108529 PARAMETER Experiment Name: Zm_Imbibed_Seeds_P Parameter: Plant Line Value: 35A19
  misc_feature: MA Experiment 108529 PARAMETER Experiment Name: Zm_Imbibed_Seeds_P Parameter: Tissue Value: Roots vs. Embryo
  misc_feature: MA Experiment ID: 108530 Result: Up-regulated in Transcription
  misc_feature: MA Experiment 108530 PARAMETER Experiment Name: Zm_Imbibed_Seeds_P Parameter: Age (day) Value: 6 vs. 2
  misc_feature: MA Experiment 108530 PARAMETER Experiment Name: Zm_Imbibed_Seeds_P Parameter: Organism Value: Zea mays
  misc_feature: MA Experiment 108530 PARAMETER Experiment Name: Zm_Imbibed_Seeds_P Parameter: Plant Line Value: 35A19
  misc_feature: MA Experiment 108530 PARAMETER Experiment Name: Zm_Imbibed_Seeds_P Parameter: Tissue Value: Aerial vs. Embryo
  misc_feature: MA Experiment ID: 108543 Result: Up-regulated in Transcription
  misc_feature: MA Experiment ID: 108545 Result: Up-regulated in Transcription
  misc_feature: MA Experiment 108545 PARAMETER Experiment Name: Zm_Imbibed_Seeds_P Parameter: Age (day) Value: 3 vs. 2
  misc_feature: MA Experiment 108545 PARAMETER Experiment Name: Zm_Imbibed_Seeds_P Parameter: Organism Value: Zea mays
  misc_feature: MA Experiment 108545 PARAMETER Experiment Name: Zm_Imbibed_Seeds_P Parameter: Plant Line Value: 35A19
  misc_feature: MA Experiment 108545 PARAMETER Experiment Name: Zm_Imbibed_Seeds_P Parameter: Tissue Value: Aerial vs. Embryo
  misc_feature: MA Experiment ID: 108546 Result: Down-regulated in Transcription
  misc_feature: MA Experiment 108546 PARAMETER Experiment Name: Zm_Imbibed_Seeds_P Parameter: Age (day) Value: 3 vs. 2
  misc_feature: MA Experiment 108546 PARAMETER Experiment Name: Zm_Imbibed_Seeds_P Parameter: Organism Value: Zea mays
  misc_feature: MA Experiment 108546 PARAMETER Experiment Name: Zm_Imbibed_Seeds_P Parameter: Plant Line Value: 35A19
  misc_feature: MA Experiment 108546 PARAMETER Experiment Name: Zm_Imbibed_Seeds_P Parameter: Tissue Value: Roots vs. Embryo
  misc_feature: MA Experiment ID: 108547 Result: Up-regulated in Transcription
  misc_feature: MA Experiment 108547 PARAMETER Experiment Name: Zm_Imbibed_Seeds_P Parameter: Age (day) Value: 4 vs. 2
  misc_feature: MA Experiment 108547 PARAMETER Experiment Name: Zm_Imbibed_Seeds_P Parameter: Organism Value: Zea mays
  misc_feature: MA Experiment 108547 PARAMETER Experiment Name: Zm_Imbibed_Seeds_P Parameter: Plant Line Value: 35A19
  misc_feature: MA Experiment 108547 PARAMETER Experiment Name: Zm_Imbibed_Seeds_P Parameter: Tissue Value: Aerial vs. Embryo
  misc_feature: MA Experiment ID: 108559 Result: Down-regulated in Transcription
  misc_feature: MA Experiment 108559 PARAMETER Experiment Name: Zm_5mM_NO_P Parameter: Age (day) Value: 8
  misc_feature: MA Experiment 108559 PARAMETER Experiment Name: Zm_5mM_NO_P Parameter: Organism Value: Zea mays
  misc_feature: MA Experiment 108559 PARAMETER Experiment Name: Zm_5mM_NO_P Parameter: Plant Line Value: 35A19
  misc_feature: MA Experiment 108559 PARAMETER Experiment Name: Zm_5mM_NO_P Parameter: Timepoint (hr) Value: 12
  misc_feature: MA Experiment 108559 PARAMETER Experiment Name: Zm_5mM_NO_P Parameter: Tissue Value: Aerial
  misc_feature: MA Experiment 108559 PARAMETER Experiment Name: Zm_5mM_NO_P Parameter: Treatment Value: 5mM NO vs. No Treatment
  misc_feature: MA Experiment ID: 108689 Result: Up-regulated in Transcription
  misc_feature: MA Experiment 108689 PARAMETER Experiment Name: Zm_Drought_Roots_P Parameter: Age (day) Value: 9
  misc_feature: MA Experiment 108689 PARAMETER Experiment Name: Zm_Drought_Roots_P Parameter: Organism Value: Zea mays
  misc_feature: MA Experiment 108689 PARAMETER Experiment Name: Zm_Drought_Roots_P Parameter: Plant Line Value: 35A19
  misc_feature: MA Experiment 108689 PARAMETER Experiment Name: Zm_Drought_Roots_P Parameter: Timepoint (hr) Value: 24
  misc_feature: MA Experiment 108689 PARAMETER Experiment Name: Zm_Drought_Roots_P Parameter: Tissue Value: Roots
  misc_feature: MA Experiment 108689 PARAMETER Experiment Name: Zm_Drought_Roots_P Parameter: Treatment Value: Drought vs. No Drought
  misc_feature: MA Experiment ID: 20000535 Result: Up-regulated in Transcription
  misc_feature: MA Experiment 20000535 PARAMETER Experiment Name: Zm_Hybrid_Seed_Dev_P Parameter: DAP Value: 30 vs. 12
  misc_feature: MA Experiment 20000535 PARAMETER Experiment Name: Zm_Hybrid_Seed_Dev_P Parameter: Organism Value: Zea mays
  misc_feature: MA Experiment 20000535 PARAMETER Experiment Name: Zm_Hybrid_Seed_Dev_P Parameter: Plant Line Value: 35A19
  misc_feature: MA Experiment 20000535 PARAMETER Experiment Name: Zm_Hybrid_Seed_Dev_P Parameter: Tissue Value: Embryo vs. Unfert Floret
ctcgatcacttctctcccgatcctcactcccgtgtcgtgtctagcgccgacggcgttgctaccggagccggccagcggccacgatgcctacaatgcacgcgctccgcctatgcccgctgctctccaccatccgatccacaccaccgcgggccactgccgcagcccgccagggcgcgctcttcgtcgcccgctgctcctccgccgggacgccgtcagccgcccaggcgctcaagatcagttcgatcccgaccaagccagttgaggggcagaagactgggactagtggcctgaggaaaaaggtgaaagtgttccagcaggagaactaccttgctaattggattcaggctctattcaattccttgccccctgaagattatgtgggtgcaacccttgtacttgggggtgatggccggtactttaacaaggaggctgctcagatcatcattaagattgcagctggaaatggagttcagaagatcatagttggcaggaatggtctactgtcaacacctgctgtatctgctgtaattcgtaaaagaaaagccaatggcggctttatcatgagtgcaagccataatccaggtggaccagacaatgactggggtattaagtttaactacagcagtggacagccagcaccggagacgattactgatcaaatttatgggaacacactatcaatttctgaaataaaaacagcagacattcctgatactgatttgtcctctgttggagttgtaagctatggtgatttcgccatagaagtgatagatcctgtttcagattaccttgaactaatggagaatgtgtttgacttccaacttatcaaggatttgctttctcggcctgatttcaggttcatattcgatgcaatgcatgcaattactggtgcgtatgccggacccatttttgttgagaaacttggagctgatccggactgcatattaaatggggtgcctcttgaagattttggaaatggccatccagatccaaatctaacttacgctaaggagcttgtttttactatgtttggaacccatgcacctgactttggtgcagcaagtgatggtgatggtgatcggaacatgattcttgggaaaaggttctttattaccccatcagactctgttgcaataattgcagccaatgcacaggcagcaattccttatttccagtttggtacaaaaggactcgcgagatcaatgccaaccagtggtgctcttgatcgtgttgccgagaaattgaatgttccattctttgaggaaaattgtctatttgtggagaggaaagttttgggactggatctgatcacatcagagagaaggatggcatctgggctgttctggcttggctttccatacttgcacaccggaacaaggataagaaggtcggagagagattagtgtcagttgaagatattgctatggagcactggaaaacctatggcaggaatttcttttctagatacgattatgaggcgtgtgaatcacacagtgcaaaccagatgatggatcaccttagagatgttatggcaaatagcaagcctggagagaaatacggaaattacaccctccaatttgctgatgatttcagctatactgatcctgtagacggtagtacggtatcaaaacaaggacttcgatttgttttcactgatggatctaggattatcttccggctttcgggaaccggatctgctggagctactatccgcctctacatagaacaatttgaatctgatatctcgaagcatagtctcgatgctcaaacagctttgaagcctttaatagacctggctttgtctgtttcgaagctcaaggacttcacaggaagagagaaacctactgtcataacataatatttagatgttgttgtcctcggccataccaactgagcagcatgggccaagaattgaactgatggcaaatatgtatcattaggacaaattgcgccagaataagttgtttctcggaagtgttgagcacctccagcatcttccaaatatatctccaataagatattagtgggataacatatggcagatgttatcaaataatgtaaatatagatcgaacacgagacatgttttacgtggagaactcttgtatgaaaaaaaaatcatggatgctaactcgtgattttcattgtattc

SEQ ID NO: 17383 - protein, 439 aa, Zea mays subsp. mays
  peptide (1)..(439): Ceres Seq. ID no. 12383481
  misc_feature (234)..(342): Pfam Name: Phosphoglucomutase/phosphomannomutase, Pfam Description: Phosphoglucomutase/phosphomannomutase,
  misc_feature (56)..(393): Homolog of NCBI NO: 18076790 NR Description: phosphoglucomutase [Triticum aestivum]
  misc_feature (56)..(393): Homolog of NCBI NO: 12585326 NR Description: Phosphoglucomutase, cytoplasmic (Glucose
  misc_feature (51)..(393): Homolog of NCBI NO: 12585330 NR Description: Phosphoglucomutase, cytoplasmic (Glucose
  misc_feature (38)..(393): Homolog of NCBI NO: 12585317 NR Description: Phosphoglucomutase, chloroplast precursor
  misc_feature (22)..(393): Homolog of NCBI NO: 12585325 NR Description: Phosphoglucomutase, chloroplast precursor
  misc_feature (34)..(393): Homolog of NCBI NO: 25292704 NR Description: phosphoglucomutase (EC 5.4.2.2) precursor
  misc_feature (34)..(393): Homolog of NCBI NO: 15242191 NR Description: phosphoglucomutase (emb|CAB64725.1)
  misc_feature (28)..(393): Homolog of NCBI NO: 12585295 NR Description: Phosphoglucomutase, chloroplast precursor
  misc_feature (5)..(393): Homolog of NCBI NO: 37531886 NR Description: putative phosphoglucomutase
  misc_feature (5)..(393): Homolog of NCBI NO: 22725961 NR Description: putative plastidic phosphoglucomutase
MPTMHALRLCPLLSTIRSTPPRATAAARQGALFVARCSSAGTPSAAQALKISSIPTKPVEGQKTGTSGLRKKVKVFQQENYLANWIQALFNSLPPEDYVGATLVLGGDGRYFNKEAAQIIIKIAAGNGVQKIIVGRNGLLSTPAVSAVIRKRKANGGFIMSASHNPGGPDNDWGIKFNYSSGQPAPETITDQIYGNTLSISEIKTADIPDTDLSSVGVVSYGDFAIEVIDPVSDYLELMENVFDFQLIKDLLSRPDFRFIFDAMHAITGAYAGPIFVEKLGADPDCILNGVPLEDFGNGHPDPNLTYAKELVFTMFGTHAPDFGAASDGDGDRNMILGKRFFITPSDSVAIIAANAQAAIPYFQFGTKGLARSMPTSGALDRVAEKLNVPFFEENCLFVERKVLGLDLITSERRMASGLFWLGFPYLHTGTRIRRSERD

SEQ ID NO: 17384 - protein, 436 aa, Zea mays subsp. mays
  peptide (1)..(436): Ceres Seq. ID no. 12383482
  misc_feature (231)..(339): Pfam Name: Phosphoglucomutase/phosphomannomutase, Pfam Description: Phosphoglucomutase/phosphomannomutase,
  misc_feature (53)..(390): Homolog of NCBI NO: 18076790 NR Description: phosphoglucomutase [Triticum aestivum]
  misc_feature (53)..(390): Homolog of NCBI NO: 12585326 NR Description: Phosphoglucomutase, cytoplasmic (Glucose
  misc_feature (48)..(390): Homolog of NCBI NO: 12585330 NR Description: Phosphoglucomutase, cytoplasmic (Glucose
  misc_feature (35)..(390): Homolog of NCBI NO: 12585317 NR Description: Phosphoglucomutase, chloroplast precursor
  misc_feature (19)..(390): Homolog of NCBI NO: 12585325 NR Description: Phosphoglucomutase, chloroplast precursor
  misc_feature (31)..(390): Homolog of NCBI NO: 25292704 NR Description: phosphoglucomutase (EC 5.4.2.2) precursor
  misc_feature (31)..(390): Homolog of NCBI NO: 15242191 NR Description: phosphoglucomutase (emb|CAB64725.1)
  misc_feature (25)..(390): Homolog of NCBI NO: 12585295 NR Description: Phosphoglucomutase, chloroplast precursor
  misc_feature (2)..(390): Homolog of NCBI NO: 37531886 NR Description: putative phosphoglucomutase
  misc_feature (2)..(390): Homolog of NCBI NO: 22725961 NR Description: putative plastidic phosphoglucomutase
MHALRLCPLLSTIRSTPPRATAAARQGALFVARCSSAGTPSAAQALKISSIPTKPVEGQKTGTSGLRKKVKVFQQENYLANWIQALFNSLPPEDYVGATLVLGGDGRYFNKEAAQIIIKIAAGNGVQKIIVGRNGLLSTPAVSAVIRKRKANGGFIMSASHNPGGPDNDWGIKFNYSSGQPAPETITDQIYGNTLSISEIKTADIPDTDLSSVGVVSYGDFAIEVIDPVSDYLELMENVFDFQLIKDLLSRPDFRFIFDAMHAITGAYAGPIFVEKLGADPDCILNGVPLEDFGNGHPDPNLTYAKELVFTMFGTHAPDFGAASDGDGDRNMILGKRFFITPSDSVAIIAANAQAAIPYFQFGTKGLARSMPTSGALDRVAEKLNVPFFEENCLFVERKVLGLDLITSERRMASGLFWLGFPYLHTGTRIRRSERD

SEQ ID NO: 17385 - protein, 280 aa, Zea mays subsp. mays
  peptide (1)..(280): Ceres Seq. ID no. 12383483
  misc_feature (75)..(183): Pfam Name: Phosphoglucomutase/phosphomannomutase, Pfam Description: Phosphoglucomutase/phosphomannomutase,
  misc_feature (1)..(234): Homolog of NCBI NO: 18076790 NR Description: phosphoglucomutase [Triticum aestivum]
  misc_feature (1)..(234): Homolog of NCBI NO: 12585326 NR Description: Phosphoglucomutase, cytoplasmic (Glucose
  misc_feature (1)..(234): Homolog of NCBI NO: 12585330 NR Description: Phosphoglucomutase, cytoplasmic (Glucose
  misc_feature (1)..(234): Homolog of NCBI NO: 12585317 NR Description: Phosphoglucomutase, chloroplast precursor
  misc_feature (1)..(234): Homolog of NCBI NO: 12585325 NR Description: Phosphoglucomutase, chloroplast precursor
  misc_feature (1)..(234): Homolog of NCBI NO: 25292704 NR Description: phosphoglucomutase (EC 5.4.2.2) precursor
  misc_feature (1)..(234): Homolog of NCBI NO: 15242191 NR Description: phosphoglucomutase (emb|CAB64725.1)
  misc_feature (1)..(234): Homolog of NCBI NO: 12585295 NR Description: Phosphoglucomutase, chloroplast precursor
  misc_feature (1)..(234): Homolog of NCBI NO: 37531886 NR Description: putative phosphoglucomutase
  misc_feature (1)..(234): Homolog of NCBI NO: 22725961 NR Description: putative plastidic phosphoglucomutase
MSASHNPGGPDNDWGIKFNYSSGQPAPETITDQIYGNTLSISEIKTADIPDTDLSSVGVVSYGDFAIEVIDPVSDYLELMENVFDFQLIKDLLSRPDFRFIFDAMHAITGAYAGPIFVEKLGADPDCILNGVPLEDFGNGHPDPNLTYAKELVFTMFGTHAPDFGAASDGDGDRNMILGKRFFITPSDSVAIIAANAQAAIPYFQFGTKGLARSMPTSGALDRVAEKLNVPFFEENCLFVERKVLGLDLITSERRMASGLFWLGFPYLHTGTRIRRSERD

SEQ ID NO: 17386 - DNA, 1739 bp, Zea mays subsp. mays
  misc_feature (1)..(1739): Ceres Seq. ID no. 13494501
  misc_feature: MA Experiment ID: 108528 Result: Up-regulated in Transcription
  misc_feature: MA Experiment 108528 PARAMETER Experiment Name: Zm_Imbibed_Seeds_P Parameter: Age (day) Value: 5 vs. 2
  misc_feature: MA Experiment 108528 PARAMETER Experiment Name: Zm_Imbibed_Seeds_P Parameter: Organism Value: Zea mays
  misc_feature: MA Experiment 108528 PARAMETER Experiment Name: Zm_Imbibed_Seeds_P Parameter: Plant Line Value: 35A19
  misc_feature: MA Experiment 108528 PARAMETER Experiment Name: Zm_Imbibed_Seeds_P Parameter: Tissue Value: Aerial vs. Embryo
  misc_feature: MA Experiment ID: 108530 Result: Up-regulated in Transcription
  misc_feature: MA Experiment 108530 PARAMETER Experiment Name: Zm_Imbibed_Seeds_P Parameter: Age (day) Value: 6 vs. 2
  misc_feature: MA Experiment 108530 PARAMETER Experiment Name: Zm_Imbibed_Seeds_P Parameter: Organism Value: Zea mays
  misc_feature: MA Experiment 108530 PARAMETER Experiment Name: Zm_Imbibed_Seeds_P Parameter: Plant Line Value: 35A19
  misc_feature: MA Experiment 108530 PARAMETER Experiment Name: Zm_Imbibed_Seeds_P Parameter: Tissue Value: Aerial vs. Embryo
  misc_feature: MA Experiment ID: 108535 Result: Down-regulated in Transcription
  misc_feature: MA Experiment 108535 PARAMETER Experiment Name: Zm_Meristem_P Parameter: Age (day) Value: 8
  misc_feature: MA Experiment 108535 PARAMETER Experiment Name: Zm_Meristem_P Parameter: Organism Value: Zea mays
  misc_feature: MA Experiment 108535 PARAMETER Experiment Name: Zm_Meristem_P Parameter: Plant Line Value: 35A19
  misc_feature: MA Experiment 108535 PARAMETER Experiment Name: Zm_Meristem_P Parameter: Tissue Value: Root Meristem vs. Above Root Meristem
  misc_feature: MA Experiment ID: 108545 Result: Up-regulated in Transcription
  misc_feature: MA Experiment 108545 PARAMETER Experiment Name: Zm_Imbibed_Seeds_P Parameter: Age (day) Value: 3 vs. 2
  misc_feature: MA Experiment 108545 PARAMETER Experiment Name: Zm_Imbibed_Seeds_P Parameter: Organism Value: Zea mays
  misc_feature: MA Experiment 108545 PARAMETER Experiment Name: Zm_Imbibed_Seeds_P Parameter: Plant Line Value: 35A19
  misc_feature: MA Experiment 108545 PARAMETER Experiment Name: Zm_Imbibed_Seeds_P Parameter: Tissue Value: Aerial vs. Embryo
  misc_feature: MA Experiment ID: 108547 Result: Up-regulated in Transcription
  misc_feature: MA Experiment 108547 PARAMETER Experiment Name: Zm_Imbibed_Seeds_P Parameter: Age (day) Value: 4 vs. 2
  misc_feature: MA Experiment 108547 PARAMETER Experiment Name: Zm_Imbibed_Seeds_P Parameter: Organism Value: Zea mays
  misc_feature: MA Experiment 108547 PARAMETER Experiment Name: Zm_Imbibed_Seeds_P Parameter: Plant Line Value: 35A19
  misc_feature: MA Experiment 108547 PARAMETER Experiment Name: Zm_Imbibed_Seeds_P Parameter: Tissue Value: Aerial vs. Embryo
  misc_feature: MA Experiment ID: 108687 Result: Down-regulated in Transcription
  misc_feature: MA Experiment 108687 PARAMETER Experiment Name: Zm_Embryos-Flowers__P Parameter: Tissue Value: Embryo vs. Aerial+
  misc_feature: MA Experiment ID: 20000488 Result: Up-regulated in Transcription
  misc_feature: MA Experiment 20000488 PARAMETER Experiment Name: Zm_50mM_NH4NO3_L_to_H_P Parameter: Organism Value: Zea mays
  misc_feature: MA Experiment 20000488 PARAMETER Experiment Name: Zm_50mM_NH4NO3_L_to_H_P Parameter: Timepoint (hr) Value: 8
  misc_feature: MA Experiment 20000488 PARAMETER Experiment Name: Zm_50mM_NH4NO3_L_to_H_P Parameter: Tissue Value: Leaves
  misc_feature: MA Experiment 20000488 PARAMETER Experiment Name: Zm_50mM_NH4NO3_L_to_H_P Parameter: Treatment Value: 50mM NH4NO3 vs. 100mM Mannitol
  misc_feature: MA Experiment ID: 20000492 Result: Down-regulated in Transcription
  misc_feature: MA Experiment 20000492 PARAMETER Experiment Name: Zm_Hybrid_Seed_Dev_P Parameter: DAP Value: 12
  misc_feature: MA Experiment 20000492 PARAMETER Experiment Name: Zm_Hybrid_Seed_Dev_P Parameter: Organism Value: Zea mays
  misc_feature: MA Experiment 20000492 PARAMETER Experiment Name: Zm_Hybrid_Seed_Dev_P Parameter: Plant Line Value: 35A19
  misc_feature: MA Experiment 20000492 PARAMETER Experiment Name: Zm_Hybrid_Seed_Dev_P Parameter: Tissue Value: Fert Kernel vs. Unfert Floret
  misc_feature: MA Experiment ID: 20000534 Result: Down-regulated in Transcription
  misc_feature: MA Experiment 20000534 PARAMETER Experiment Name: Zm_Hybrid_Pollen_P Parameter: Age (day) Value: 8
  misc_feature: MA Experiment 20000534 PARAMETER Experiment Name: Zm_Hybrid_Pollen_P Parameter: Organism Value: Zea mays
  misc_feature: MA Experiment 20000534 PARAMETER Experiment Name: Zm_Hybrid_Pollen_P Parameter: Plant Line Value: 35A19
  misc_feature: MA Experiment 20000534 PARAMETER Experiment Name: Zm_Hybrid_Pollen_P Parameter: Tissue Value: Pollen vs. Aerial
  misc_feature: MA Experiment ID: 20000535 Result: Down-regulated in Transcription
  misc_feature: MA Experiment 20000535 PARAMETER Experiment Name: Zm_Hybrid_Seed_Dev_P Parameter: DAP Value: 30 vs. 12
  misc_feature: MA Experiment 20000535 PARAMETER Experiment Name: Zm_Hybrid_Seed_Dev_P Parameter: Organism Value: Zea mays
  misc_feature: MA Experiment 20000535 PARAMETER Experiment Name: Zm_Hybrid_Seed_Dev_P Parameter: Plant Line Value: 35A19
  misc_feature: MA Experiment 20000535 PARAMETER Experiment Name: Zm_Hybrid_Seed_Dev_P Parameter: Tissue Value: Embryo vs. Unfert Floret
  misc_feature: MA Experiment ID: 20001608 Result: Up-regulated in Transcription
  misc_feature: MA Experiment 20001608 PARAMETER Experiment Name: Zm_50ppm_KNO3_L-to-H_P Parameter: Age (day) Value: 21
  misc_feature: MA Experiment 20001608 PARAMETER Experiment Name: Zm_50ppm_KNO3_L-to-H_P Parameter: Organism Value: Zea mays
  misc_feature: MA Experiment 20001608 PARAMETER Experiment Name: Zm_50ppm_KNO3_L-to-H_P Parameter: Plant Line Value: 35A19
  misc_feature: MA Experiment 20001608 PARAMETER Experiment Name: Zm_50ppm_KNO3_L-to-H_P Parameter: Timepoint (hr) Value: 48
  misc_feature: MA Experiment 20001608 PARAMETER Experiment Name: Zm_50ppm_KNO3_L-to-H_P Parameter: Tissue Value: Shoots
  misc_feature: MA Experiment 20001608 PARAMETER Experiment Name: Zm_50ppm_KNO3_L-to-H_P Parameter: Treatment Value: 50ppm KNO3 vs. 50ppm KCl
tagaacatcctaatcgaaaaaccctaccccccacacggccacacacacaccgccgcgtccgacccccacgccgtcgactgctcgaccggtcggctccgatggggtacgtgctgtcggcggtgggcagggtgctggagcagcccacggcgtggggggcggcctgggagatggcactcctcgcggggcccctgtgggcggcggccctcctcggcctgctgctcggctgggcctggcgcccgcgctgggcatccggcctcgtcgtcgccaccgcggacgacggcggtagccccgccgccgccgcgcagccgcccttcgccacgctcgacttctggaaggcccagctccccgcccgcctccgcgccccgctcggcaccgccgtgcagcagagggagggtgacacggacgccgtgcaacggaaccgcggaacggtggcgcttggcaggtcctcagagacggagacggcgacggtggcggtggggatggccgacctggtgaacctctggaggctggtggagggcgcggacggcggcccggcctggaccaagatgatggagaagtcgctgcccaccatgacctaccgggcgtggaggagggacgcccagaccgggcctccgcagtaccagagcagcagcatcttcgagaacgccagtccagaggaggtgagggacttcttcggggacgacgagttccggatgtccaacaggtgggacgacatgctcatctaccacaagaccctggaggagtgccggaccactgggacgatgaaagtgcattgggtccggaagttccccttcttctgcagcgacagggagtacataatcgcccggcggatatggaagctggggggcgcctattattgcgtcacaaagggcataccatgctcatccattccacggcgtagcagacctcggagagtcgatctgtattactcaagctggtgcatccgcgcagtggagtccaggagagggaacggaggaggaaggggggcgacggcctgtgaggttctgctgttccaccacgaggacatgggcatcccgtacgagatcgccaagctgggcatcaggcaggggatgtgggggtgcgtgaagaggatcgagccggggctccgggcctaccagcaggcgcgggccgcgggggcgccgccgtcgcggagcgccctgatggcccggatcaacaccaaggtcagcgccgacggtttcactcgccagtcgtcgtccagttccagcggcggcgacgggccggagaccgcggacgacgcgcaggagaccgagaacaagaagcccgcgacgaggagccacgcagcggcgaggctcctcgtgctcggcggcgcggtcgctctggcctgctgcacccttgaccaggggctcctgaccaaggctctcatcttcggcgtcgcgcggaggttcgtcgggcagaggaaggacgttgtagcgtcccacacaccttgtcgctcgtacggtcgtgccgtgtgctgatcgccgacgtcgagaagcgggggaaggaggtggtttgtgtgggctttgtggatgtgtaattggtgctgatgccattgtggctgaaagagagcggacgaagagcgttttggtgtctacgtgtgtatacgctgccggctgtcggatcacgagggagaggggtttcctactatatacatgtgtaaaaatttgtttcatgtaatcttgtatctgagtgaccagatcaggtgattatgcagatgagaagaacagagttttttttcggcc

SEQ ID NO: 17387 - protein, 490 aa, Zea mays subsp. mays
  peptide (1)..(490): Ceres Seq. ID no. 13494502
  misc_feature (206)..(287): Pfam Name: START domain Pfam Description: START domain
  misc_feature (56)..(83): Homolog of NCBI NO: 18423599 NR Description: membrane related protein-like [Arabidopsis
  misc_feature (56)..(83): Homolog of NCBI NO: 10178166 NR Description: membrane related protein-like [Arabidopsis
  misc_feature (162)..(473): Homolog of NCBI NO: 18423599 NR Description: membrane related protein-like [Arabidopsis
  misc_feature (162)..(473): Homolog of NCBI NO: 10178166 NR Description: membrane related protein-like [Arabidopsis
  misc_feature (55)..(82): Homolog of NCBI NO: 22135902 NR Description: membrane related protein CP5, putative
  misc_feature (148)..(405): Homolog of NCBI NO: 22135902 NR Description: membrane related protein CP5, putative
  misc_feature (55)..(82): Homolog of NCBI NO: 15217736 NR Description: membrane related protein CP5 -related
  misc_feature (148)..(413): Homolog of NCBI NO: 15217736 NR Description: membrane related protein CP5 -related
  misc_feature (66)..(470): Homolog of NCBI NO: 38344869 NR Description: OSJNBa0020P07.12 [Oryza sativa (japonica
  misc_feature (44)..(468): Homolog of NCBI NO: 18033654 NR Description: putative nodule membrane protein [Medicago sativa]
EHPNRKTLPPTRPHTHRRVRPPRRRLLDRSAPMGYVLSAVGRVLEQPTAWGAAWEMALLAGPLWAAALLGLLLGWAWRPRWASGLVVATADDGGSPAAAAQPPFATLDFWKAQLPARLRAPLGTAVQQREGDTDAVQRNRGTVALGRSSETETATVAVGMADLVNLWRLVEGADGGPAWTKMMEKSLPTMTYRAWRRDAQTGPPQYQSSSIFENASPEEVRDFFGDDEFRMSNRWDDMLIYHKTLEECRTTGTMKVHWVRKFPFFCSDREYIIARRIWKLGGAYYCVTKGIPCSSIPRRSRPRRVDLYYSSWCIRAVESRRGNGGGRGATACEVLLFHHEDMGIPYEIAKLGIRQGMWGCVKRIEPGLRAYQQARAAGAPPSRSALMARINTKVSADGFTRQSSSSSSGGDGPETADDAQETENKKPATRSHAAARLLVLGGAVALACCTLDQGLLTKALIFGVARRFVGQRKDVVASHTPCRSYGRAVC

SEQ ID NO: 17388 - protein, 458 aa, Zea mays subsp. mays
  peptide (1)..(458): Ceres Seq. ID no. 13494503
  misc_feature (174)..(255): Pfam Name: START domain Pfam Description: START domain
  misc_feature (24)..(51): Homolog of NCBI NO: 18423599 NR Description: membrane related protein-like [Arabidopsis
  misc_feature (24)..(51): Homolog of NCBI NO: 10178166 NR Description: membrane related protein-like [Arabidopsis
  misc_feature (130)..(441): Homolog of NCBI NO: 18423599 NR Description: membrane related protein-like [Arabidopsis
  misc_feature (130)..(441): Homolog of NCBI NO: 10178166 NR Description: membrane related protein-like [Arabidopsis
  misc_feature (23)..(50): Homolog of NCBI NO: 22135902 NR Description: membrane related protein CP5, putative
  misc_feature (116)..(373): Homolog of NCBI NO: 22135902 NR Description: membrane related protein CP5, putative
  misc_feature (23)..(50): Homolog of NCBI NO: 15217736 NR Description: membrane related protein CP5 -related
  misc_feature (116)..(381): Homolog of NCBI NO: 15217736 NR Description: membrane related protein CP5 -related
  misc_feature (34)..(438): Homolog of NCBI NO: 38344869 NR Description: OSJNBa0020P07.12 [Oryza sativa (japonica
  misc_feature (12)..(436): Homolog of NCBI NO: 18033654 NR Description: putative nodule membrane protein [Medicago sativa]
MGYVLSAVGRVLEQPTAWGAAWEMALLAGPLWAAALLGLLLGWAWRPRWASGLVVATADDGGSPAAAAQPPFATLDFWKAQLPARLRAPLGTAVQQREGDTDAVQRNRGTVALGRSSETETATVAVGMADLVNLWRLVEGADGGPAWTKMMEKSLPTMTYRAWRRDAQTGPPQYQSSSIFENASPEEVRDFFGDDEFRMSNRWDDMLIYHKTLEECRTTGTMKVHWVRKFPFFCSDREYIIARRIWKLGGAYYCVTKGIPCSSIPRRSRPRRVDLYYSSWCIRAVESRRGNGGGRGATACEVLLFHHEDMGIPYEIAKLGIRQGMWGCVKRIEPGLRAYQQARAAGAPPSRSALMARINTKVSADGFTRQSSSSSSGGDGPETADDAQETENKKPATRSHAAARLLVLGGAVALACCTLDQGLLTKALIFGVARRFVGQRKDVVASHTPCRSYGRAVC

SEQ ID NO: 17389 - protein, 435 aa, Zea mays subsp. mays
  peptide (1)..(435): Ceres Seq. ID no. 13494504
  misc_feature (151)..(232): Pfam Name: START domain Pfam Description: START domain
  misc_feature (1)..(28): Homolog of NCBI NO: 18423599 NR Description: membrane related protein-like [Arabidopsis
  misc_feature (1)..(28): Homolog of NCBI NO: 10178166 NR Description: membrane related protein-like [Arabidopsis
  misc_feature (107)..(418): Homolog of NCBI NO: 18423599 NR Description: membrane related protein-like [Arabidopsis
  misc_feature (107)..(418): Homolog of NCBI NO: 10178166 NR Description: membrane related protein-like [Arabidopsis
  misc_feature (1)..(27): Homolog of NCBI NO: 22135902 NR Description: membrane related protein CP5, putative
  misc_feature (93)..(350): Homolog of NCBI NO: 22135902 NR Description: membrane related protein CP5, putative
  misc_feature (1)..(27): Homolog of NCBI NO: 15217736 NR Description: membrane related protein CP5 -related
  misc_feature (93)..(358): Homolog of NCBI NO: 15217736 NR Description: membrane related protein CP5 -related
  misc_feature (11)..(415): Homolog of NCBI NO: 38344869 NR Description: OSJNBa0020P07.12 [Oryza sativa (japonica
  misc_feature (1)..(413): Homolog of NCBI NO: 18033654 NR Description: putative nodule membrane protein [Medicago sativa]
MALLAGPLWAAALLGLLLGWAWRPRWASGLVVATADDGGSPAAAAQPPFATLDFWKAQLPARLRAPLGTAVQQREGDTDAVQRNRGTVALGRSSETETATVAVGMADLVNLWRLVEGADGGPAWTKMMEKSLPTMTYRAWRRDAQTGPPQYQSSSIFENASPEEVRDFFGDDEFRMSNRWDDMLIYHKTLEECRTTGTMKVHWVRKFPFFCSDREYIIARRIWKLGGAYYCVTKGIPCSSIPRRSRPRRVDLYYSSWCIRAVESRRGNGGGRGATACEVLLFHHEDMGIPYEIAKLGIRQGMWGCVKRIEPGLRAYQQARAAGAPPSRSALMARINTKVSADGFTRQSSSSSSGGDGPETADDAQETENKKPATRSHAAARLLVLGGAVALACCTLDQGLLTKALIFGVARRFVGQRKDVVASHTPCRSYGRAVC

SEQ ID NO: 17390 - DNA, 1623 bp, Zea mays subsp. mays
  misc_feature (1)..(1623): Ceres Seq. ID no. 12435326
  misc_feature: MA Experiment ID: 20000480 Result: Down-regulated in Transcription
  misc_feature: MA Experiment 20000480 PARAMETER Experiment Name: Zm_Drought_P Parameter: Age (day) Value: 11
  misc_feature: MA Experiment 20000480 PARAMETER Experiment Name: Zm_Drought_P Parameter: Organism Value: Zea mays
  misc_feature: MA Experiment 20000480 PARAMETER Experiment Name: Zm_Drought_P Parameter: Plant Line Value: 35A19
  misc_feature: MA Experiment 20000480 PARAMETER Experiment Name: Zm_Drought_P Parameter: Timepoint (hr) Value: 72
  misc_feature: MA Experiment 20000480 PARAMETER Experiment Name: Zm_Drought_P Parameter: Tissue Value: Aerial
  misc_feature: MA Experiment 20000480 PARAMETER Experiment Name: Zm_Drought_P Parameter: Treatment Value: Drought vs. No Drought
aacccaaaatccacgagcacctcccccatcgtcctcacggacctcacgcgccctgcccctctcgctctccgcctccccgccccacacccatcgccacccaccagcacctccggcggcccccacccccgcctcctccccgcgtgtccgcggtctgcacccggcgtccctcgcggcgttgacgcgcgaacgtcccgtcgcccggtgagtaacggagagaccgaaccatgagcggaggggtggaaccggagaccccgccgggtagcagcagcaggagcgggggcagcaggagcgtcggtggcaagccgccacgccaccacctcacgtctatccgccactgcgccagcatcgcccgcatcgccgccgcctccgccggattcgggctggattcggggacgctcagcttgatctcacctaccgcagacatccatccgggcttcttgcctgtgttcaggtcggggagtttcgctgatattggacccaaaacgtacatggaggacgaacatgtctgtgtggacaacctggttgagcacctcgggttctatggcccgggcatccctgcaccgggtgctttctatggggtgtttgatggccatggtggcactgatgctgcctgttttgtccggaaaaatatactgaagttcataaccgaagattgccacttccccaacagcatcgagaaggcaatcagaagcgcttttgtaaaggccgacaatgcaattgcggattcccattctcttgaccggaattctgggaccacagcattgacggtccttatatttggcaggacactgcttgttgcgaatgccggtgactgtcgagctgtattaggaaagcgaggccgagctgttgaactctctagagaccacaaacccagctgcatagttgaaaggctcagaatcgaaaacctgggtggtaccgtctttgatggctacctcaacggtcagctggctgtagcaagggcaatcggtgattggcacatgaaaggctccaagggctctgtatgccctcttacaccagaacctgagtttagggaggttaggcttactgaggaagatgagttcttgataataggctgtgatggcctttgggatgtgatgagcagccagtttgctgtttccatggtcaggaaagagctgatggaacacaatgatccacaacggtgctcgcgagagcttgtccacgaagcgcttaggcgcgactgctgtgataacctaaccgtagttgttgtgtgcttctcagcggacccaccccctcaaatcgagatcccaagattccgagtacgaagaagcatctcaatggaagggcttcataggctgaggggtgctcttgacagtaatatctgaagcttaaaagtgtcccttcggctgtaacttctgtcgtcgttggtatgttgaagttgctccacccattggtgttttgagatagtctcagaataagttttgtagaattattttggaagaaattttgttgaggtgtaggctaattaatcttttttttgttgaggcagtgatttatatgtaccggtcaccatttgattgttggatgctcacgatgtaatcgagcaattaaccgacattgttctggtacgaatgagagttataggagttgatcatttttttctct

SEQ ID NO: 17391 - protein, 372 aa, Zea mays subsp. mays
  peptide (1)..(372): Ceres Seq. ID no. 12435327
  misc_feature (75)..(330): Pfam Name: Protein phosphatase 2C Pfam Description: Protein phosphatase 2C
  misc_feature (71)..(371): Homolog of NCBI NO: 25352221 NR Description: phosphoprotein phosphatase (EC 3.1.3.16) 2C
  misc_feature (71)..(369): Homolog of NCBI NO: 15224766 NR Description: protein phosphatase 2C (PP2C)
  misc_feature (19)..(369): Homolog of NCBI NO: 20146108 NR Description: protein phosphatase 2C [Mesembryanthemum
  misc_feature (22)..(369): Homolog of NCBI NO: 15230495 NR Description: protein phosphatase 2C (PP2C); protein id:
  misc_feature (71)..(369): Homolog of NCBI NO: 21693562 NR Description: DNA-binding protein phosphatase 2C [Nicotiana
  misc_feature (71)..(371): Homolog of NCBI NO: 34894410 NR Description: putative protein phosphatase
  misc_feature (71)..(368): Homolog of NCBI NO: 24413992 NR Description: putative DNA-binding protein phosphatase 2C
  misc_feature (25)..(369): Homolog of NCBI NO: 15226152 NR Description: protein phosphatase 2C (PP2C)
  misc_feature (53)..(371): Homolog of NCBI NO: 10140768 NR Description: putative protein phosphatase-2C [Oryza sativa]
  misc_feature (3)..(371): Homolog of NCBI NO: 37536524 NR Description: putative protein phosphatase-2C
MSGGVEPETPPGSSSRSGGSRSVGGKPPRHHLTSIRHCASIARIAAASAGFGLDSGTLSLISPTADIHPGFLPVFRSGSFADIGPKTYMEDEHVCVDNLVEHLGFYGPGIPAPGAFYGVFDGHGGTDAACFVRKNILKFITEDCHFPNSIEKAIRSAFVKADNAIADSHSLDRNSGTTALTVLIFGRTLLVANAGDCRAVLGKRGRAVELSRDHKPSCIVERLRIENLGGTVFDGYLNGQLAVARAIGDWHMKGSKGSVCPLTPEPEFREVRLTEEDEFLIIGCDGLWDVMSSQFAVSMVRKELMEHNDPQRCSRELVHEALRRDCCDNLTVVVVCFSADPPPQIEIPRFRVRRSISMEGLHRLRGALDSNI

SEQ ID NO: 17392 - protein, 284 aa, Zea mays subsp. mays
  peptide (1)..(284): Ceres Seq. ID no. 12435328
  misc_feature (1)..(242): Pfam Name: Protein phosphatase 2C Pfam Description: Protein phosphatase 2C
  misc_feature (1)..(280): Homolog of NCBI NO: 24413992 NR Description: putative DNA-binding protein phosphatase 2C
  misc_feature (1)..(281): Homolog of NCBI NO: 21693562 NR Description: DNA-binding protein phosphatase 2C [Nicotiana
  misc_feature (1)..(283): Homolog of NCBI NO: 34894410 NR Description: putative protein phosphatase
  misc_feature (1)..(283): Homolog of NCBI NO: 25352221 NR Description: phosphoprotein phosphatase (EC 3.1.3.16) 2C
  misc_feature (1)..(281): Homolog of NCBI NO: 15224766 NR Description: protein phosphatase 2C (PP2C)
  misc_feature (1)..(281): Homolog of NCBI NO: 20146108 NR Description: protein phosphatase 2C [Mesembryanthemum
  misc_feature (1)..(281): Homolog of NCBI NO: 15230495 NR Description: protein phosphatase 2C (PP2C); protein id:
  misc_feature (1)..(281): Homolog of NCBI NO: 15226152 NR Description: protein phosphatase 2C (PP2C)
  misc_feature (1)..(283): Homolog of NCBI NO: 10140768 NR Description: putative protein phosphatase-2C [Oryza sativa]
  misc_feature (1)..(283): Homolog of NCBI NO: 37536524 NR Description: putative protein phosphatase-2C
MEDEHVCVDNLVEHLGFYGPGIPAPGAFYGVFDGHGGTDAACFVRKNILKFITEDCHFPNSIEKAIRSAFVKADNAIADSHSLDRNSGTTALTVLIFGRTLLVANAGDCRAVLGKRGRAVELSRDHKPSCIVERLRIENLGGTVFDGYLNGQLAVARAIGDWHMKGSKGSVCPLTPEPEFREVRLTEEDEFLIIGCDGLWDVMSSQFAVSMVRKELMEHNDPQRCSRELVHEALRRDCCDNLTVVVVCFSADPPPQIEIPRFRVRRSISMEGLHRLRGALDSNI

SEQ ID NO: 17393 - DNA, 2312 bp, Zea mays subsp. mays
  misc_feature (1)..(2312): Ceres Seq. ID no. 12379167
  misc_feature: MA Experiment ID: 108528 Result: Down-regulated in Transcription
  misc_feature: MA Experiment 108528 PARAMETER Experiment Name: Zm_Imbibed_Seeds_P Parameter: Age (day) Value: 5 vs. 2
  misc_feature: MA Experiment 108528 PARAMETER Experiment Name: Zm_Imbibed_Seeds_P Parameter: Organism Value: Zea mays
  misc_feature: MA Experiment 108528 PARAMETER Experiment Name: Zm_Imbibed_Seeds_P Parameter: Plant Line Value: 35A19
  misc_feature: MA Experiment 108528 PARAMETER Experiment Name: Zm_Imbibed_Seeds_P Parameter: Tissue Value: Aerial vs. Embryo
  misc_feature: MA Experiment ID: 108536 Result: Up-regulated in Transcription
  misc_feature: MA Experiment 108536 PARAMETER Experiment Name: Zm_Meristem_P Parameter: Age (day) Value: 8
  misc_feature: MA Experiment 108536 PARAMETER Experiment Name: Zm_Meristem_P Parameter: Organism Value: Zea mays
  misc_feature: MA Experiment 108536 PARAMETER Experiment Name: Zm_Meristem_P Parameter: Plant Line Value: 35A19
  misc_feature: MA Experiment 108536 PARAMETER Experiment Name: Zm_Meristem_P Parameter: Tissue Value: Shoot Meristem vs. Above Shoot Meristem
  misc_feature: MA Experiment ID: 108544 Result: Down-regulated in Transcription
  misc_feature: MA Experiment ID: 108547 Result: Down-regulated in Transcription
  misc_feature: MA Experiment 108547 PARAMETER Experiment Name: Zm_Imbibed_Seeds_P Parameter: Age (day) Value: 4 vs. 2
  misc_feature: MA Experiment 108547 PARAMETER Experiment Name: Zm_Imbibed_Seeds_P Parameter: Organism Value: Zea mays
  misc_feature: MA Experiment 108547 PARAMETER Experiment Name: Zm_Imbibed_Seeds_P Parameter: Plant Line Value: 35A19
  misc_feature: MA Experiment 108547 PARAMETER Experiment Name: Zm_Imbibed_Seeds_P Parameter: Tissue Value: Aerial vs. Embryo
  misc_feature: MA Experiment ID: 20000478 Result: Down-regulated in Transcription
  misc_feature: MA Experiment 20000478 PARAMETER Experiment Name: Zm_5mM_SA_P Parameter: Age (day) Value: 11
  misc_feature: MA Experiment 20000478 PARAMETER Experiment Name: Zm_5mM_SA_P Parameter: Organism Value: Zea mays
  misc_feature: MA Experiment 20000478 PARAMETER Experiment Name: Zm_5mM_SA_P Parameter: Plant Line Value: 35A19
  misc_feature: MA Experiment 20000478 PARAMETER Experiment Name: Zm_5mM_SA_P Parameter: Timepoint (hr) Value: 72
  misc_feature: MA Experiment 20000478 PARAMETER Experiment Name: Zm_5mM_SA_P Parameter: Tissue Value: Aerial
  misc_feature: MA Experiment 20000478 PARAMETER Experiment Name: Zm_5mM_SA_P Parameter: Treatment Value: 5mM SA vs. No Treatment
gcacgagaccattacctagaacatcctaatcgaaaagaggagtcacagagaaagtttggtggtgaggcaaaggtttccttccagggttcgtcaggaacgaggcgactcgcaatctgaagcctttcgtcggttccgtctagctgccccccctcggattcggccatggagcggcagtccagcatccggctgggcgcgctggagaagctgaggagcttccgggggatggagaagcagaagagcttccgcgggatcatgtccctcgagcggcggagcagggacagcccggggaaacgcggcgacacgccgctccacctcgcggcgagggccgggagcgtggcccacgcgcagaggatcctcgcggagctcgaccgggcgctggccgccgagatggccgccaggcagaaccaggacggcgagacgccgctgtacgtcgccgccgagaagggccacgcggaggtcgtgcgcgagatcctcaaggtctgtggcgtgcagacggccggcatcaaggccagcaatagtttcgacgcgttccacatcgccgccaagcagggccaccttgaagttctgaaggagatgctgcaggctcttcctgctcttgctatgacaacaaattctgtaaacgctacggccctggacaccgcggcgattcagggccatgttgacatcgtcaatctcctgctggaaaccgatgctagcctcgccaggatcacgaggaacaacgggaaaacggttttacactcagcagcaagaatgggccacgtggaagttgtaagatcgttgctgaataaggatcccaggattggtttgaggacagacaagaaggggcaaactgcgctgcatatggcttcgaaagcgcagaatgctgagatcgtggtcgagttgttgaagccagatgtctcggtcatccatatcgaagacaacaaggggaacaggcccttgcatgttgctactcggaaggggaatatcattatagtgcagactctgttatcagttgaggggatcgatgtcaatgcagttaacaggtctggagagactgcatttgccatcgccgagaaaatggacagtgtagaactcgtgaacatcctgaaagaggctggtggagaagccgcaaagcagcagcaagtacatcctccgaattcggcgaagcagctgaaggaaacagtcagcgatatcagacacgacgtccagtcccagttcaagcaaacacgtcagaccaagatgcaagtcaaccagatcaagaagaggctggagaagctccacatcggcgggctgaacaacgccatcaactccaacaccgtcgtcgcggtgctcatcgccacggtcgccttcgccgccatattcacggtcccgggaaacttcgtggaggagctgagccaggcgcctccgggcatgtccctggggcaggcgtacgtggcgagcaacccggcgttcatcgtcttcctggtcttcgacgcgctggccctcttcatctcgctcgcggtggtcgtggtgcagacctcgctgatcgtggtggagcggagggcgaagaagcggatggtgttcgtgatgaacaagctcatgtggctggcgtgcctcttcatctcggtggccttcatcgcgctgacctacgtggtggtggggcgcgacgactggtggctggcctggtgcaccatgggcatcggcgccgcgatcatgctcaccaccctcggctccatgtgctactgcatcgtcgcgcacaggctggaggagaagaacaccaggaagatcaggagggcctccgcgagccagtcccgcggctcgtggtcccgatcggtcgactcggacgaggagatacttaacagcgagtacaagacgaagatgtacgcgctgtaggatggatagcaagtgtaacatgacggattcttttgtacataccagtgctttgtttcgccagaggctgctccatggcatgcggcaccacatcagtcttcttcaaccaaagggactgaaggcccttcctgcggaaccaagttcaggtcacttgaccggtgtgcctgttcctggggagtgagagtctgctcaactgtgtggttcttagcgcctgaaaccgtcaatggtgatggagataattcagctagaaatttagaatagaataaagtgtccggtacaaaatgcattgtgtcgtgcagtagatatgatgatcttgtacacgaggatctcatctgagagagtgatttgttgaactcttgtgggcagttttttttcccttgggattgggacttgggcctgtggtctgtgacgcagggaatatatgtgttgacaagatgaaaactatcattgatcggccatttccg

SEQ ID NO: 17394 - protein, 562 aa, Zea mays subsp. mays
  peptide (1)..(562): Ceres Seq. ID no. 12379168
  misc_feature (186)..(218): Pfam Name: Ankyrin repeat Pfam Description: Ankyrin repeat
  misc_feature (1)..(562): Homolog of NCBI NO: 34908074 NR Description: P0506B12.26 [Oryza sativa (japonica
  misc_feature (42)..(550): Homolog of NCBI NO: 21553618 NR Description: ankyrin-like protein [Arabidopsis thaliana]
  misc_feature (42)..(550): Homolog of NCBI NO: 15230470 NR Description: ankyrin-like protein; protein id: At3g12360.1
  misc_feature (37)..(562): Homolog of NCBI NO: 30679697 NR Description: ankyrin repeat protein family [Arabidopsis
  misc_feature (37)..(562): Homolog of NCBI NO: 11357168 NR Description: ankyrin-like protein - Arabidopsis thaliana
  misc_feature (42)..(539): Homolog of NCBI NO: 15238604 NR Description: ankyrin-like protein; protein id: At5g60070.1
  misc_feature (20)..(562): Homolog of NCBI NO: 24796797 NR Description: putative ankyrin repeat containing protein
  misc_feature (42)..(562): Homolog of NCBI NO: 15222993 NR Description: hypothetical protein; protein id: At1g07710.1
  misc_feature (1)..(562): Homolog of NCBI NO: 15220595 NR Description: unknown protein; protein id: At1g05640.1
  misc_feature (1)..(562): Homolog of NCBI NO: 15225141 NR Description: ankyrin-like protein; protein id: At2g31820.1
MERQSSIRLGALEKLRSFRGMEKQKSFRGIMSLERRSRDSPGKRGDTPLHLAARAGSVAHAQRILAELDRALAAEMAARQNQDGETPLYVAAEKGHAEVVREILKVCGVQTAGIKASNSFDAFHIAAKQGHLEVLKEMLQALPALAMTTNSVNATALDTAAIQGHVDIVNLLLETDASLARITRNNGKTVLHSAARMGHVEVVRSLLNKDPRIGLRTDKKGQTALHMASKAQNAEIVVELLKPDVSVIHIEDNKGNRPLHVATRKGNIIIVQTLLSVEGIDVNAVNRSGETAFAIAEKMDSVELVNILKEAGGEAAKQQQVHPPNSAKQLKETVSDIRHDVQSQFKQTRQTKMQVNQIKKRLEKLHIGGLNNAINSNTVVAVLIATVAFAAIFTVPGNFVEELSQAPPGMSLGQAYVASNPAFIVFLVFDALALFISLAVVVVQTSLIVVERRAKKRMVFVMNKLMWLACLFISVAFIALTYVVVGRDDWWLAWCTMGIGAAIMLTTLGSMCYCIVAHRLEEKNTRKIRRASASQSRGSWSRSVDSDEEILNSEYKTKMYAL

SEQ ID NO: 17395 - protein, 542 aa, Zea mays subsp. mays
  peptide (1)..(542): Ceres Seq. ID no. 12379169
  misc_feature (166)..(198): Pfam Name: Ankyrin repeat Pfam Description: Ankyrin repeat
  misc_feature (1)..(542): Homolog of NCBI NO: 34908074 NR Description: P0506B12.26 [Oryza sativa (japonica
  misc_feature (22)..(530): Homolog of NCBI NO: 21553618 NR Description: ankyrin-like protein [Arabidopsis thaliana]
  misc_feature (22)..(530): Homolog of NCBI NO: 15230470 NR Description: ankyrin-like protein; protein id: At3g12360.1
  misc_feature (17)..(542): Homolog of NCBI NO: 30679697 NR Description: ankyrin repeat protein family [Arabidopsis
  misc_feature (17)..(542): Homolog of NCBI NO: 11357168 NR Description: ankyrin-like protein - Arabidopsis thaliana
  misc_feature (22)..(519): Homolog of NCBI NO: 15238604 NR Description: ankyrin-like protein; protein id: At5g60070.1
  misc_feature (1)..(542): Homolog of NCBI NO: 24796797 NR Description: putative ankyrin repeat containing protein
  misc_feature (22)..(542): Homolog of NCBI NO: 15222993 NR Description: hypothetical protein; protein id: At1g07710.1
  misc_feature (1)..(542): Homolog of NCBI NO: 15220595 NR Description: unknown protein; protein id: At1g05640.1
  misc_feature (1)..(542): Homolog of NCBI NO: 15225141 NR Description: ankyrin-like protein; protein id: At2g31820.1
MEKQKSFRGIMSLERRSRDSPGKRGDTPLHLAARAGSVAHAQRILAELDRALAAEMAARQNQDGETPLYVAAEKGHAEVVREILKVCGVQTAGIKASNSFDAFHIAAKQGHLEVLKEMLQALPALAMTTNSVNATALDTAAIQGHVDIVNLLLETDASLARITRNNGKTVLHSAARMGHVEVVRSLLNKDPRIGLRTDKKGQTALHMASKAQNAEIVVELLKPDVSVIHIEDNKGNRPLHVATRKGNIIIVQTLLSVEGIDVNAVNRSGETAFAIAEKMDSVELVNILKEAGGEAAKQQQVHPPNSAKQLKETVSDIRHDVQSQFKQTRQTKMQVNQIKKRLEKLHIGGLNNAINSNTVVAVLIATVAFAAIFTVPGNFVEELSQAPPGMSLGQAYVASNPAFIVFLVFDALALFISLAVVVVQTSLIVVERRAKKRMVFVMNKLMWLACLFISVAFIALTYVVVGRDDWWLAWCTMGIGAAIMLTTLGSMCYCIVAHRLEEKNTRKIRRASASQSRGSWSRSVDSDEEILNSEYKTKMYAL

SEQ ID NO: 17396 - protein, 532 aa, Zea mays subsp. mays
  peptide (1)..(532): Ceres Seq. ID no. 12379170
  misc_feature (156)..(188): Pfam Name: Ankyrin repeat Pfam Description: Ankyrin repeat
  misc_feature (1)..(532): Homolog of NCBI NO: 34908074 NR Description: P0506B12.26 [Oryza sativa (japonica
  misc_feature (12)..(520): Homolog of NCBI NO: 21553618 NR Description: ankyrin-like protein [Arabidopsis thaliana]
  misc_feature (12)..(520): Homolog of NCBI NO: 15230470 NR Description: ankyrin-like protein; protein id: At3g12360.1
  misc_feature (7)..(532): Homolog of NCBI NO: 30679697 NR Description: ankyrin repeat protein family [Arabidopsis
  misc_feature (7)..(532): Homolog of NCBI NO: 11357168 NR Description: ankyrin-like protein - Arabidopsis thaliana
  misc_feature (12)..(509): Homolog of NCBI NO: 15238604 NR Description: ankyrin-like protein; protein id: At5g60070.1
  misc_feature (1)..(532): Homolog of NCBI NO: 24796797 NR Description: putative ankyrin repeat containing protein
  misc_feature (12)..(532): Homolog of NCBI NO: 15222993 NR Description: hypothetical protein; protein id: At1g07710.1
  misc_feature (1)..(532): Homolog of NCBI NO: 15220595 NR Description: unknown protein; protein id: At1g05640.1
  misc_feature (1)..(532): Homolog of NCBI NO: 15225141 NR Description: ankyrin-like protein; protein id: At2g31820.1
MSLERRSRDSPGKRGDTPLHLAARAGSVAHAQRILAELDRALAAEMAARQNQDGETPLYVAAEKGHAEVVREILKVCGVQTAGIKASNSFDAFHIAAKQGHLEVLKEMLQALPALAMTTNSVNATALDTAAIQGHVDIVNLLLETDASLARITRNNGKTVLHSAARMGHVEVVRSLLNKDPRIGLRTDKKGQTALHMASKAQNAEIVVELLKPDVSVIHIEDNKGNRPLHVATRKGNIIIVQTLLSVEGIDVNAVNRSGETAFAIAEKMDSVELVNILKEAGGEAAKQQQVHPPNSAKQLKETVSDIRHDVQSQFKQTRQTKMQVNQIKKRLEKLHIGGLNNAINSNTVVAVLIATVAFAAIFTVPGNFVEELSQAPPGMSLGQAYVASNPAFIVFLVFDALALFISLAVVVVQTSLIVVERRAKKRMVFVMNKLMWLACLFISVAFIALTYVVVGRDDWWLAWCTMGIGAAIMLTTLGSMCYCIVAHRLEEKNTRKIRRASASQSRGSWSRSVDSDEEILNSEYKTKMYAL

SEQ ID NO: 17397 - DNA, 2125 bp, Zea mays subsp. mays
  misc_feature (1)..(2125): Ceres Seq. ID no. 12366165
  misc_feature: MA Experiment ID: 108535 Result: Up-regulated in Transcription
  misc_feature: MA Experiment 108535 PARAMETER Experiment Name: Zm_Meristem_P Parameter: Age (day) Value: 8
  misc_feature: MA Experiment 108535 PARAMETER Experiment Name: Zm_Meristem_P Parameter: Organism Value: Zea mays
  misc_feature: MA Experiment 108535 PARAMETER Experiment Name: Zm_Meristem_P Parameter: Plant Line Value: 35A19
  misc_feature: MA Experiment 108535 PARAMETER Experiment Name: Zm_Meristem_P Parameter: Tissue Value: Root Meristem vs. Above Root Meristem
  misc_feature: MA Experiment ID: 108543 Result: Up-regulated in Transcription
  misc_feature: MA Experiment ID: 108556 Result: Down-regulated in Transcription
  misc_feature: MA Experiment 108556 PARAMETER Experiment Name: Zm_Drought_P Parameter: Age (day) Value: 9
  misc_feature: MA Experiment 108556 PARAMETER Experiment Name: Zm_Drought_P Parameter: Organism Value: Zea mays
  misc_feature: MA Experiment 108556 PARAMETER Experiment Name: Zm_Drought_P Parameter: Plant Line Value: 35A19
  misc_feature: MA Experiment 108556 PARAMETER Experiment Name: Zm_Drought_P Parameter: Timepoint (hr) Value: 24
  misc_feature: MA Experiment 108556 PARAMETER Experiment Name: Zm_Drought_P Parameter: Tissue Value: Aerial
  misc_feature: MA Experiment 108556 PARAMETER Experiment Name: Zm_Drought_P Parameter: Treatment Value: Drought vs. No Drought
  misc_feature: MA Experiment ID: 20000479 Result: Down-regulated in Transcription
  misc_feature: MA Experiment 20000479 PARAMETER Experiment Name: Zm_Drought_P Parameter: Age (day) Value: 10
  misc_feature: MA Experiment 20000479 PARAMETER Experiment Name: Zm_Drought_P Parameter: Organism Value: Zea mays
  misc_feature: MA Experiment 20000479 PARAMETER Experiment Name: Zm_Drought_P Parameter: Plant Line Value: 35A19
  misc_feature: MA Experiment 20000479 PARAMETER Experiment Name: Zm_Drought_P Parameter: Timepoint (hr) Value: 48
  misc_feature: MA Experiment 20000479 PARAMETER Experiment Name: Zm_Drought_P Parameter: Tissue Value: Aerial
  misc_feature: MA Experiment 20000479 PARAMETER Experiment Name: Zm_Drought_P Parameter: Treatment Value: Drought vs. No Drought
  misc_feature: MA Experiment ID: 20000492 Result: Up-regulated in Transcription
  misc_feature: MA Experiment 20000492 PARAMETER Experiment Name: Zm_Hybrid_Seed_Dev_P Parameter: DAP Value: 12
  misc_feature: MA Experiment 20000492 PARAMETER Experiment Name: Zm_Hybrid_Seed_Dev_P Parameter: Organism Value: Zea mays
  misc_feature: MA Experiment 20000492 PARAMETER Experiment Name: Zm_Hybrid_Seed_Dev_P Parameter: Plant Line Value: 35A19
  misc_feature: MA Experiment 20000492 PARAMETER Experiment Name: Zm_Hybrid_Seed_Dev_P Parameter: Tissue Value: Fert Kernel vs. Unfert Floret
gcacgagaccattacctagaacatcctaatcgaaaagaaagccgaagcgagtgcgagtgcggccctcagctgctgcagttgctcctgcagtcctgctcgtttctgcggcggcggcggcggcctagcacctgagcggggcggcgagaggggacggagatggatatcgcgcgggcggctgctggcgtggcctgctgcaaggagcaccagaggatctacgccgagtggttcgccctcgccgacccagatggcgacggccgcgtcacgggcgccgatgccaccagcttcttcgccatgtccgcgctttcacgcgccgatctcaagcaggtgtgggcgatcgcggattccaggcggcaggggtacctcggattcgccgagttcgtcacagcaatgcagctcgtgtctctggcccaagcagggaacgagatcacacaggacagtctgaaacgtgaagacctgagcaccttggatccgcctgtgatggaaggtgttgatgagctactggctagatccaaggctgttgtaaagagagttcacccagatgacaatggcaccactcaggcccaagcaccttccatatatcactggtttggttcaaaatcagcacagaaggtgcagatgcctctgactgctgttacctctgtaattgatggcttgaaaagactctatgttgaaaaactgaagcctttggaagtcgcctacagatacaatgatttttctcacccattattgacaaacagtgactttgaagcaaagccaatggttatgctcttgggtcagtattcaacaggcaaaacaacattcattaagcatctgctaaagacaagctacccaggagctcacgtcggaccagagccaacaactgatagattcgtagttgtcatgtcaggatctgatggaaggaccattcctggcaatactattgccgttcaagccgacatgccattcactggtcttacaacctttgggggagcgtttctgtcgaagtttgaatgctctcagatgccacatcccctgctagagcatatcacctttgtggacactcctggtgttctctctggggaaaagcaacggacccaacgtagctatgatttcactggtgtgacctcatggtttgctgccaagtgtgaccttatccttcttctgtttgaccctcacaagcttgatataagtgatgagttcaaacgtgtcatttcatctttacgtgggcatgatgacaaaatacgcgtagtgttgaacaaggccgaccaagttgacacacaacagcttatgagagtgtatggtgcattgatgtggtctcttgggaaagtgctaaatactcctgaggttgcgcgtgtgtatatcggatcatttaatgataagccagtgaatgattcagctgttgggccaattggaaaagacttgtttgagagggagcaagatgacctcctctgtgacctgaaggacattcctaagaaggcttgtgatcgacgggtcaatgagtttgttaagcgtgcccgagctgccaagatccatgcttacataattggccatctgaagaaggagatgcctgcagtgatgggaaaagccaaggctcagcagcgactcatagacaacttagaggaggagtttgcaaaggtgcagagggaatatcatctccccgccggagacttccccgacgtcgagcacttcaagcaggtgctgggcgggtacagcatcgacaagttcgagaagctgaagccgaagatggtgcaggcggtggacgacatgctcgctcacgacatcccggagctcctcaagaacttgcggaacccgtacgagtgaaactgacctgacctctcgcgtccgtcggttgtaaaaagattatcttagctgtcacgtccggtgatggcggacggacgaggcagacgttcctgggagagagatgcctagacggttacgggtcactactcactcactagctgtccgcagctgtgccaaaaccgagaggacacatgagggttcagatcggacagccacagcgcatagcctgtgttggtttcggcgtcagtgctctctgcacgcgaaggagctgctgcggcaccgttgccgtgccgtctcgctgtgatacatttcccctcgtgacgagatgaaaagagttgcaggcggc

SEQ ID NO: 17398 - protein, 547 aa, Zea mays subsp. mays
  peptide (1)..(547): Ceres Seq. ID no. 12366166
  misc_feature (53)..(81): Pfam Name: EF hand Pfam Description: EF hand
  misc_feature (53)..(81): Pfam Name: EF hand Pfam Description: EF hand
  misc_feature (139)..(543): Homolog of NCBI NO: 34861835 NR Description: similar to EH-domain containing 1 [Rattus
  misc_feature (118)..(542): Homolog of NCBI NO: 17565132 NR Description: Receptor Mediated Endocytosis 1 RME-1 isoform 2,
  misc_feature (118)..(542): Homolog of NCBI NO: 7206819 NR Description: Receptor mediated endocytosis protein 1, isoform
  misc_feature (126)..(542): Homolog of NCBI NO: 17565130 NR Description: Receptor Mediated Endocytosis 1 isoform 1,
  misc_feature (129)..(542): Homolog of NCBI NO: 39594267 NR Description: Hypothetical protein CBG18887 [Caenorhabditis
  misc_feature (139)..(543): Homolog of NCBI NO: 34861835 NR Description: similar to EH-domain containing 1 [Rattus
  misc_feature (118)..(542): Homolog of NCBI NO: 7206819 NR Description: Receptor mediated endocytosis protein 1, isoform
  misc_feature (129)..(542): Homolog of NCBI NO: 39594267 NR Description: Hypothetical protein CBG18887 [Caenorhabditis
  misc_feature (1)..(547): Homolog of NCBI NO: 18402561 NR Description: expressed protein
  misc_feature (123)..(547): Homolog of NCBI NO: 9294546 NR Description: contains similarity to EH domain containing
  misc_feature (1)..(110): Homolog of NCBI NO: 9294546 NR Description: contains similarity to EH domain containing
  misc_feature (14)..(547): Homolog of NCBI NO: 38345297 NR Description: OSJNBa0043A12.19 [Oryza sativa (japonica
  misc_feature (11)..(493): Homolog of NCBI NO: 18412957 NR Description: score=11.7, E=0.66,N=1; protein id: At4g05520.1
  misc_feature (126)..(542): Homolog of NCBI NO: 17565130 NR Description: Receptor Mediated Endocytosis 1 isoform 1,
  misc_feature (118)..(542): Homolog of NCBI NO: 17565132 NR Description: Receptor Mediated Endocytosis 1 RME-1 isoform 2,
  misc_feature (11)..(493): Homolog of NCBI NO: 18412957 NR Description: score=11.7, E=0.66,N=1; protein id: At4g05520.1
  misc_feature (14)..(547): Homolog of NCBI NO: 38345297 NR Description: OSJNBa0043A12.19 [Oryza sativa (japonica
  misc_feature (1)..(110): Homolog of NCBI NO: 9294546 NR Description: contains similarity to EH domain containing
  misc_feature (123)..(547): Homolog of NCBI NO: 9294546 NR Description: contains similarity to EH domain containing
  misc_feature (1)..(547): Homolog of NCBI NO: 18402561 NR Description: expressed protein
MDIARAAAGVACCKEHQRIYAEWFALADPDGDGRVTGADATSFFAMSALSRADLKQVWAIADSRRQGYLGFAEFVTAMQLVSLAQAGNEITQDSLKREDLSTLDPPVMEGVDELLARSKAVVKRVHPDDNGTTQAQAPSIYHWFGSKSAQKVQMPLTAVTSVIDGLKRLYVEKLKPLEVAYRYNDFSHPLLTNSDFEAKPMVMLLGQYSTGKTTFIKHLLKTSYPGAHVGPEPTTDRFVVVMSGSDGRTIPGNTIAVQADMPFTGLTTFGGAFLSKFECSQMPHPLLEHITFVDTPGVLSGEKQRTQRSYDFTGVTSWFAAKCDLILLLFDPHKLDISDEFKRVISSLRGHDDKIRVVLNKADQVDTQQLMRVYGALMWSLGKVLNTPEVARVYIGSFNDKPVNDSAVGPIGKDLFEREQDDLLCDLKDIPKKACDRRVNEFVKRARAAKIHAYIIGHLKKEMPAVMGKAKAQQRLIDNLEEEFAKVQREYHLPAGDFPDVEHFKQVLGGYSIDKFEKLKPKMVQAVDDMLAHDIPELLKNLRNPYE

SEQ ID NO: 17399 - protein, 502 aa, Zea mays subsp. mays
  peptide (1)..(502): Ceres Seq. ID no. 12366167
  misc_feature (8)..(36): Pfam Name: EF hand Pfam Description: EF hand
  misc_feature (8)..(36): Pfam Name: EF hand Pfam Description: EF hand
  misc_feature (94)..(498): Homolog of NCBI NO: 34861835 NR Description: similar to EH-domain containing 1 [Rattus
  misc_feature (73)..(497): Homolog of NCBI NO: 17565132 NR Description: Receptor Mediated Endocytosis 1 RME-1 isoform 2,
  misc_feature (73)..(497): Homolog of NCBI NO: 7206819 NR Description: Receptor mediated endocytosis protein 1, isoform
  misc_feature (81)..(497): Homolog of NCBI NO: 17565130 NR Description: Receptor Mediated Endocytosis 1 isoform 1,
  misc_feature (84)..(497): Homolog of NCBI NO: 39594267 NR Description: Hypothetical protein CBG18887 [Caenorhabditis
  misc_feature (94)..(498): Homolog of NCBI NO: 34861835 NR Description: similar to EH-domain containing 1 [Rattus
  misc_feature (73)..(497): Homolog of NCBI NO: 7206819 NR Description: Receptor mediated endocytosis protein 1, isoform
  misc_feature (84)..(497): Homolog of NCBI NO: 39594267 NR Description: Hypothetical protein CBG18887 [Caenorhabditis
  misc_feature (1)..(502): Homolog of NCBI NO: 18402561 NR Description: expressed protein
  misc_feature (78)..(502): Homolog of NCBI NO: 9294546 NR Description: contains similarity to EH domain containing
  misc_feature (1)..(65): Homolog of NCBI NO: 9294546 NR Description: contains similarity to EH domain containing
  misc_feature (1)..(502): Homolog of NCBI NO: 38345297 NR Description: OSJNBa0043A12.19 [Oryza sativa (japonica
  misc_feature (1)..(448): Homolog of NCBI NO: 18412957 NR Description: score=11.7, E=0.66,N=1; protein id: At4g05520.1
  misc_feature (81)..(497): Homolog of NCBI NO: 17565130 NR Description: Receptor Mediated Endocytosis 1 isoform 1,
  misc_feature (73)..(497): Homolog of NCBI NO: 17565132 NR Description: Receptor Mediated Endocytosis 1 RME-1 isoform 2,
  misc_feature (1)..(448): Homolog of NCBI NO: 18412957 NR Description: score=11.7, E=0.66,N=1; protein id: At4g05520.1
  misc_feature (1)..(502): Homolog of NCBI NO: 38345297 NR Description: OSJNBa0043A12.19 [Oryza sativa (japonica
  misc_feature (1)..(65): Homolog of NCBI NO: 9294546 NR Description: contains similarity to EH domain containing
  misc_feature (78)..(502): Homolog of NCBI NO: 9294546 NR Description: contains similarity to EH domain containing
  misc_feature (1)..(502): Homolog of NCBI NO: 18402561 NR Description: expressed protein
MSALSRADLKQVWAIADSRRQGYLGFAEFVTAMQLVSLAQAGNEITQDSLKREDLSTLDPPVMEGVDELLARSKAVVKRVHPDDNGTTQAQAPSIYHWFGSKSAQKVQMPLTAVTSVIDGLKRLYVEKLKPLEVAYRYNDFSHPLLTNSDFEAKPMVMLLGQYSTGKTTFIKHLLKTSYPGAHVGPEPTTDRFVVVMSGSDGRTIPGNTIAVQADMPFTGLTTFGGAFLSKFECSQMPHPLLEHITFVDTPGVLSGEKQRTQRSYDFTGVTSWFAAKCDLILLLFDPHKLDISDEFKRVISSLRGHDDKIRVVLNKADQVDTQQLMRVYGALMWSLGKVLNTPEVARVYIGSFNDKPVNDSAVGPIGKDLFEREQDDLLCDLKDIPKKACDRRVNEFVKRARAAKIHAYIIGHLKKEMPAVMGKAKAQQRLIDNLEEEFAKVQREYHLPAGDFPDVEHFKQVLGGYSIDKFEKLKPKMVQAVDDMLAHDIPELLKNLRNPYE

SEQ ID NO: 17400 - protein, 470 aa, Zea mays subsp. mays
  peptide (1)..(470): Ceres Seq. ID no. 12366168
  misc_feature (62)..(466): Homolog of NCBI NO: 34861835 NR Description: similar to EH-domain containing 1 [Rattus
  misc_feature (41)..(465): Homolog of NCBI NO: 17565132 NR Description: Receptor Mediated Endocytosis 1 RME-1 isoform 2,
  misc_feature (41)..(465): Homolog of NCBI NO: 7206819 NR Description: Receptor mediated endocytosis protein 1, isoform
  misc_feature (49)..(465): Homolog of NCBI NO: 17565130 NR Description: Receptor Mediated Endocytosis 1 isoform 1,
  misc_feature (52)..(465): Homolog of NCBI NO: 39594267 NR Description: Hypothetical protein CBG18887 [Caenorhabditis
  misc_feature (1)..(416): Homolog of NCBI NO: 18412957 NR Description: score=11.7, E=0.66,N=1; protein id: At4g05520.1
  misc_feature (1)..(470): Homolog of NCBI NO: 38345297 NR Description: OSJNBa0043A12.19 [Oryza sativa (japonica
  misc_feature (1)..(33): Homolog of NCBI NO: 9294546 NR Description: contains similarity to EH domain containing
  misc_feature (46)..(470): Homolog of NCBI NO: 9294546 NR Description: contains similarity to EH domain containing
  misc_feature (1)..(470): Homolog of NCBI NO: 18402561 NR Description: expressed protein
  misc_feature (62)..(466): Homolog of NCBI NO: 34861835 NR Description: similar to EH-domain containing 1 [Rattus
  misc_feature (41)..(465): Homolog of NCBI NO: 17565132 NR Description: Receptor Mediated Endocytosis 1 RME-1 isoform 2,
  misc_feature (41)..(465): Homolog of NCBI NO: 7206819 NR Description: Receptor mediated endocytosis protein 1, isoform
  misc_feature (49)..(465): Homolog of NCBI NO: 17565130 NR Description: Receptor Mediated Endocytosis 1 isoform 1,
  misc_feature (52)..(465): Homolog of NCBI NO: 39594267 NR Description: Hypothetical protein CBG18887 [Caenorhabditis
  misc_feature (1)..(416): Homolog of NCBI NO: 18412957 NR Description: score=11.7, E=0.66,N=1; protein id: At4g05520.1
  misc_feature (1)..(470): Homolog of NCBI NO: 38345297 NR Description: OSJNBa0043A12.19 [Oryza sativa (japonica
  misc_feature (1)..(33): Homolog of NCBI NO: 9294546 NR Description: contains similarity to EH domain containing
  misc_feature (46)..(470): Homolog of NCBI NO: 9294546 NR Description: contains similarity to EH domain containing
  misc_feature (1)..(470): Homolog of NCBI NO: 18402561 NR Description: expressed protein
MQLVSLAQAGNEITQDSLKREDLSTLDPPVMEGVDELLARSKAVVKRVHPDDNGTTQAQAPSIYHWFGSKSAQKVQMPLTAVTSVIDGLKRLYVEKLKPLEVAYRYNDFSHPLLTNSDFEAKPMVMLLGQYSTGKTTFIKHLLKTSYPGAHVGPEPTTDRFVVVMSGSDGRTIPGNTIAVQADMPFTGLTTFGGAFLSKFECSQMPHPLLEHITFVDTPGVLSGEKQRTQRSYDFTGVTSWFAAKCDLILLLFDPHKLDISDEFKRVISSLRGHDDKIRVVLNKADQVDTQQLMRVYGALMWSLGKVLNTPEVARVYIGSFNDKPVNDSAVGPIGKDLFEREQDDLLCDLKDIPKKACDRRVNEFVKRARAAKIHAYIIGHLKKEMPAVMGKAKAQQRLIDNLEEEFAKVQREYHLPAGDFPDVEHFKQVLGGYSIDKFEKLKPKMVQAVDDMLAHDIPELLKNLRNPYE

SEQ ID NO: 17401 - DNA, 1144 bp, Zea mays subsp. mays
  misc_feature (1)..(1144): Ceres Seq. ID no. 12417524
  misc_feature: MA Experiment ID: 108504 Result: Up-regulated in Transcription
  misc_feature: MA Experiment 108504 PARAMETER Experiment Name: Zm_Drought_P Parameter: Age (day) Value: 8
  misc_feature: MA Experiment 108504 PARAMETER Experiment Name: Zm_Drought_P Parameter: Organism Value: Zea mays
  misc_feature: MA Experiment 108504 PARAMETER Experiment Name: Zm_Drought_P Parameter: Plant Line Value: 35A19
  misc_feature: MA Experiment 108504 PARAMETER Experiment Name: Zm_Drought_P Parameter: Timepoint (hr) Value: 12
  misc_feature: MA Experiment 108504 PARAMETER Experiment Name: Zm_Drought_P Parameter: Tissue Value: Aerial
  misc_feature: MA Experiment 108504 PARAMETER Experiment Name: Zm_Drought_P Parameter: Treatment Value: Drought vs. No Drought
  misc_feature: MA Experiment ID: 108522 Result: Up-regulated in Transcription
  misc_feature: MA Experiment 108522 PARAMETER Experiment Name: Zm_42deg_Heat_P Parameter: Age (day) Value: 8
  misc_feature: MA Experiment 108522 PARAMETER Experiment Name: Zm_42deg_Heat_P Parameter: Organism Value: Zea mays
  misc_feature: MA Experiment 108522 PARAMETER Experiment Name: Zm_42deg_Heat_P Parameter: Plant Line Value: 35A19
  misc_feature: MA Experiment 108522 PARAMETER Experiment Name: Zm_42deg_Heat_P Parameter: Temperature (deg C) Value: 42 vs. 22
  misc_feature: MA Experiment 108522 PARAMETER Experiment Name: Zm_42deg_Heat_P Parameter: Timepoint (hr) Value: 1
  misc_feature: MA Experiment 108522 PARAMETER Experiment Name: Zm_42deg_Heat_P Parameter: Tissue Value: Aerial
  misc_feature: MA Experiment ID: 108523 Result: Up-regulated in Transcription
  misc_feature: MA Experiment 108523 PARAMETER Experiment Name: Zm_42deg_Heat_P Parameter: Age (day) Value: 8
  misc_feature: MA Experiment 108523 PARAMETER Experiment Name: Zm_42deg_Heat_P Parameter: Organism Value: Zea mays
  misc_feature: MA Experiment 108523 PARAMETER Experiment Name: Zm_42deg_Heat_P Parameter: Plant Line Value: 35A19
  misc_feature: MA Experiment 108523 PARAMETER Experiment Name: Zm_42deg_Heat_P Parameter: Temperature (deg C) Value: 42 vs. 22
  misc_feature: MA Experiment 108523 PARAMETER Experiment Name: Zm_42deg_Heat_P Parameter: Timepoint (hr) Value: 6
  misc_feature: MA Experiment 108523 PARAMETER Experiment Name: Zm_42deg_Heat_P Parameter: Tissue Value: Aerial
  misc_feature: MA Experiment ID: 108527 Result: Up-regulated in Transcription
  misc_feature: MA Experiment 108527 PARAMETER Experiment Name: Zm_5mM_NO_P Parameter: Age (day) Value: 8
  misc_feature: MA Experiment 108527 PARAMETER Experiment Name: Zm_5mM_NO_P Parameter: Organism Value: Zea mays
  misc_feature: MA Experiment 108527 PARAMETER Experiment Name: Zm_5mM_NO_P Parameter: Plant Line Value: 35A19
  misc_feature: MA Experiment 108527 PARAMETER Experiment Name: Zm_5mM_NO_P Parameter: Timepoint (hr) Value: 6
  misc_feature: MA Experiment 108527 PARAMETER Experiment Name: Zm_5mM_NO_P Parameter: Tissue Value: Aerial
  misc_feature: MA Experiment 108527 PARAMETER Experiment Name: Zm_5mM_NO_P Parameter: Treatment Value: 5mM NO vs. No Treatment
  misc_feature: MA Experiment ID: 108533 Result: Up-regulated in Transcription
  misc_feature: MA Experiment 108533 PARAMETER Experiment Name: Zm_4deg_Cold_P Parameter: Age (hr) Value: 8
  misc_feature: MA Experiment 108533 PARAMETER Experiment Name: Zm_4deg_Cold_P Parameter: Organism Value: Zea mays
  misc_feature: MA Experiment 108533 PARAMETER Experiment Name: Zm_4deg_Cold_P Parameter: Plant Line Value: 35A19
  misc_feature: MA Experiment 108533 PARAMETER Experiment Name: Zm_4deg_Cold_P Parameter: Temperature (deg C) Value: 4 vs. 22
  misc_feature: MA Experiment 108533 PARAMETER Experiment Name: Zm_4deg_Cold_P Parameter: Timepoint (hr) Value: 1
  misc_feature: MA Experiment 108533 PARAMETER Experiment Name: Zm_4deg_Cold_P Parameter: Tissue Value: Aerial
  misc_feature: MA Experiment ID: 108534 Result: Up-regulated in Transcription
  misc_feature: MA Experiment 108534 PARAMETER Experiment Name: Zm_4deg_Cold_P Parameter: Age (hr) Value: 8
  misc_feature: MA Experiment 108534 PARAMETER Experiment Name: Zm_4deg_Cold_P Parameter: Organism Value: Zea mays
  misc_feature: MA Experiment 108534 PARAMETER Experiment Name: Zm_4deg_Cold_P Parameter: Plant Line Value: 35A19
  misc_feature: MA Experiment 108534 PARAMETER Experiment Name: Zm_4deg_Cold_P Parameter: Temperature (deg C) Value: 4 vs. 22
  misc_feature: MA Experiment 108534 PARAMETER Experiment Name: Zm_4deg_Cold_P Parameter: Timepoint (hr) Value: 6
  misc_feature: MA Experiment 108534 PARAMETER Experiment Name: Zm_4deg_Cold_P Parameter: Tissue Value: Aerial
  misc_feature: MA Experiment ID: 108542 Result: Up-regulated in Transcription
  misc_feature: MA Experiment 108542 PARAMETER Experiment Name: Zm_150mM_NaCl_P Parameter: Age (day) Value: 8
  misc_feature: MA Experiment 108542 PARAMETER Experiment Name: Zm_150mM_NaCl_P Parameter: Organism Value: Zea mays
  misc_feature: MA Experiment 108542 PARAMETER Experiment Name: Zm_150mM_NaCl_P Parameter: Plant Line Value: 35A19
  misc_feature: MA Experiment 108542 PARAMETER Experiment Name: Zm_150mM_NaCl_P Parameter: Timepoint (hr) Value: 6
  misc_feature: MA Experiment 108542 PARAMETER Experiment Name: Zm_150mM_NaCl_P Parameter: Tissue Value: Aerial
  misc_feature: MA Experiment 108542 PARAMETER Experiment Name: Zm_150mM_NaCl_P Parameter: Treatment Value: 150mM NaCl vs. No Treatment
  misc_feature: MA Experiment ID: 108543 Result: Down-regulated in Transcription
  misc_feature: MA Experiment ID: 108546 Result: Down-regulated in Transcription
  misc_feature: MA Experiment 108546 PARAMETER Experiment Name: Zm_Imbibed_Seeds_P Parameter: Age (day) Value: 3 vs. 2
  misc_feature: MA Experiment 108546 PARAMETER Experiment Name: Zm_Imbibed_Seeds_P Parameter: Organism Value: Zea mays
  misc_feature: MA Experiment 108546 PARAMETER Experiment Name: Zm_Imbibed_Seeds_P Parameter: Plant Line Value: 35A19
  misc_feature: MA Experiment 108546 PARAMETER Experiment Name: Zm_Imbibed_Seeds_P Parameter: Tissue Value: Roots vs. Embryo
  misc_feature: MA Experiment ID: 108556 Result: Up-regulated in Transcription
  misc_feature: MA Experiment 108556 PARAMETER Experiment Name: Zm_Drought_P Parameter: Age (day) Value: 9
  misc_feature: MA Experiment 108556 PARAMETER Experiment Name: Zm_Drought_P Parameter: Organism Value: Zea mays
  misc_feature: MA Experiment 108556 PARAMETER Experiment Name: Zm_Drought_P Parameter: Plant Line Value: 35A19
  misc_feature: MA Experiment 108556 PARAMETER Experiment Name: Zm_Drought_P Parameter: Timepoint (hr) Value: 24
  misc_feature: MA Experiment 108556 PARAMETER Experiment Name: Zm_Drought_P Parameter: Tissue Value: Aerial
  misc_feature: MA Experiment 108556 PARAMETER Experiment Name: Zm_Drought_P Parameter: Treatment Value: Drought vs. No Drought
  misc_feature: MA Experiment ID: 20000488 Result: Down-regulated in Transcription
  misc_feature: MA Experiment 20000488 PARAMETER Experiment Name: Zm_50mM_NH4NO3_L_to_H_P Parameter: Organism Value: Zea mays
  misc_feature: MA Experiment 20000488 PARAMETER Experiment Name: Zm_50mM_NH4NO3_L_to_H_P Parameter: Timepoint (hr) Value: 8
  misc_feature: MA Experiment 20000488 PARAMETER Experiment Name: Zm_50mM_NH4NO3_L_to_H_P Parameter: Tissue Value: Leaves
  misc_feature: MA Experiment 20000488 PARAMETER Experiment Name: Zm_50mM_NH4NO3_L_to_H_P Parameter: Treatment Value: 50mM NH4NO3 vs. 100mM Mannitol
  misc_feature: MA Experiment ID: 20000535 Result: Up-regulated in Transcription
  misc_feature: MA Experiment 20000535 PARAMETER Experiment Name: Zm_Hybrid_Seed_Dev_P Parameter: DAP Value: 30 vs. 12
  misc_feature: MA Experiment 20000535 PARAMETER Experiment Name: Zm_Hybrid_Seed_Dev_P Parameter: Organism Value: Zea mays
  misc_feature: MA Experiment 20000535 PARAMETER Experiment Name: Zm_Hybrid_Seed_Dev_P Parameter: Plant Line Value: 35A19
  misc_feature: MA Experiment 20000535 PARAMETER Experiment Name: Zm_Hybrid_Seed_Dev_P Parameter: Tissue Value: Embryo vs. Unfert Floret
agcctcagcctcagcctcacacggccgaagcagaacccgtgaacacctcaaacctcacggctcacgccaccgtcctccagccccgttctccggcgatcctgtcattccagacgcgtctccgcccctctcggtccaccaccccgacgccgccacatgtcgacgcagtccatttcgccggcctctgcgtccgcgcagttcacctacccggcggcagcggccccgtcttacttccccgtgcccttccacctccagaacgcgcaatacaccgcatggaccgcagccgcgccggcggtgcctgtgtacaacgccatctatcccatgccccaagtccagcaggcccaacagttgttccaaaaggactcgaagataattactcctgaagctctagctactgttaaggctgctattgcaaatagtgagaaagacaagaaggttgatgcaacaaaaaaggcagtgcctcgaaaggcagctgggcaaagttgggaggaccctaccttggctgattggcctgaaaatgatttccgtttgttctgcggtgatcttggaaatgaagtgaatgatgatgttcttgcaaaggcattctcaaaatatccatccttcaatatggccagggtttatacgggacaagtggactggtaaaactaaaggatatggttttgttagttttgctgatgcgtctgatcttacttctgccttgaaagatatgaatggtaaatatgtaggaaatcggccaatcaaattacggaagagcacatggaagaacaggatagacttagaagctttggagaagggaaagacccaaccacagaagaaaatcaaactgcagaaaagaagtgttcttcacaaatgaatctgaaaaattctgctcgttcatcgtctgtcagtatcgtttgggaaagctgtctgaagcattaacagttttacttaacgtcagatgtgtaggactgatggtcaccaagttcccggtgacactgtatacaatcgcagacgcgatgctatgttggtgattgaacaggtgtagccgaatagttggatccaataacttcacctgtagtgtaatggtccaattttatcatgggaactgtagttctaaatactccagtgaccagtgctattgtggtgaattattctgtgatctttattc

SEQ ID NO: 17402 - protein, 161 aa, Zea mays subsp. mays
  peptide (1)..(161): Ceres Seq. ID no. 12417525
  misc_feature (81)..(154): Homolog of NCBI NO: 21359951 NR Description: hypothetical protein MGC10433 [Homo sapiens]
  misc_feature (81)..(154): Homolog of NCBI NO: 19526864 NR Description: RIKEN cDNA 3100004P22 [Mus musculus]
  misc_feature (81)..(154): Homolog of NCBI NO: 21594922 NR Description: hypothetical protein MGC10433 [Homo sapiens]
  misc_feature (81)..(154): Homolog of NCBI NO: 12804031 NR Description: Unknown (protein for MGC:10433) [Homo sapiens]
  misc_feature (88)..(154): Homolog of NCBI NO: 23619522 NR Description: hypothetical protein, conserved [Plasmodium
  misc_feature (81)..(154): Homolog of NCBI NO: 2098575 NR Description: F25451_2 [Homo sapiens]
  misc_feature (1)..(154): Homolog of NCBI NO: 17556216 NR Description: RNA recognition motif containing protein
  misc_feature (1)..(154): Homolog of NCBI NO: 39582665 NR Description: Hypothetical protein CBG21313 [Caenorhabditis
  misc_feature (1)..(154): Homolog of NCBI NO: 21357051 NR Description: CG2931-PA [Drosophila melanogaster]
  misc_feature (7)..(154): Homolog of NCBI NO: 15229308 NR Description: RRM-containing protein; protein id: At3g04500.1
MSTQSISPASASAQFTYPAAAAPSYFPVPFHLQNAQYTAWTAAAPAVPVYNAIYPMPQVQQAQQLFQKDSKIITPEALATVKAAIANSEKDKKVDATKKAVPRKAAGQSWEDPTLADWPENDFRLFCGDLGNEVNDDVLAKAFSKYPSFNMARVYTGQVDW

SEQ ID NO: 17403 - protein, 125 aa, Zea mays subsp. mays
  peptide (1)..(125): Ceres Seq. ID no. 12417526
PQPQPHTAEAEPVNTSNLTAHATVLQPRSPAILSFQTRLRPSRSTTPTPPHVDAVHFAGLCVRAVHLPGGSGPVLLPRALPPPERAIHRMDRSRAGGACVQRHLSHAPSPAGPTVVPKGLEDNYS

SEQ ID NO: 17404 - protein, 122 aa, Zea mays subsp. mays
  peptide (1)..(122): Ceres Seq. ID no. 12417527
ASASASHGRSRTREHLKPHGSRHRPPAPFSGDPVIPDASPPLSVHHPDAATCRRSPFRRPLRPRSSPTRRQRPRLTSPCPSTSRTRNTPHGPQPRRRCLCTTPSIPCPKSSRPNSCSKRTRR

SEQ ID NO: 17405 - DNA, 950 bp, Zea mays subsp. mays
  misc_feature (1)..(950): Ceres Seq. ID no. 14312576
  misc_feature: MA Experiment ID: 20000492 Result: Up-regulated in Transcription
  misc_feature: MA Experiment 20000492 PARAMETER Experiment Name: Zm_Hybrid_Seed_Dev_P Parameter: DAP Value: 12
  misc_feature: MA Experiment 20000492 PARAMETER Experiment Name: Zm_Hybrid_Seed_Dev_P Parameter: Organism Value: Zea mays
  misc_feature: MA Experiment 20000492 PARAMETER Experiment Name: Zm_Hybrid_Seed_Dev_P Parameter: Plant Line Value: 35A19
  misc_feature: MA Experiment 20000492 PARAMETER Experiment Name: Zm_Hybrid_Seed_Dev_P Parameter: Tissue Value: Fert Kernel vs. Unfert Floret
aaggcccagatcaaaagaaaagagcagcggagcggagcatgctcttcctccggtgccagcctcgcgtctcgtccccgtccgcatccgcgtccgcgccgccttttcgtccccgcgtcggcgtcgcggctccactgggcgtacgcgtcaccggcggaaggcgagggcaggcggtggtcgcgatggcgtccgccgacgcgcgcttggcggggattgcctcctccatccgcgtcatccccgacttccccaagccagggatcatgttccaggacatcacgacactgctgctcgaccccaaggcgttccgtgacaccatcgacgtcttcgttgagcggtacaaggaccaagggatcaccgtagttgctggtgtggaagctagagggttcatttttggtcctcctatcgctctagccatcagtgcgaaatttgtacctttgaggaagcctaagaagttgccaggcgaggtgatctccgaagaatattctctggaatacggaactgacaagatagagatgcatgttggagctgtacaggccaacgatcgggctcttgtagtcgatgatcttattgccaccggtggaacactctgtgcagctgtcaaacttattgaacgtgttggagcaaaggttgttgagtgtgcttgcgtcattgaattggcagaactgaagggccgagacaaacttggggacaggccagtttttgttcttgtcgaagcagatgcttgagcggaacttgggacttctcttctcagtgagttagagttggtgctgttgatgctacctctctgtcaacaacaaagtttcccatgttggctatattcttgctgacacgtaataaagtttcattccaaattgtgatcccctgaatgatttgtcaatgtagacatgattgctggtccttgtatactgtggcttattattcacatcaattaaggataatcctgattggagctc

SEQ ID NO: 17406 - protein, 239 aa, Zea mays subsp. mays
  peptide (1)..(239): Ceres Seq. ID no. 14312577
  misc_feature (64)..(236): Homolog of NCBI NO: 15234553 NR Description: adenine phosphoribosyltransferase -related
  misc_feature (64)..(236): Homolog of NCBI NO: 21536749 NR Description: adenine phosphoribosyltransferase (EC
  misc_feature (64)..(151): Homolog of NCBI NO: 25286872 NR Description: protein F17L21.24 [imported] - Arabidopsis
  misc_feature (150)..(239): Homolog of NCBI NO: 25286872 NR Description: protein F17L21.24 [imported] - Arabidopsis
  misc_feature (64)..(236): Homolog of NCBI NO: 15235709 NR Description: adenine phosphoribosyltransferase (EC 2.4.2.7) -
  misc_feature (64)..(239): Homolog of NCBI NO: 30689934 NR Description: adenine phosphoribosyltransferase 1, APRT
  misc_feature (64)..(239): Homolog of NCBI NO: 18396344 NR Description: adenine phosphoribosyltransferase 1, APRT
  misc_feature (64)..(239): Homolog of NCBI NO: 32492063 NR Description: adenine phosphoribosyltransferase [Brassica napus]
  misc_feature (60)..(238): Homolog of NCBI NO: 9711921 NR Description: Adenine phosphoribosyltransferase [Hordeum
  misc_feature (60)..(238): Homolog of NCBI NO: 2499932 NR Description: Adenine phosphoribosyltransferase 1 (APRT)
GPDQKKRAAERSMLFLRCQPRVSSPSASASAPPFRPRVGVAAPLGVRVTGGRRGQAVVAMASADARLAGIASSIRVIPDFPKPGIMFQDITTLLLDPKAFRDTIDVFVERYKDQGITVVAGVEARGFIFGPPIALAISAKFVPLRKPKKLPGEVISEEYSLEYGTDKIEMHVGAVQANDRALVVDDLIATGGTLCAAVKLIERVGAKVVECACVIELAELKGRDKLGDRPVFVLVEADA

SEQ ID NO: 17407 - protein, 227 aa, Zea mays subsp. mays
  peptide (1)..(227): Ceres Seq. ID no. 14312578
  misc_feature (52)..(224): Homolog of NCBI NO: 15234553 NR Description: adenine phosphoribosyltransferase -related
  misc_feature (52)..(224): Homolog of NCBI NO: 21536749 NR Description: adenine phosphoribosyltransferase (EC
  misc_feature (52)..(139): Homolog of NCBI NO: 25286872 NR Description: protein F17L21.24 [imported] - Arabidopsis
  misc_feature (138)..(227): Homolog of NCBI NO: 25286872 NR Description: protein F17L21.24 [imported] - Arabidopsis
  misc_feature (52)..(224): Homolog of NCBI NO: 15235709 NR Description: adenine phosphoribosyltransferase (EC 2.4.2.7) -
  misc_feature (52)..(227): Homolog of NCBI NO: 30689934 NR Description: adenine phosphoribosyltransferase 1, APRT
  misc_feature (52)..(227): Homolog of NCBI NO: 18396344 NR Description: adenine phosphoribosyltransferase 1, APRT
  misc_feature (52)..(227): Homolog of NCBI NO: 32492063 NR Description: adenine phosphoribosyltransferase [Brassica napus]
  misc_feature (48)..(226): Homolog of NCBI NO: 9711921 NR Description: Adenine phosphoribosyltransferase [Hordeum
  misc_feature (48)..(226): Homolog of NCBI NO: 2499932 NR Description: Adenine phosphoribosyltransferase 1 (APRT)
MLFLRCQPRVSSPSASASAPPFRPRVGVAAPLGVRVTGGRRGQAVVAMASADARLAGIASSIRVIPDFPKPGIMFQDITTLLLDPKAFRDTIDVFVERYKDQGITVVAGVEARGFIFGPPIALAISAKFVPLRKPKKLPGEVISEEYSLEYGTDKIEMHVGAVQANDRALVVDDLIATGGTLCAAVKLIERVGAKVVECACVIELAELKGRDKLGDRPVFVLVEADA

SEQ ID NO: 17408 - protein, 180 aa, Zea mays subsp. mays
  peptide (1)..(180): Ceres Seq. ID no. 14312579
  misc_feature (5)..(177): Homolog of NCBI NO: 15234553 NR Description: adenine phosphoribosyltransferase -related
  misc_feature (5)..(177): Homolog of NCBI NO: 21536749 NR Description: adenine phosphoribosyltransferase (EC
  misc_feature (5)..(92): Homolog of NCBI NO: 25286872 NR Description: protein F17L21.24 [imported] - Arabidopsis
  misc_feature (91)..(180): Homolog of NCBI NO: 25286872 NR Description: protein F17L21.24 [imported] - Arabidopsis
  misc_feature (5)..(177): Homolog of NCBI NO: 15235709 NR Description: adenine phosphoribosyltransferase (EC 2.4.2.7) -
  misc_feature (5)..(180): Homolog of NCBI NO: 30689934 NR Description: adenine phosphoribosyltransferase 1, APRT
  misc_feature (5)..(180): Homolog of NCBI NO: 18396344 NR Description: adenine phosphoribosyltransferase 1, APRT
  misc_feature (5)..(180): Homolog of NCBI NO: 32492063 NR Description: adenine phosphoribosyltransferase [Brassica napus]
  misc_feature (1)..(179): Homolog of NCBI NO: 9711921 NR Description: Adenine phosphoribosyltransferase [Hordeum
  misc_feature (1)..(179): Homolog of NCBI NO: 2499932 NR Description: Adenine phosphoribosyltransferase 1 (APRT)
MASADARLAGIASSIRVIPDFPKPGIMFQDITTLLLDPKAFRDTIDVFVERYKDQGITVVAGVEARGFIFGPPIALAISAKFVPLRKPKKLPGEVISEEYSLEYGTDKIEMHVGAVQANDRALVVDDLIATGGTLCAAVKLIERVGAKVVECACVIELAELKGRDKLGDRPVFVLVEADA

SEQ ID NO: 17409 - DNA, 1903 bp, Zea mays subsp. mays
  misc_feature (1)..(1903): Ceres Seq. ID no. 12375174
  misc_feature: MA Experiment ID: 108530 Result: Down-regulated in Transcription
  misc_feature: MA Experiment 108530 PARAMETER Experiment Name: Zm_Imbibed_Seeds_P Parameter: Age (day) Value: 6 vs. 2
  misc_feature: MA Experiment 108530 PARAMETER Experiment Name: Zm_Imbibed_Seeds_P Parameter: Organism Value: Zea mays
  misc_feature: MA Experiment 108530 PARAMETER Experiment Name: Zm_Imbibed_Seeds_P Parameter: Plant Line Value: 35A19
  misc_feature: MA Experiment 108530 PARAMETER Experiment Name: Zm_Imbibed_Seeds_P Parameter: Tissue Value: Aerial vs. Embryo
  misc_feature: MA Experiment ID: 108535 Result: Up-regulated in Transcription
  misc_feature: MA Experiment 108535 PARAMETER Experiment Name: Zm_Meristem_P Parameter: Age (day) Value: 8
  misc_feature: MA Experiment 108535 PARAMETER Experiment Name: Zm_Meristem_P Parameter: Organism Value: Zea mays
  misc_feature: MA Experiment 108535 PARAMETER Experiment Name: Zm_Meristem_P Parameter: Plant Line Value: 35A19
  misc_feature: MA Experiment 108535 PARAMETER Experiment Name: Zm_Meristem_P Parameter: Tissue Value: Root Meristem vs. Above Root Meristem
  misc_feature: MA Experiment ID: 20000108 Result: Up-regulated in Transcription
  misc_feature: MA Experiment 20000108 PARAMETER Experiment Name: Zm_Root-Tips_P Parameter: Age (day) Value: 12
  misc_feature: MA Experiment 20000108 PARAMETER Experiment Name: Zm_Root-Tips_P Parameter: Organism Value: Zea mays
  misc_feature: MA Experiment 20000108 PARAMETER Experiment Name: Zm_Root-Tips_P Parameter: Tissue Value: Root tips vs. Root mid region    35
  misc_feature: MA Experiment 20000108 PARAMETER Experiment Name: Zm_Root-Tips_P Parameter: Tissue Value: Root tips vs. Root mid region   Sequence Listing-Misc Features (4)
  misc_feature: MA Experiment ID: 20000626 Result: Down-regulated in Transcription
  misc_feature: MA Experiment 20000626 PARAMETER Experiment Name: Zm_Herbicide-Treatments_P Parameter: Timepoint (hr) Value: 12
  misc_feature: MA Experiment 20000626 PARAMETER Experiment Name: Zm_Herbicide-Treatments_P Parameter: Tissue Value: Aerial
  misc_feature: MA Experiment 20000626 PARAMETER Experiment Name: Zm_Herbicide-Treatments_P Parameter: Treatment Value: Roundup vs. No Treatment
aattattaaacaaaagcagttgtctcgataccaaaaccgcgtatctcaccccgcctccttttcttcgcgtcccccgcctcgatccgatcggggacgggtcgaggggcaggggaatgtcgtcgtcgtctgcgtcatcttcggcggcggcgcaccaccagcagcattaccggcggcagacaggagggagcggtctcgtgccgctcgccgcgctcatcaaggaggaggcccgcacggagcgccaatccatagccggcggcgaaagcaggatctccgcgcgcgacgatgacgcggcaggagtaggaagctccggcgtaggaggggaggcggcggaggcggcggtggagtcgcggctggagcgcccgctgctgcgctatgggtgcgccgctcagtgcaaaaagggcgaggacttctttttgctcagaacggactgtcttcgtcccgccatctccgtctcctcctcggcctccccgcaccccatcttcgccgtattcgctatacttgatggccataatggtaacgcagccgcaatatacacaagggacaatttgctcaaccatgtccttagtgctatgccacgggggctgtccagggaggagtggttgcacatgttgccccgagcactggttgcagggtttgttaagacggacaaggagttccagagcaaagggcaaacttctggcaccaccgctacatttgtgataattgatgggtggactatcactgttgcctctgttggtgattctcgctgtattttagatgctcagggtggggctgtttctttgcttactgtggatcacagactagaagaaaatgttgaggagagggagcgcgttacagcaagtggaggtgaagttggaagactcagtgttgttggtggagcagagattggtccgctacgatgctggcctggaggtctatgcttatcaagatccattggagatatcgatgttggcgaatttattgtccctgttccatatgtgaagcaagtgaagttgtcaaatgctggaggaagacttattattgcttcagatggcatttgggatgcattatcctcagaagccgctgctaagtcttgcagaggtttgcctgctgagcttgccgcaaagcaagttgttaaggaggcactcaggacaagagggctaaaggatgatacaacttgcattgttgttgacataatcccacctggtcaaacaatacggcctctgtctcctcctaaaaagacgagcaagctgaagtcttttatttttagaaagaaagcgaaggacccttctcagaagttgactaaacagcattcagctgttggtatcgttgaagagatatttgaagaaggttcagcgatgctatcagaaaggttaggtcctgatttggatggcaggagaacctcaagcctgtttacatgtgccatctgccagttagacctggagccaagtgaaggcatttcggtgcatgctggatcgatcttctcttcgacctccaggccatgggaaggcccattcctctgctcggactgccgtgagaagaaggatgccatggaaggcaaacggcccagtggcgtcaaggttctgtagtatacagcaaccgatccttgtagctgcccgaaaaatcccacccttcttatttccttttctcgtgaggaccctttcaaagttttacaatttgtttcctttaaattcggatgattttaggatgcgtcttattttgcgaggaaatagccaactatgtaagtagctgttggcaaaaggaaatgtgaagcgagcgaatagggcatcccttcatttttctttctctcttccattcggaatggatgaatagggttgccttcaatttttgttctcttccattcggaatggacagacagtaactcagctcacgagtaatgacagctaacatattctttatttgt

SEQ ID NO: 17410 - protein, 521 aa, Zea mays subsp. mays
  peptide (1)..(521): Ceres Seq. ID no. 12375175
  misc_feature (138)..(384): Pfam Name: Protein phosphatase 2C Pfam Description: Protein phosphatase 2C
  misc_feature (75)..(516): Homolog of NCBI NO: 38344839 NR Description: OSJNBa0064H22.20 [Oryza sativa (japonica
  misc_feature (118)..(450): Homolog of NCBI NO: 34898168 NR Description: protein phosphatase 2C-like
  misc_feature (116)..(514): Homolog of NCBI NO: 14029015 NR Description: Unknown protein [Oryza sativa]
  misc_feature (116)..(448): Homolog of NCBI NO: 16930415 NR Description: At1g09160/T12M4_13 [Arabidopsis thaliana]
  misc_feature (110)..(517): Homolog of NCBI NO: 15292869 NR Description: unknown protein [Arabidopsis thaliana]
  misc_feature (110)..(517): Homolog of NCBI NO: 18401703 NR Description: expressed protein; protein id: At1g47380.1
  misc_feature (118)..(516): Homolog of NCBI NO: 34394411 NR Description: protein phosphatase 2C-like
  misc_feature (116)..(516): Homolog of NCBI NO: 15217454 NR Description: putative protein phosphatase 2C
  misc_feature (115)..(521): Homolog of NCBI NO: 15221404 NR Description: putative protein phosphatase
  misc_feature (38)..(521): Homolog of NCBI NO: 34914644 NR Description: OSJNBa0054L14.21 [Oryza sativa (japonica
LLNKSSCLDTKTAYLTPPPFLRVPRLDPIGDGSRGRGMSSSSASSSAAAHHQQHYRRQTGGSGLVPLAALIKEEARTERQSIAGGESRISARDDDAAGVGSSGVGGEAAEAAVESRLERPLLRYGCAAQCKKGEDFFLLRTDCLRPAISVSSSASPHPIFAVFAILDGHNGNAAAIYTRDNLLNHVLSAMPRGLSREEWLHMLPRALVAGFVKTDKEFQSKGQTSGTTATFVIIDGWTITVASVGDSRCILDAQGGAVSLLTVDHRLEENVEERERVTASGGEVGRLSVVGGAEIGPLRCWPGGLCLSRSIGDIDVGEFIVPVPYVKQVKLSNAGGRLIIASDGIWDALSSEAAAKSCRGLPAELAAKQVVKEALRTRGLKDDTTCIVVDIIPPGQTIRPLSPPKKTSKLKSFIFRKKAKDPSQKLTKQHSAVGIVEEIFEEGSAMLSERLGPDLDGRRTSSLFTCAICQLDLEPSEGISVHAGSIFSSTSRPWEGPFLCSDCREKKDAMEGKRPSGVKVL

SEQ ID NO: 17411 - protein, 484 aa, Zea mays subsp. mays
  peptide (1)..(484): Ceres Seq. ID no. 12375176
  misc_feature (101)..(347): Pfam Name: Protein phosphatase 2C Pfam Description: Protein phosphatase 2C
  misc_feature (38)..(479): Homolog of NCBI NO: 38344839 NR Description: OSJNBa0064H22.20 [Oryza sativa (japonica
  misc_feature (81)..(413): Homolog of NCBI NO: 34898168 NR Description: protein phosphatase 2C-like
  misc_feature (79)..(477): Homolog of NCBI NO: 14029015 NR Description: Unknown protein [Oryza sativa]
  misc_feature (79)..(411): Homolog of NCBI NO: 16930415 NR Description: At1g09160/T12M4_13 [Arabidopsis thaliana]
  misc_feature (73)..(480): Homolog of NCBI NO: 15292869 NR Description: unknown protein [Arabidopsis thaliana]
  misc_feature (73)..(480): Homolog of NCBI NO: 18401703 NR Description: expressed protein; protein id: At1g47380.1
  misc_feature (81)..(479): Homolog of NCBI NO: 34394411 NR Description: protein phosphatase 2C-like
  misc_feature (79)..(479): Homolog of NCBI NO: 15217454 NR Description: putative protein phosphatase 2C
  misc_feature (78)..(484): Homolog of NCBI NO: 15221404 NR Description: putative protein phosphatase
  misc_feature (1)..(484): Homolog of NCBI NO: 34914644 NR Description: OSJNBa0054L14.21 [Oryza sativa (japonica
MSSSSASSSAAAHHQQHYRRQTGGSGLVPLAALIKEEARTERQSIAGGESRISARDDDAAGVGSSGVGGEAAEAAVESRLERPLLRYGCAAQCKKGEDFFLLRTDCLRPAISVSSSASPHPIFAVFAILDGHNGNAAAIYTRDNLLNHVLSAMPRGLSREEWLHMLPRALVAGFVKTDKEFQSKGQTSGTTATFVIIDGWTITVASVGDSRCILDAQGGAVSLLTVDHRLEENVEERERVTASGGEVGRLSVVGGAEIGPLRCWPGGLCLSRSIGDIDVGEFIVPVPYVKQVKLSNAGGRLIIASDGIWDALSSEAAAKSCRGLPAELAAKQVVKEALRTRGLKDDTTCIVVDIIPPGQTIRPLSPPKKTSKLKSFIFRKKAKDPSQKLTKQHSAVGIVEEIFEEGSAMLSERLGPDLDGRRTSSLFTCAICQLDLEPSEGISVHAGSIFSSTSRPWEGPFLCSDCREKKDAMEGKRPSGVKVL

SEQ ID NO: 17412 - protein, 332 aa, Zea mays subsp. mays
  peptide (1)..(332): Ceres Seq. ID no. 12375177
  misc_feature (1)..(195): Pfam Name: Protein phosphatase 2C Pfam Description: Protein phosphatase 2C
  misc_feature (1)..(327): Homolog of NCBI NO: 38344839 NR Description: OSJNBa0064H22.20 [Oryza sativa (japonica
  misc_feature (1)..(261): Homolog of NCBI NO: 34898168 NR Description: protein phosphatase 2C-like
  misc_feature (1)..(325): Homolog of NCBI NO: 14029015 NR Description: Unknown protein [Oryza sativa]
  misc_feature (1)..(259): Homolog of NCBI NO: 16930415 NR Description: At1g09160/T12M4_13 [Arabidopsis thaliana]
  misc_feature (1)..(328): Homolog of NCBI NO: 15292869 NR Description: unknown protein [Arabidopsis thaliana]
  misc_feature (1)..(328): Homolog of NCBI NO: 18401703 NR Description: expressed protein; protein id: At1g47380.1
  misc_feature (1)..(327): Homolog of NCBI NO: 34394411 NR Description: protein phosphatase 2C-like
  misc_feature (1)..(327): Homolog of NCBI NO: 15217454 NR Description: putative protein phosphatase 2C
  misc_feature (1)..(332): Homolog of NCBI NO: 15221404 NR Description: putative protein phosphatase
  misc_feature (1)..(332): Homolog of NCBI NO: 34914644 NR Description: OSJNBa0054L14.21 [Oryza sativa (japonica
MPRGLSREEWLHMLPRALVAGFVKTDKEFQSKGQTSGTTATFVIIDGWTITVASVGDSRCILDAQGGAVSLLTVDHRLEENVEERERVTASGGEVGRLSVVGGAEIGPLRCWPGGLCLSRSIGDIDVGEFIVPVPYVKQVKLSNAGGRLIIASDGIWDALSSEAAAKSCRGLPAELAAKQVVKEALRTRGLKDDTTCIVVDIIPPGQTIRPLSPPKKTSKLKSFIFRKKAKDPSQKLTKQHSAVGIVEEIFEEGSAMLSERLGPDLDGRRTSSLFTCAICQLDLEPSEGISVHAGSIFSSTSRPWEGPFLCSDCREKKDAMEGKRPSGVKVL

SEQ ID NO: 17413 - DNA, 1286 bp, Zea mays subsp. mays; identical to SEQ ID NO: 16884
  misc_feature (1)..(1286): Ceres Seq. ID no. 13494497
  misc_feature: MA Experiment ID: 108504 Result: Down-regulated in Transcription
  misc_feature: MA Experiment 108504 PARAMETER Experiment Name: Zm_Drought_P Parameter: Age (day) Value: 8
  misc_feature: MA Experiment 108504 PARAMETER Experiment Name: Zm_Drought_P Parameter: Organism Value: Zea mays
  misc_feature: MA Experiment 108504 PARAMETER Experiment Name: Zm_Drought_P Parameter: Plant Line Value: 35A19
  misc_feature: MA Experiment 108504 PARAMETER Experiment Name: Zm_Drought_P Parameter: Timepoint (hr) Value: 12
  misc_feature: MA Experiment 108504 PARAMETER Experiment Name: Zm_Drought_P Parameter: Tissue Value: Aerial
  misc_feature: MA Experiment 108504 PARAMETER Experiment Name: Zm_Drought_P Parameter: Treatment Value: Drought vs. No Drought
  misc_feature: MA Experiment ID: 108523 Result: Down-regulated in Transcription
  misc_feature: MA Experiment 108523 PARAMETER Experiment Name: Zm_42deg_Heat_P Parameter: Age (day) Value: 8
  misc_feature: MA Experiment 108523 PARAMETER Experiment Name: Zm_42deg_Heat_P Parameter: Organism Value: Zea mays
  misc_feature: MA Experiment 108523 PARAMETER Experiment Name: Zm_42deg_Heat_P Parameter: Plant Line Value: 35A19
  misc_feature: MA Experiment 108523 PARAMETER Experiment Name: Zm_42deg_Heat_P Parameter: Temperature (deg C) Value: 42 vs. 22
  misc_feature: MA Experiment 108523 PARAMETER Experiment Name: Zm_42deg_Heat_P Parameter: Timepoint (hr) Value: 6
  misc_feature: MA Experiment 108523 PARAMETER Experiment Name: Zm_42deg_Heat_P Parameter: Tissue Value: Aerial
  misc_feature: MA Experiment ID: 108543 Result: Up-regulated in Transcription
  misc_feature: MA Experiment ID: 108544 Result: Down-regulated in Transcription
  misc_feature: MA Experiment ID: 108556 Result: Down-regulated in Transcription
  misc_feature: MA Experiment 108556 PARAMETER Experiment Name: Zm_Drought_P Parameter: Age (day) Value: 9
  misc_feature: MA Experiment 108556 PARAMETER Experiment Name: Zm_Drought_P Parameter: Organism Value: Zea mays
  misc_feature: MA Experiment 108556 PARAMETER Experiment Name: Zm_Drought_P Parameter: Plant Line Value: 35A19
  misc_feature: MA Experiment 108556 PARAMETER Experiment Name: Zm_Drought_P Parameter: Timepoint (hr) Value: 24
  misc_feature: MA Experiment 108556 PARAMETER Experiment Name: Zm_Drought_P Parameter: Tissue Value: Aerial
  misc_feature: MA Experiment 108556 PARAMETER Experiment Name: Zm_Drought_P Parameter: Treatment Value: Drought vs. No Drought
  misc_feature: MA Experiment ID: 108597 Result: Down-regulated in Transcription
  misc_feature: MA Experiment 108597 PARAMETER Experiment Name: Zm_100uM_ABA_P Parameter: Age (day) Value: 9
  misc_feature: MA Experiment 108597 PARAMETER Experiment Name: Zm_100uM_ABA_P Parameter: Organism Value: Zea mays
  misc_feature: MA Experiment 108597 PARAMETER Experiment Name: Zm_100uM_ABA_P Parameter: Plant Line Value: 35A19
  misc_feature: MA Experiment 108597 PARAMETER Experiment Name: Zm_100uM_ABA_P Parameter: Timepoint (hr) Value: 24
  misc_feature: MA Experiment 108597 PARAMETER Experiment Name: Zm_100uM_ABA_P Parameter: Tissue Value: Aerial
  misc_feature: MA Experiment 108597 PARAMETER Experiment Name: Zm_100uM_ABA_P Parameter: Treatment Value: 100uM ABA vs. No Treatment
  misc_feature: MA Experiment ID: 20000478 Result: Down-regulated in Transcription
  misc_feature: MA Experiment 20000478 PARAMETER Experiment Name: Zm_5mM_SA_P Parameter: Age (day) Value: 11
  misc_feature: MA Experiment 20000478 PARAMETER Experiment Name: Zm_5mM_SA_P Parameter: Organism Value: Zea mays
  misc_feature: MA Experiment 20000478 PARAMETER Experiment Name: Zm_5mM_SA_P Parameter: Plant Line Value: 35A19
  misc_feature: MA Experiment 20000478 PARAMETER Experiment Name: Zm_5mM_SA_P Parameter: Timepoint (hr) Value: 72
  misc_feature: MA Experiment 20000478 PARAMETER Experiment Name: Zm_5mM_SA_P Parameter: Tissue Value: Aerial
  misc_feature: MA Experiment 20000478 PARAMETER Experiment Name: Zm_5mM_SA_P Parameter: Treatment Value: 5mM SA vs. No Treatment
  misc_feature: MA Experiment ID: 20000480 Result: Down-regulated in Transcription
  misc_feature: MA Experiment 20000480 PARAMETER Experiment Name: Zm_Drought_P Parameter: Age (day) Value: 11
  misc_feature: MA Experiment 20000480 PARAMETER Experiment Name: Zm_Drought_P Parameter: Organism Value: Zea mays
  misc_feature: MA Experiment 20000480 PARAMETER Experiment Name: Zm_Drought_P Parameter: Plant Line Value: 35A19
  misc_feature: MA Experiment 20000480 PARAMETER Experiment Name: Zm_Drought_P Parameter: Timepoint (hr) Value: 72
  misc_feature: MA Experiment 20000480 PARAMETER Experiment Name: Zm_Drought_P Parameter: Tissue Value: Aerial
  misc_feature: MA Experiment 20000480 PARAMETER Experiment Name: Zm_Drought_P Parameter: Treatment Value: Drought vs. No Drought
  misc_feature: MA Experiment ID: 20000488 Result: Down-regulated in Transcription
  misc_feature: MA Experiment 20000488 PARAMETER Experiment Name: Zm_50mM_NH4NO3_L_to_H_P Parameter: Organism Value: Zea mays
  misc_feature: MA Experiment 20000488 PARAMETER Experiment Name: Zm_50mM_NH4NO3_L_to_H_P Parameter: Timepoint (hr) Value: 8
  misc_feature: MA Experiment 20000488 PARAMETER Experiment Name: Zm_50mM_NH4NO3_L_to_H_P Parameter: Tissue Value: Leaves
  misc_feature: MA Experiment 20000488 PARAMETER Experiment Name: Zm_50mM_NH4NO3_L_to_H_P Parameter: Treatment Value: 50mM NH4NO3 vs. 100mM Mannitol
  misc_feature: MA Experiment ID: 20000626 Result: Down-regulated in Transcription
  misc_feature: MA Experiment 20000626 PARAMETER Experiment Name: Zm_Herbicide-Treatments_P Parameter: Timepoint (hr) Value: 12
  misc_feature: MA Experiment 20000626 PARAMETER Experiment Name: Zm_Herbicide-Treatments_P Parameter: Tissue Value: Aerial
  misc_feature: MA Experiment 20000626 PARAMETER Experiment Name: Zm_Herbicide-Treatments_P Parameter: Treatment Value: Roundup vs. No Treatment

SEQ ID NO: 17414 - protein, 265 aa, Zea mays subsp. mays; identical to SEQ ID NO: 16885
  peptide (1)..(265): Ceres Seq. ID no. 13494498
  misc_feature (77)..(212): Pfam Name: Vesicle transport v-SNARE protein Pfam Description: Vesicle transport v-SNARE protein
  misc_feature (77)..(212): Pfam Name: Vesicle transport v-SNARE protein Pfam Description: Vesicle transport v-SNARE protein
  misc_feature (1)..(182): Homolog of NCBI NO: 25370781 NR Description: F11A17.20 [imported] - Arabidopsis thaliana
  misc_feature (12)..(258): Homolog of NCBI NO: 25370781 NR Description: F11A17.20 [imported] - Arabidopsis thaliana
  misc_feature (7)..(248): Homolog of NCBI NO: 25370780 NR Description: hypothetical protein At2g35190 [imported] -
  misc_feature (7)..(258): Homolog of NCBI NO: 27805643 NR Description: Novel plant SNARE 11 (AtNPSN11)
  misc_feature (7)..(258): Homolog of NCBI NO: 18403771 NR Description: expressed protein [Arabidopsis thaliana]
  misc_feature (1)..(182): Homolog of NCBI NO: 25370781 NR Description: F11A17.20 [imported] - Arabidopsis thaliana
  misc_feature (7)..(248): Homolog of NCBI NO: 25370780 NR Description: hypothetical protein At2g35190 [imported] -
  misc_feature (7)..(258): Homolog of NCBI NO: 18403771 NR Description: expressed protein [Arabidopsis thaliana]
  misc_feature (1)..(264): Homolog of NCBI NO: 23237830 NR Description: contains ESTs
  misc_feature (1)..(261): Homolog of NCBI NO: 34896946 NR Description: putative vesicle soluble NSF attachment protein
  misc_feature (1)..(258): Homolog of NCBI NO: 18401508 NR Description: expressed protein [Arabidopsis thaliana]
  misc_feature (1)..(258): Homolog of NCBI NO: 22330102 NR Description: expressed protein [Arabidopsis thaliana]
  misc_feature (1)..(258): Homolog of NCBI NO: 21536876 NR Description: unknown [Arabidopsis thaliana]
  misc_feature (7)..(258): Homolog of NCBI NO: 27805643 NR Description: Novel plant SNARE 11 (AtNPSN11)
  misc_feature (12)..(258): Homolog of NCBI NO: 25370781 NR Description: F11A17.20 [imported] - Arabidopsis thaliana
  misc_feature (1)..(258): Homolog of NCBI NO: 21536876 NR Description: unknown [Arabidopsis thaliana]
  misc_feature (1)..(258): Homolog of NCBI NO: 22330102 NR Description: expressed protein [Arabidopsis thaliana]
  misc_feature (1)..(258): Homolog of NCBI NO: 18401508 NR Description: expressed protein [Arabidopsis thaliana]
  misc_feature (1)..(261): Homolog of NCBI NO: 34896946 NR Description: putative vesicle soluble NSF attachment protein
  misc_feature (1)..(264): Homolog of NCBI NO: 23237830 NR Description: contains ESTs

SEQ ID NO: 17415 - protein, 259 aa, Zea mays subsp. mays; identical to SEQ ID NO: 16886
  peptide (1)..(259): Ceres Seq. ID no. 13494499
  misc_feature (71)..(206): Pfam Name: Vesicle transport v-SNARE protein Pfam Description: Vesicle transport v-SNARE protein
  misc_feature (71)..(206): Pfam Name: Vesicle transport v-SNARE protein Pfam Description: Vesicle transport v-SNARE protein
  misc_feature (1)..(176): Homolog of NCBI NO: 25370781 NR Description: F11A17.20 [imported] - Arabidopsis thaliana
  misc_feature (6)..(252): Homolog of NCBI NO: 25370781 NR Description: F11A17.20 [imported] - Arabidopsis thaliana
  misc_feature (1)..(242): Homolog of NCBI NO: 25370780 NR Description: hypothetical protein At2g35190 [imported] -
  misc_feature (1)..(252): Homolog of NCBI NO: 27805643 NR Description: Novel plant SNARE 11 (AtNPSN11)
  misc_feature (1)..(252): Homolog of NCBI NO: 18403771 NR Description: expressed protein [Arabidopsis thaliana]
  misc_feature (1)..(176): Homolog of NCBI NO: 25370781 NR Description: F11A17.20 [imported] - Arabidopsis thaliana
  misc_feature (1)..(242): Homolog of NCBI NO: 25370780 NR Description: hypothetical protein At2g35190 [imported] -
  misc_feature (1)..(252): Homolog of NCBI NO: 18403771 NR Description: expressed protein [Arabidopsis thaliana]
  misc_feature (1)..(258): Homolog of NCBI NO: 23237830 NR Description: contains ESTs
  misc_feature (1)..(255): Homolog of NCBI NO: 34896946 NR Description: putative vesicle soluble NSF attachment protein
  misc_feature (1)..(252): Homolog of NCBI NO: 18401508 NR Description: expressed protein [Arabidopsis thaliana]
  misc_feature (1)..(252): Homolog of NCBI NO: 22330102 NR Description: expressed protein [Arabidopsis thaliana]
  misc_feature (1)..(252): Homolog of NCBI NO: 21536876 NR Description: unknown [Arabidopsis thaliana]
  misc_feature (1)..(252): Homolog of NCBI NO: 27805643 NR Description: Novel plant SNARE 11 (AtNPSN11)
  misc_feature (6)..(252): Homolog of NCBI NO: 25370781 NR Description: F11A17.20 [imported] - Arabidopsis thaliana
  misc_feature (1)..(252): Homolog of NCBI NO: 21536876 NR Description: unknown [Arabidopsis thaliana]
  misc_feature (1)..(252): Homolog of NCBI NO: 22330102 NR Description: expressed protein [Arabidopsis thaliana]
  misc_feature (1)..(252): Homolog of NCBI NO: 18401508 NR Description: expressed protein [Arabidopsis thaliana]
  misc_feature (1)..(255): Homolog of NCBI NO: 34896946 NR Description: putative vesicle soluble NSF attachment protein
  misc_feature (1)..(258): Homolog of NCBI NO: 23237830 NR Description: contains ESTs

SEQ ID NO: 17416 - protein, 234 aa, Zea mays subsp. mays; identical to SEQ ID NO: 16887
  peptide (1)..(234): Ceres Seq. ID no. 13494500
  misc_feature (46)..(181): Pfam Name: Vesicle transport v-SNARE protein Pfam Description: Vesicle transport v-SNARE protein
  misc_feature (46)..(181): Pfam Name: Vesicle transport v-SNARE protein Pfam Description: Vesicle transport v-SNARE protein
  misc_feature (1)..(151): Homolog of NCBI NO: 25370781 NR Description: F11A17.20 [imported] - Arabidopsis thaliana
  misc_feature (1)..(227): Homolog of NCBI NO: 25370781 NR Description: F11A17.20 [imported] - Arabidopsis thaliana
  misc_feature (1)..(217): Homolog of NCBI NO: 25370780 NR Description: hypothetical protein At2g35190 [imported] -
  misc_feature (1)..(227): Homolog of NCBI NO: 27805643 NR Description: Novel plant SNARE 11 (AtNPSN11)
  misc_feature (1)..(227): Homolog of NCBI NO: 18403771 NR Description: expressed protein [Arabidopsis thaliana]
  misc_feature (1)..(227): Homolog of NCBI NO: 25370781 NR Description: F11A17.20 [imported] - Arabidopsis thaliana
  misc_feature (1)..(227): Homolog of NCBI NO: 27805643 NR Description: Novel plant SNARE 11 (AtNPSN11)
  misc_feature (1)..(233): Homolog of NCBI NO: 23237830 NR Description: contains ESTs
  misc_feature (1)..(230): Homolog of NCBI NO: 34896946 NR Description: putative vesicle soluble NSF attachment protein
  misc_feature (1)..(227): Homolog of NCBI NO: 18401508 NR Description: expressed protein [Arabidopsis thaliana]
  misc_feature (1)..(227): Homolog of NCBI NO: 22330102 NR Description: expressed protein [Arabidopsis thaliana]
  misc_feature (1)..(227): Homolog of NCBI NO: 21536876 NR Description: unknown [Arabidopsis thaliana]
  misc_feature (1)..(227): Homolog of NCBI NO: 18403771 NR Description: expressed protein [Arabidopsis thaliana]
  misc_feature (1)..(217): Homolog of NCBI NO: 25370780 NR Description: hypothetical protein At2g35190 [imported] -
  misc_feature (1)..(151): Homolog of NCBI NO: 25370781 NR Description: F11A17.20 [imported] - Arabidopsis thaliana
  misc_feature (1)..(227): Homolog of NCBI NO: 21536876 NR Description: unknown [Arabidopsis thaliana]
  misc_feature (1)..(227): Homolog of NCBI NO: 22330102 NR Description: expressed protein [Arabidopsis thaliana]
  misc_feature (1)..(227): Homolog of NCBI NO: 18401508 NR Description: expressed protein [Arabidopsis thaliana]
  misc_feature (1)..(230): Homolog of NCBI NO: 34896946 NR Description: putative vesicle soluble NSF attachment protein
  misc_feature (1)..(233): Homolog of NCBI NO: 23237830 NR Description: contains ESTs

SEQ ID NO: 17417 - DNA, 2187 bp, Zea mays subsp. mays; identical to SEQ ID NO: 3955
  misc_feature (1)..(2187): Ceres Seq. ID no. 12362634
  misc_feature: MA Experiment ID: 20000487 Result: Up-regulated in Transcription
  misc_feature: MA Experiment 20000487 PARAMETER Experiment Name: Zm_50mM_NH4NO3_L_to_H_P Parameter: Organism Value: Zea mays
  misc_feature: MA Experiment 20000487 PARAMETER Experiment Name: Zm_50mM_NH4NO3_L_to_H_P Parameter: Timepoint (hr) Value: 4
  misc_feature: MA Experiment 20000487 PARAMETER Experiment Name: Zm_50mM_NH4NO3_L_to_H_P Parameter: Tissue Value: Leaves
  misc_feature: MA Experiment 20000487 PARAMETER Experiment Name: Zm_50mM_NH4NO3_L_to_H_P Parameter: Treatment Value: 50mM NH4NO3 vs. 100mM Mannitol
  misc_feature: MA Experiment ID: 20000535 Result: Up-regulated in Transcription
  misc_feature: MA Experiment 20000535 PARAMETER Experiment Name: Zm_Hybrid_Seed_Dev_P Parameter: DAP Value: 30 vs. 12
  misc_feature: MA Experiment 20000535 PARAMETER Experiment Name: Zm_Hybrid_Seed_Dev_P Parameter: Organism Value: Zea mays
  misc_feature: MA Experiment 20000535 PARAMETER Experiment Name: Zm_Hybrid_Seed_Dev_P Parameter: Plant Line Value: 35A19
  misc_feature: MA Experiment 20000535 PARAMETER Experiment Name: Zm_Hybrid_Seed_Dev_P Parameter: Tissue Value: Embryo vs. Unfert Floret

SEQ ID NO: 17418 - protein, 533 aa, Zea mays subsp. mays; identical to SEQ ID NO: 3956
  peptide (1)..(533): Ceres Seq. ID no. 12362635
  misc_feature (13)..(531): Pfam Name: Microtubule associated protein (MAP65/ASE1 family) Pfam Description: Microtubule associated protein (MAP65/ASE1
  misc_feature (13)..(531): Pfam Name: Microtubule associated protein (MAP65/ASE1 family) Pfam Description: Microtubule associated protein (MAP65/ASE1
  misc_feature (13)..(533): Homolog of NCBI NO: 11558256 NR Description: microtubule-associated protein MAP65-1c
  misc_feature (13)..(491): Homolog of NCBI NO: 15217774 NR Description: hypothetical protein; protein id: At1g27920.1
  misc_feature (12)..(533): Homolog of NCBI NO: 27357984 NR Description: Unknown protein [Oryza sativa (japonica
  misc_feature (5)..(524): Homolog of NCBI NO: 18416818 NR Description: putative protein
  misc_feature (13)..(533): Homolog of NCBI NO: 11558254 NR Description: microtubule-associated protein MAP65-1b
  misc_feature (13)..(491): Homolog of NCBI NO: 15217774 NR Description: hypothetical protein; protein id: At1g27920.1
  misc_feature (12)..(533): Homolog of NCBI NO: 27357984 NR Description: Unknown protein [Oryza sativa (japonica
  misc_feature (5)..(524): Homolog of NCBI NO: 18416818 NR Description: putative protein
  misc_feature (13)..(533): Homolog of NCBI NO: 11558252 NR Description: microtubule-associated protein MAP65-1a
  misc_feature (13)..(533): Homolog of NCBI NO: 11558256 NR Description: microtubule-associated protein MAP65-1c
  misc_feature (13)..(533): Homolog of NCBI NO: 15240485 NR Description: putative protein; protein id: At5g55230.1
  misc_feature (13)..(533): Homolog of NCBI NO: 11558254 NR Description: microtubule-associated protein MAP65-1b
  misc_feature (13)..(533): Homolog of NCBI NO: 28200790 NR Description: 65kD microtubule associated protein [Daucus
  misc_feature (5)..(385): Homolog of NCBI NO: 7485328 NR Description: hypothetical protein F10M23.100 - Arabidopsis
  misc_feature (14)..(485): Homolog of NCBI NO: 15242132 NR Description: putative protein; protein id: At5g51600.1
  misc_feature (13)..(533): Homolog of NCBI NO: 15240485 NR Description: putative protein; protein id: At5g55230.1
  misc_feature (13)..(533): Homolog of NCBI NO: 28200790 NR Description: 65kD microtubule associated protein [Daucus
  misc_feature (5)..(385): Homolog of NCBI NO: 7485328 NR Description: hypothetical protein F10M23.100 - Arabidopsis
  misc_feature (14)..(485): Homolog of NCBI NO: 15242132 NR Description: putative protein; protein id: At5g51600.1
  misc_feature (13)..(533): Homolog of NCBI NO: 11558252 NR Description: microtubule-associated protein MAP65-1a

SEQ ID NO: 17419 - protein, 382 aa, Zea mays subsp. mays; identical to SEQ ID NO: 3957
  peptide (1)..(382): Ceres Seq. ID no. 12362636
  misc_feature (1)..(380): Pfam Name: Microtubule associated protein (MAP65/ASE1 family) Pfam Description: Microtubule associated protein (MAP65/ASE1
  misc_feature (1)..(380): Pfam Name: Microtubule associated protein (MAP65/ASE1 family) Pfam Description: Microtubule associated protein (MAP65/ASE1
  misc_feature (1)..(340): Homolog of NCBI NO: 15217774 NR Description: hypothetical protein; protein id: At1g27920.1
  misc_feature (1)..(334): Homolog of NCBI NO: 15242132 NR Description: putative protein; protein id: At5g51600.1
  misc_feature (1)..(382): Homolog of NCBI NO: 27357984 NR Description: Unknown protein [Oryza sativa (japonica
  misc_feature (1)..(234): Homolog of NCBI NO: 7485328 NR Description: hypothetical protein F10M23.100 - Arabidopsis
  misc_feature (1)..(373): Homolog of NCBI NO: 18416818 NR Description: putative protein
  misc_feature (1)..(340): Homolog of NCBI NO: 15217774 NR Description: hypothetical protein; protein id: At1g27920.1
  misc_feature (1)..(382): Homolog of NCBI NO: 27357984 NR Description: Unknown protein [Oryza sativa (japonica
  misc_feature (1)..(373): Homolog of NCBI NO: 18416818 NR Description: putative protein
  misc_feature (1)..(382): Homolog of NCBI NO: 11558252 NR Description: microtubule-associated protein MAP65-1a
  misc_feature (1)..(382): Homolog of NCBI NO: 11558256 NR Description: microtubule-associated protein MAP65-1c
  misc_feature (1)..(382): Homolog of NCBI NO: 15240485 NR Description: putative protein; protein id: At5g55230.1
  misc_feature (1)..(382): Homolog of NCBI NO: 11558254 NR Description: microtubule-associated protein MAP65-1b
  misc_feature (1)..(382): Homolog of NCBI NO: 28200790 NR Description: 65kD microtubule associated protein [Daucus
  misc_feature (1)..(234): Homolog of NCBI NO: 7485328 NR Description: hypothetical protein F10M23.100 - Arabidopsis
  misc_feature (1)..(334): Homolog of NCBI NO: 15242132 NR Description: putative protein; protein id: At5g51600.1
  misc_feature (1)..(382): Homolog of NCBI NO: 28200790 NR Description: 65kD microtubule associated protein [Daucus
  misc_feature (1)..(382): Homolog of NCBI NO: 11558254 NR Description: microtubule-associated protein MAP65-1b
  misc_feature (1)..(382): Homolog of NCBI NO: 15240485 NR Description: putative protein; protein id: At5g55230.1
  misc_feature (1)..(382): Homolog of NCBI NO: 11558256 NR Description: microtubule-associated protein MAP65-1c
  misc_feature (1)..(382): Homolog of NCBI NO: 11558252 NR Description: microtubule-associated protein MAP65-1a

SEQ ID NO: 17420 - protein, 347 aa, Zea mays subsp. mays; identical to SEQ ID NO: 3958
  peptide (1)..(347): Ceres Seq. ID no. 12362637
  misc_feature (1)..(345): Pfam Name: Microtubule associated protein (MAP65/ASE1 family) Pfam Description: Microtubule associated protein (MAP65/ASE1
  misc_feature (1)..(345): Pfam Name: Microtubule associated protein (MAP65/ASE1 family) Pfam Description: Microtubule associated protein (MAP65/ASE1
  misc_feature (1)..(305): Homolog of NCBI NO: 15217774 NR Description: hypothetical protein; protein id: At1g27920.1
  misc_feature (1)..(299): Homolog of NCBI NO: 15242132 NR Description: putative protein; protein id: At5g51600.1
  misc_feature (1)..(347): Homolog of NCBI NO: 27357984 NR Description: Unknown protein [Oryza sativa (japonica
  misc_feature (1)..(199): Homolog of NCBI NO: 7485328 NR Description: hypothetical protein F10M23.100 - Arabidopsis
  misc_feature (1)..(338): Homolog of NCBI NO: 18416818 NR Description: putative protein
  misc_feature (1)..(305): Homolog of NCBI NO: 15217774 NR Description: hypothetical protein; protein id: At1g27920.1
  misc_feature (1)..(347): Homolog of NCBI NO: 27357984 NR Description: Unknown protein [Oryza sativa (japonica
  misc_feature (1)..(338): Homolog of NCBI NO: 18416818 NR Description: putative protein
  misc_feature (1)..(347): Homolog of NCBI NO: 11558252 NR Description: microtubule-associated protein MAP65-1a
  misc_feature (1)..(347): Homolog of NCBI NO: 11558256 NR Description: microtubule-associated protein MAP65-1c
  misc_feature (1)..(347): Homolog of NCBI NO: 15240485 NR Description: putative protein; protein id: At5g55230.1
  misc_feature (1)..(347): Homolog of NCBI NO: 11558254 NR Description: microtubule-associated protein MAP65-1b
  misc_feature (1)..(347): Homolog of NCBI NO: 28200790 NR Description: 65kD microtubule associated protein [Daucus
  misc_feature (1)..(199): Homolog of NCBI NO: 7485328 NR Description: hypothetical protein F10M23.100 - Arabidopsis
  misc_feature (1)..(299): Homolog of NCBI NO: 15242132 NR Description: putative protein; protein id: At5g51600.1
  misc_feature (1)..(347): Homolog of NCBI NO: 28200790 NR Description: 65kD microtubule associated protein [Daucus
  misc_feature (1)..(347): Homolog of NCBI NO: 11558254 NR Description: microtubule-associated protein MAP65-1b
  misc_feature (1)..(347): Homolog of NCBI NO: 15240485 NR Description: putative protein; protein id: At5g55230.1
  misc_feature (1)..(347): Homolog of NCBI NO: 11558256 NR Description: microtubule-associated protein MAP65-1c
  misc_feature (1)..(347): Homolog of NCBI NO: 11558252 NR Description: microtubule-associated protein MAP65-1a

SEQ ID NO: 17421 - DNA, 442 bp, Zea mays subsp. mays
  misc_feature (1)..(442): Ceres Seq. ID no. 13586300
  misc_feature: MA Experiment ID: 108523 Result: Up-regulated in Transcription
  misc_feature: MA Experiment 108523 PARAMETER Experiment Name: Zm_42deg_Heat_P Parameter: Age (day) Value: 8
  misc_feature: MA Experiment 108523 PARAMETER Experiment Name: Zm_42deg_Heat_P Parameter: Organism Value: Zea mays
  misc_feature: MA Experiment 108523 PARAMETER Experiment Name: Zm_42deg_Heat_P Parameter: Plant Line Value: 35A19
  misc_feature: MA Experiment 108523 PARAMETER Experiment Name: Zm_42deg_Heat_P Parameter: Temperature (deg C) Value: 42 vs. 22
  misc_feature: MA Experiment 108523 PARAMETER Experiment Name: Zm_42deg_Heat_P Parameter: Timepoint (hr) Value: 6
  misc_feature: MA Experiment 108523 PARAMETER Experiment Name: Zm_42deg_Heat_P Parameter: Tissue Value: Aerial
cataacaagagctctatctatgaagttaatgggagtcccatcacaaagcacatgggtttcttgattttcaactttagtgactacaattgcacggtggaatactacagatccccttttatagtccttcaaggccgtgcgccagcaggagcccctgagattgttaggtacagtattcgagtggattcaatggattggatgtctgaccgcggcaagtggaaggatgctgatgtattgatcttcaacactgggcattggtggaacaatgagaaaacaatcagagggggtgcctactttcaagtaggagatgaggtcaaaatgggcatgaatgttgcagatgcttacagaagatcgatacagacattgtccgattggcttcgcaaagaagttaacacgagcaagactcatgtcatctaccgcacatatgcccctgtgcattncagag

SEQ ID NO: 17422 - protein, 147 aa, Zea mays subsp. mays
  peptide (1)..(147): Ceres Seq. ID no. 13586301
  misc_feature (85)..(146): Pfam Name: Arabidopsis proteins of unknown function Pfam Description: Arabidopsis proteins of unknown function
  misc_feature (2)..(146): Homolog of NCBI NO: 15242021 NR Description: expressed protein [Arabidopsis thaliana]
  misc_feature (2)..(145): Homolog of NCBI NO: 34907406 NR Description: P0018C10.29 [Oryza sativa (japonica
  misc_feature (2)..(145): Homolog of NCBI NO: 15221991 NR Description: hypothetical protein [Arabidopsis thaliana]
  misc_feature (4)..(146): Homolog of NCBI NO: 23617116 NR Description: leaf senescence related protein-like
  misc_feature (2)..(146): Homolog of NCBI NO: 18415139 NR Description: expressed protein [Arabidopsis thaliana]
  misc_feature (2)..(146): Homolog of NCBI NO: 9759321 NR Description: gb|AAF00670.1~gene_id:MBL20.11~strong similarity
  misc_feature (2)..(146): Homolog of NCBI NO: 15229797 NR Description: expressed protein [Arabidopsis thaliana]
  misc_feature (2)..(146): Homolog of NCBI NO: 18397465 NR Description: expressed protein [Arabidopsis thaliana]
  misc_feature (2)..(146): Homolog of NCBI NO: 6862912 NR Description: unknown protein [Arabidopsis thaliana]
  misc_feature (2)..(146): Homolog of NCBI NO: 15239660 NR Description: hypothetical protein [Arabidopsis thaliana]
  misc_feature (146)..(146): Xaa is any aa, unknown or other
HNKSSIYEVNGSPITKHMGFLIFNFSDYNCTVEYYRSPFIVLQGRAPAGAPEIVRYSIRVDSMDWMSDRGKWKDADVLIFNTGHWWNNEKTIRGGAYFQVGDEVKMGMNVADAYRRSIQTLSDWLRKEVNTSKTHVIYRTYAPVHXR

SEQ ID NO: 17423 - protein, 130 aa, Zea mays subsp. mays
  peptide (1)..(130): Ceres Seq. ID no. 13586302
  misc_feature (68)..(129): Pfam Name: Arabidopsis proteins of unknown function Pfam Description: Arabidopsis proteins of unknown function
  misc_feature (1)..(129): Homolog of NCBI NO: 15242021 NR Description: expressed protein [Arabidopsis thaliana]
  misc_feature (1)..(128): Homolog of NCBI NO: 34907406 NR Description: P0018C10.29 [Oryza sativa (japonica
  misc_feature (1)..(128): Homolog of NCBI NO: 15221991 NR Description: hypothetical protein [Arabidopsis thaliana]
  misc_feature (1)..(129): Homolog of NCBI NO: 23617116 NR Description: leaf senescence related protein-like
  misc_feature (1)..(129): Homolog of NCBI NO: 18415139 NR Description: expressed protein [Arabidopsis thaliana]
  misc_feature (1)..(129): Homolog of NCBI NO: 9759321 NR Description: gb|AAF00670.1~gene_id:MBL20.11~strong similarity
  misc_feature (1)..(129): Homolog of NCBI NO: 15229797 NR Description: expressed protein [Arabidopsis thaliana]
  misc_feature (1)..(129): Homolog of NCBI NO: 18397465 NR Description: expressed protein [Arabidopsis thaliana]
  misc_feature (1)..(129): Homolog of NCBI NO: 6862912 NR Description: unknown protein [Arabidopsis thaliana]
  misc_feature (1)..(129): Homolog of NCBI NO: 15239660 NR Description: hypothetical protein [Arabidopsis thaliana]
  misc_feature (129)..(129): Xaa is any aa, unknown or other
MGFLIFNFSDYNCTVEYYRSPFIVLQGRAPAGAPEIVRYSIRVDSMDWMSDRGKWKDADVLIFNTGHWWNNEKTIRGGAYFQVGDEVKMGMNVADAYRRSIQTLSDWLRKEVNTSKTHVIYRTYAPVHXR

SEQ ID NO: 17424 - protein, 85 aa, Zea mays subsp. mays
  peptide (1)..(85): Ceres Seq. ID no. 13586303
  misc_feature (23)..(84): Pfam Name: Arabidopsis proteins of unknown function Pfam Description: Arabidopsis proteins of unknown function
  misc_feature (1)..(84): Homolog of NCBI NO: 15242021 NR Description: expressed protein [Arabidopsis thaliana]
  misc_feature (1)..(83): Homolog of NCBI NO: 34907406 NR Description: P0018C10.29 [Oryza sativa (japonica
  misc_feature (1)..(83): Homolog of NCBI NO: 15221991 NR Description: hypothetical protein [Arabidopsis thaliana]
  misc_feature (1)..(84): Homolog of NCBI NO: 23617116 NR Description: leaf senescence related protein-like
  misc_feature (1)..(84): Homolog of NCBI NO: 18415139 NR Description: expressed protein [Arabidopsis thaliana]
  misc_feature (1)..(84): Homolog of NCBI NO: 9759321 NR Description: gb|AAF00670.1~gene_id:MBL20.11~strong similarity
  misc_feature (1)..(84): Homolog of NCBI NO: 15229797 NR Description: expressed protein [Arabidopsis thaliana]
  misc_feature (1)..(84): Homolog of NCBI NO: 18397465 NR Description: expressed protein [Arabidopsis thaliana]
  misc_feature (1)..(84): Homolog of NCBI NO: 6862912 NR Description: unknown protein [Arabidopsis thaliana]
  misc_feature (1)..(84): Homolog of NCBI NO: 15239660 NR Description: hypothetical protein [Arabidopsis thaliana]
  misc_feature (84)..(84): Xaa is any aa, unknown or other
MDWMSDRGKWKDADVLIFNTGHWWNNEKTIRGGAYFQVGDEVKMGMNVADAYRRSIQTLSDWLRKEVNTSKTHVIYRTYAPVHXR

SEQ ID NO: 17425 - DNA, 1528 bp, Zea mays subsp. mays; identical to SEQ ID NO: 8571
  misc_feature (1)..(1528): Ceres Seq. ID no. 12408393
  misc_feature: MA Experiment ID: 108543 Result: Down-regulated in Transcription
  misc_feature: MA Experiment ID: 108689 Result: Up-regulated in Transcription
  misc_feature: MA Experiment 108689 PARAMETER Experiment Name: Zm_Drought_Roots_P Parameter: Age (day) Value: 9
  misc_feature: MA Experiment 108689 PARAMETER Experiment Name: Zm_Drought_Roots_P Parameter: Organism Value: Zea mays
  misc_feature: MA Experiment 108689 PARAMETER Experiment Name: Zm_Drought_Roots_P Parameter: Plant Line Value: 35A19
  misc_feature: MA Experiment 108689 PARAMETER Experiment Name: Zm_Drought_Roots_P Parameter: Timepoint (hr) Value: 24
  misc_feature: MA Experiment 108689 PARAMETER Experiment Name: Zm_Drought_Roots_P Parameter: Tissue Value: Roots
  misc_feature: MA Experiment 108689 PARAMETER Experiment Name: Zm_Drought_Roots_P Parameter: Treatment Value: Drought vs. No Drought

SEQ ID NO: 17426 - protein, 508 aa, Zea mays subsp. mays; identical to SEQ ID NO: 8572
  peptide (1)..(508): Ceres Seq. ID no. 12408394
  misc_feature (48)..(507): Homolog of NCBI NO: 34909602 NR Description: P0435B05.21 [Oryza sativa (japonica
  misc_feature (62)..(267): Homolog of NCBI NO: 18405962 NR Description: expressed protein; protein id: At2g42400.1, by cDNA: gi_13605699, supported by cDNA: gi_18700277 [Arabidopsis >gi|13605700|gb|AAK32843.1|AF361831_1 At2g42400/MHK10.12
  misc_feature (294)..(504): Homolog of NCBI NO: 18405962 NR Description: expressed protein; protein id: At2g42400.1, by cDNA: gi_13605699, supported by cDNA: gi_18700277 [Arabidopsis >gi|13605700|gb|AAK32843.1|AF361831_1 At2g42400/MHK10.12
  misc_feature (105)..(507): Homolog of NCBI NO: 15218694 NR Description: unknown protein; protein id: At1g28520.1
  misc_feature (62)..(504): Homolog of NCBI NO: 25370817 NR Description: hypothetical protein At2g42400 [imported] -
  misc_feature (386)..(507): Homolog of NCBI NO: 6691215 NR Description: F1K23.24 [Arabidopsis thaliana]
  misc_feature (47)..(217): Homolog of NCBI NO: 15218694 NR Description: unknown protein; protein id: At1g28520.1

SEQ ID NO: 17427 - protein, 471 aa, Zea mays subsp. mays; identical to SEQ ID NO: 8573
  peptide (1)..(471): Ceres Seq. ID no. 12408395
  misc_feature (11)..(470): Homolog of NCBI NO: 34909602 NR Description: P0435B05.21 [Oryza sativa (japonica
  misc_feature (25)..(230): Homolog of NCBI NO: 18405962 NR Description: expressed protein; protein id: At2g42400.1, by cDNA: gi_13605699, supported by cDNA: gi_18700277 [Arabidopsis >gi|13605700|gb|AAK32843.1|AF361831_1 At2g42400/MHK10.12
  misc_feature (257)..(467): Homolog of NCBI NO: 18405962 NR Description: expressed protein; protein id: At2g42400.1, by cDNA: gi_13605699, supported by cDNA: gi_18700277 [Arabidopsis >gi|13605700|gb|AAK32843.1|AF361831_1 At2g42400/MHK10.12
  misc_feature (68)..(470): Homolog of NCBI NO: 15218694 NR Description: unknown protein; protein id: At1g28520.1
  misc_feature (25)..(467): Homolog of NCBI NO: 25370817 NR Description: hypothetical protein At2g42400 [imported] -
  misc_feature (349)..(470): Homolog of NCBI NO: 6691215 NR Description: F1K23.24 [Arabidopsis thaliana]
  misc_feature (10)..(180): Homolog of NCBI NO: 15218694 NR Description: unknown protein; protein id: At1g28520.1

SEQ ID NO: 17428 - protein, 469 aa, Zea mays subsp. mays; identical to SEQ ID NO: 8574
  peptide (1)..(469): Ceres Seq. ID no. 12408396
  misc_feature (9)..(468): Homolog of NCBI NO: 34909602 NR Description: P0435B05.21 [Oryza sativa (japonica
  misc_feature (23)..(228): Homolog of NCBI NO: 18405962 NR Description: expressed protein; protein id: At2g42400.1, by cDNA: gi_13605699, supported by cDNA: gi_18700277 [Arabidopsis >gi|13605700|gb|AAK32843.1|AF361831_1 At2g42400/MHK10.12
  misc_feature (255)..(465): Homolog of NCBI NO: 18405962 NR Description: expressed protein; protein id: At2g42400.1, by cDNA: gi_13605699, supported by cDNA: gi_18700277 [Arabidopsis >gi|13605700|gb|AAK32843.1|AF361831_1 At2g42400/MHK10.12
  misc_feature (66)..(468): Homolog of NCBI NO: 15218694 NR Description: unknown protein; protein id: At1g28520.1
  misc_feature (23)..(465): Homolog of NCBI NO: 25370817 NR Description: hypothetical protein At2g42400 [imported] -
  misc_feature (347)..(468): Homolog of NCBI NO: 6691215 NR Description: F1K23.24 [Arabidopsis thaliana]
  misc_feature (8)..(178): Homolog of NCBI NO: 15218694 NR Description: unknown protein; protein id: At1g28520.1

SEQ ID NO: 17429 - DNA, 457 bp, Zea mays subsp. mays
  misc_feature (1)..(457): Ceres Seq. ID no. 1674133
  misc_feature: MA Experiment ID: 108522 Result: Up-regulated in Transcription
  misc_feature: MA Experiment 108522 PARAMETER Experiment Name: Zm_42deg_Heat_P Parameter: Age (day) Value: 8
  misc_feature: MA Experiment 108522 PARAMETER Experiment Name: Zm_42deg_Heat_P Parameter: Organism Value: Zea mays
  misc_feature: MA Experiment 108522 PARAMETER Experiment Name: Zm_42deg_Heat_P Parameter: Plant Line Value: 35A19
  misc_feature: MA Experiment 108522 PARAMETER Experiment Name: Zm_42deg_Heat_P Parameter: Temperature (deg C) Value: 42 vs. 22
  misc_feature: MA Experiment 108522 PARAMETER Experiment Name: Zm_42deg_Heat_P Parameter: Timepoint (hr) Value: 1
  misc_feature: MA Experiment 108522 PARAMETER Experiment Name: Zm_42deg_Heat_P Parameter: Tissue Value: Aerial
gtggtgttcatttgttctcactaaaattatgtgtgcagctgtagcttcgtcgcctgtatggacatgtttatttctgaaatcaagtggatattcaaatgcatcttctggcatgggagttgctcctaacattagggagacattcgttgagcttcaaatgaagaaggcattccgatatgttatcttcaaaatcgaagagaagcaaaagcaggtggttgtggagaagacaggggctactactgaaagctatgatgattttttggcctctctcccagagaatgactgccgatatgcgctgtatgattttgattttgttactggggagaatgtgcagaaaagcaagattttcttcattgcctggtccccatcgacatcccgcatacgtgctaagatgctgtactccacgtcgaaggaccgcatcaagtacgagcttgacgggttccactacgaaatccaggcg

SEQ ID NO: 17430 - protein, 152 aa, Zea mays subsp. mays
  peptide (1)..(152): Ceres Seq. ID no. 1674134
  misc_feature (41)..(151): Pfam Name: Cofilin/tropomyosin-type actin-binding protein Pfam Description: Cofilin/tropomyosin-type actin-binding protein
  misc_feature (31)..(151): Homolog of NCBI NO: 17366765 NR Description: Actin-depolymerizing factor 2 (ADF 2)
  misc_feature (31)..(151): Homolog of NCBI NO: 17366768 NR Description: Actin-depolymerizing factor 1 (ADF 1)
  misc_feature (37)..(151): Homolog of NCBI NO: 25295741 NR Description: actin depolymerizing factor 6 [imported] -
  misc_feature (35)..(151): Homolog of NCBI NO: 7330254 NR Description: actin depolymerizing factor [Elaeis guineensis]
  misc_feature (31)..(151): Homolog of NCBI NO: 24745620 NR Description: actin depolymerizing factor 6 [Solanum tuberosum]
  misc_feature (32)..(151): Homolog of NCBI NO: 21554405 NR Description: Actin-depolymerizing factor ADF-6 [Arabidopsis
  misc_feature (32)..(151): Homolog of NCBI NO: 18402587 NR Description: actin depolymerizing factor 6
  misc_feature (32)..(151): Homolog of NCBI NO: 32363121 NR Description: Actin-depolymerizing factor (ADF)
  misc_feature (32)..(151): Homolog of NCBI NO: 4566614 NR Description: actin depolymerizing factor [Populus x canescens]
  misc_feature (24)..(151): Homolog of NCBI NO: 34897072 NR Description: putative actin-depolymerizing factor
WCSFVLTKIMCAAVASSPVWTCLFLKSSGYSNASSGMGVAPNIRETFVELQMKKAFRYVIFKIEEKQKQVVVEKTGATTESYDDFLASLPENDCRYALYDFDFVTGENVQKSKIFFIAWSPSTSRIRAKMLYSTSKDRIKYELDGFHYEIQA

SEQ ID NO: 17431 - protein, 143 aa, Zea mays subsp. mays
  peptide (1)..(143): Ceres Seq. ID no. 1674135
  misc_feature (32)..(142): Pfam Name: Cofilin/tropomyosin-type actin-binding protein Pfam Description: Cofilin/tropomyosin-type actin-binding protein
  misc_feature (22)..(142): Homolog of NCBI NO: 17366765 NR Description: Actin-depolymerizing factor 2 (ADF 2)
  misc_feature (22)..(142): Homolog of NCBI NO: 17366768 NR Description: Actin-depolymerizing factor 1 (ADF 1)
  misc_feature (28)..(142): Homolog of NCBI NO: 25295741 NR Description: actin depolymerizing factor 6 [imported] -
  misc_feature (26)..(142): Homolog of NCBI NO: 7330254 NR Description: actin depolymerizing factor [Elaeis guineensis]
  misc_feature (22)..(142): Homolog of NCBI NO: 24745620 NR Description: actin depolymerizing factor 6 [Solanum tuberosum]
  misc_feature (23)..(142): Homolog of NCBI NO: 21554405 NR Description: Actin-depolymerizing factor ADF-6 [Arabidopsis
  misc_feature (23)..(142): Homolog of NCBI NO: 18402587 NR Description: actin depolymerizing factor 6
  misc_feature (23)..(142): Homolog of NCBI NO: 32363121 NR Description: Actin-depolymerizing factor (ADF)
  misc_feature (23)..(142): Homolog of NCBI NO: 4566614 NR Description: actin depolymerizing factor [Populus x canescens]
  misc_feature (15)..(142): Homolog of NCBI NO: 34897072 NR Description: putative actin-depolymerizing factor
MCAAVASSPVWTCLFLKSSGYSNASSGMGVAPNIRETFVELQMKKAFRYVIFKIEEKQKQVVVEKTGATTESYDDFLASLPENDCRYALYDFDFVTGENVQKSKIFFIAWSPSTSRIRAKMLYSTSKDRIKYELDGFHYEIQA

SEQ ID NO: 17432 - protein, 116 aa, Zea mays subsp. mays
  peptide (1)..(116): Ceres Seq. ID no. 1674136
  misc_feature (5)..(115): Pfam Name: Cofilin/tropomyosin-type actin-binding protein Pfam Description: Cofilin/tropomyosin-type actin-binding protein
  misc_feature (1)..(115): Homolog of NCBI NO: 17366765 NR Description: Actin-depolymerizing factor 2 (ADF 2)
  misc_feature (1)..(115): Homolog of NCBI NO: 17366768 NR Description: Actin-depolymerizing factor 1 (ADF 1)
  misc_feature (1)..(115): Homolog of NCBI NO: 25295741 NR Description: actin depolymerizing factor 6 [imported] -
  misc_feature (1)..(115): Homolog of NCBI NO: 7330254 NR Description: actin depolymerizing factor [Elaeis guineensis]
  misc_feature (1)..(115): Homolog of NCBI NO: 24745620 NR Description: actin depolymerizing factor 6 [Solanum tuberosum]
  misc_feature (1)..(115): Homolog of NCBI NO: 21554405 NR Description: Actin-depolymerizing factor ADF-6 [Arabidopsis
  misc_feature (1)..(115): Homolog of NCBI NO: 18402587 NR Description: actin depolymerizing factor 6
  misc_feature (1)..(115): Homolog of NCBI NO: 32363121 NR Description: Actin-depolymerizing factor (ADF)
  misc_feature (1)..(115): Homolog of NCBI NO: 4566614 NR Description: actin depolymerizing factor [Populus x canescens]
  misc_feature (1)..(115): Homolog of NCBI NO: 34897072 NR Description: putative actin-depolymerizing factor
MGVAPNIRETFVELQMKKAFRYVIFKIEEKQKQVVVEKTGATTESYDDFLASLPENDCRYALYDFDFVTGENVQKSKIFFIAWSPSTSRIRAKMLYSTSKDRIKYELDGFHYEIQA

SEQ ID NO: 17433 - DNA, 1480 bp, Zea mays subsp. mays
  misc_feature (1)..(1480): Ceres Seq. ID no. 12359859
  misc_feature: MA Experiment ID: 108504 Result: Down-regulated in Transcription
  misc_feature: MA Experiment 108504 PARAMETER Experiment Name: Zm_Drought_P Parameter: Age (day) Value: 8
  misc_feature: MA Experiment 108504 PARAMETER Experiment Name: Zm_Drought_P Parameter: Organism Value: Zea mays
  misc_feature: MA Experiment 108504 PARAMETER Experiment Name: Zm_Drought_P Parameter: Plant Line Value: 35A19
  misc_feature: MA Experiment 108504 PARAMETER Experiment Name: Zm_Drought_P Parameter: Timepoint (hr) Value: 12
  misc_feature: MA Experiment 108504 PARAMETER Experiment Name: Zm_Drought_P Parameter: Tissue Value: Aerial
  misc_feature: MA Experiment 108504 PARAMETER Experiment Name: Zm_Drought_P Parameter: Treatment Value: Drought vs. No Drought
  misc_feature: MA Experiment ID: 108522 Result: Down-regulated in Transcription
  misc_feature: MA Experiment 108522 PARAMETER Experiment Name: Zm_42deg_Heat_P Parameter: Age (day) Value: 8
  misc_feature: MA Experiment 108522 PARAMETER Experiment Name: Zm_42deg_Heat_P Parameter: Organism Value: Zea mays
  misc_feature: MA Experiment 108522 PARAMETER Experiment Name: Zm_42deg_Heat_P Parameter: Plant Line Value: 35A19
  misc_feature: MA Experiment 108522 PARAMETER Experiment Name: Zm_42deg_Heat_P Parameter: Temperature (deg C) Value: 42 vs. 22
  misc_feature: MA Experiment 108522 PARAMETER Experiment Name: Zm_42deg_Heat_P Parameter: Timepoint (hr) Value: 1
  misc_feature: MA Experiment 108522 PARAMETER Experiment Name: Zm_42deg_Heat_P Parameter: Tissue Value: Aerial
  misc_feature: MA Experiment ID: 108523 Result: Down-regulated in Transcription
  misc_feature: MA Experiment 108523 PARAMETER Experiment Name: Zm_42deg_Heat_P Parameter: Age (day) Value: 8
  misc_feature: MA Experiment 108523 PARAMETER Experiment Name: Zm_42deg_Heat_P Parameter: Organism Value: Zea mays
  misc_feature: MA Experiment 108523 PARAMETER Experiment Name: Zm_42deg_Heat_P Parameter: Plant Line Value: 35A19
  misc_feature: MA Experiment 108523 PARAMETER Experiment Name: Zm_42deg_Heat_P Parameter: Temperature (deg C) Value: 42 vs. 22
  misc_feature: MA Experiment 108523 PARAMETER Experiment Name: Zm_42deg_Heat_P Parameter: Timepoint (hr) Value: 6
  misc_feature: MA Experiment 108523 PARAMETER Experiment Name: Zm_42deg_Heat_P Parameter: Tissue Value: Aerial
  misc_feature: MA Experiment ID: 108526 Result: Down-regulated in Transcription
  misc_feature: MA Experiment 108526 PARAMETER Experiment Name: Zm_5mM_NO_P Parameter: Age (day) Value: 8
  misc_feature: MA Experiment 108526 PARAMETER Experiment Name: Zm_5mM_NO_P Parameter: Organism Value: Zea mays
  misc_feature: MA Experiment 108526 PARAMETER Experiment Name: Zm_5mM_NO_P Parameter: Plant Line Value: 35A19
  misc_feature: MA Experiment 108526 PARAMETER Experiment Name: Zm_5mM_NO_P Parameter: Timepoint (hr) Value: 1
  misc_feature: MA Experiment 108526 PARAMETER Experiment Name: Zm_5mM_NO_P Parameter: Tissue Value: Aerial
  misc_feature: MA Experiment 108526 PARAMETER Experiment Name: Zm_5mM_NO_P Parameter: Treatment Value: 5mM NO vs. No Treatment
  misc_feature: MA Experiment ID: 108527 Result: Down-regulated in Transcription
  misc_feature: MA Experiment 108527 PARAMETER Experiment Name: Zm_5mM_NO_P Parameter: Age (day) Value: 8
  misc_feature: MA Experiment 108527 PARAMETER Experiment Name: Zm_5mM_NO_P Parameter: Organism Value: Zea mays
  misc_feature: MA Experiment 108527 PARAMETER Experiment Name: Zm_5mM_NO_P Parameter: Plant Line Value: 35A19
  misc_feature: MA Experiment 108527 PARAMETER Experiment Name: Zm_5mM_NO_P Parameter: Timepoint (hr) Value: 6
  misc_feature: MA Experiment 108527 PARAMETER Experiment Name: Zm_5mM_NO_P Parameter: Tissue Value: Aerial
  misc_feature: MA Experiment 108527 PARAMETER Experiment Name: Zm_5mM_NO_P Parameter: Treatment Value: 5mM NO vs. No Treatment
  misc_feature: MA Experiment ID: 108528 Result: Up-regulated in Transcription
  misc_feature: MA Experiment 108528 PARAMETER Experiment Name: Zm_Imbibed_Seeds_P Parameter: Age (day) Value: 5 vs. 2
  misc_feature: MA Experiment 108528 PARAMETER Experiment Name: Zm_Imbibed_Seeds_P Parameter: Organism Value: Zea mays
  misc_feature: MA Experiment 108528 PARAMETER Experiment Name: Zm_Imbibed_Seeds_P Parameter: Plant Line Value: 35A19
  misc_feature: MA Experiment 108528 PARAMETER Experiment Name: Zm_Imbibed_Seeds_P Parameter: Tissue Value: Aerial vs. Embryo
  misc_feature: MA Experiment ID: 108530 Result: Up-regulated in Transcription
  misc_feature: MA Experiment 108530 PARAMETER Experiment Name: Zm_Imbibed_Seeds_P Parameter: Age (day) Value: 6 vs. 2
  misc_feature: MA Experiment 108530 PARAMETER Experiment Name: Zm_Imbibed_Seeds_P Parameter: Organism Value: Zea mays
  misc_feature: MA Experiment 108530 PARAMETER Experiment Name: Zm_Imbibed_Seeds_P Parameter: Plant Line Value: 35A19
  misc_feature: MA Experiment 108530 PARAMETER Experiment Name: Zm_Imbibed_Seeds_P Parameter: Tissue Value: Aerial vs. Embryo
  misc_feature: MA Experiment ID: 108535 Result: Down-regulated in Transcription
  misc_feature: MA Experiment 108535 PARAMETER Experiment Name: Zm_Meristem_P Parameter: Age (day) Value: 8
  misc_feature: MA Experiment 108535 PARAMETER Experiment Name: Zm_Meristem_P Parameter: Organism Value: Zea mays
  misc_feature: MA Experiment 108535 PARAMETER Experiment Name: Zm_Meristem_P Parameter: Plant Line Value: 35A19
  misc_feature: MA Experiment 108535 PARAMETER Experiment Name: Zm_Meristem_P Parameter: Tissue Value: Root Meristem vs. Above Root Meristem
  misc_feature: MA Experiment ID: 108540 Result: Down-regulated in Transcription
  misc_feature: MA Experiment 108540 PARAMETER Experiment Name: Zm_20percent_PEG_P Parameter: Age (day) Value: 8
  misc_feature: MA Experiment 108540 PARAMETER Experiment Name: Zm_20percent_PEG_P Parameter: Organism Value: Zea mays
  misc_feature: MA Experiment 108540 PARAMETER Experiment Name: Zm_20percent_PEG_P Parameter: Plant Line Value: 35A19
  misc_feature: MA Experiment 108540 PARAMETER Experiment Name: Zm_20percent_PEG_P Parameter: Timepoint (hr) Value: 6
  misc_feature: MA Experiment 108540 PARAMETER Experiment Name: Zm_20percent_PEG_P Parameter: Tissue Value: Aerial
  misc_feature: MA Experiment 108540 PARAMETER Experiment Name: Zm_20percent_PEG_P Parameter: Treatment Value: 20percent PEG vs. No Treatment
  misc_feature: MA Experiment ID: 108543 Result: Down-regulated in Transcription
  misc_feature: MA Experiment ID: 108544 Result: Up-regulated in Transcription
  misc_feature: MA Experiment ID: 108547 Result: Up-regulated in Transcription
  misc_feature: MA Experiment 108547 PARAMETER Experiment Name: Zm_Imbibed_Seeds_P Parameter: Age (day) Value: 4 vs. 2
  misc_feature: MA Experiment 108547 PARAMETER Experiment Name: Zm_Imbibed_Seeds_P Parameter: Organism Value: Zea mays
  misc_feature: MA Experiment 108547 PARAMETER Experiment Name: Zm_Imbibed_Seeds_P Parameter: Plant Line Value: 35A19
  misc_feature: MA Experiment 108547 PARAMETER Experiment Name: Zm_Imbibed_Seeds_P Parameter: Tissue Value: Aerial vs. Embryo
  misc_feature: MA Experiment ID: 108556 Result: Down-regulated in Transcription
  misc_feature: MA Experiment 108556 PARAMETER Experiment Name: Zm_Drought_P Parameter: Age (day) Value: 9
  misc_feature: MA Experiment 108556 PARAMETER Experiment Name: Zm_Drought_P Parameter: Organism Value: Zea mays
  misc_feature: MA Experiment 108556 PARAMETER Experiment Name: Zm_Drought_P Parameter: Plant Line Value: 35A19
  misc_feature: MA Experiment 108556 PARAMETER Experiment Name: Zm_Drought_P Parameter: Timepoint (hr) Value: 24
  misc_feature: MA Experiment 108556 PARAMETER Experiment Name: Zm_Drought_P Parameter: Tissue Value: Aerial
  misc_feature: MA Experiment 108556 PARAMETER Experiment Name: Zm_Drought_P Parameter: Treatment Value: Drought vs. No Drought
  misc_feature: MA Experiment ID: 108559 Result: Down-regulated in Transcription
  misc_feature: MA Experiment 108559 PARAMETER Experiment Name: Zm_5mM_NO_P Parameter: Age (day) Value: 8
  misc_feature: MA Experiment 108559 PARAMETER Experiment Name: Zm_5mM_NO_P Parameter: Organism Value: Zea mays
  misc_feature: MA Experiment 108559 PARAMETER Experiment Name: Zm_5mM_NO_P Parameter: Plant Line Value: 35A19
  misc_feature: MA Experiment 108559 PARAMETER Experiment Name: Zm_5mM_NO_P Parameter: Timepoint (hr) Value: 12
  misc_feature: MA Experiment 108559 PARAMETER Experiment Name: Zm_5mM_NO_P Parameter: Tissue Value: Aerial
  misc_feature: MA Experiment 108559 PARAMETER Experiment Name: Zm_5mM_NO_P Parameter: Treatment Value: 5mM NO vs. No Treatment
  misc_feature: MA Experiment ID: 108687 Result: Down-regulated in Transcription
  misc_feature: MA Experiment 108687 PARAMETER Experiment Name: Zm_Embryos-Flowers__P Parameter: Tissue Value: Embryo vs. Aerial+
  misc_feature: MA Experiment ID: 108689 Result: Down-regulated in Transcription
  misc_feature: MA Experiment 108689 PARAMETER Experiment Name: Zm_Drought_Roots_P Parameter: Age (day) Value: 9
  misc_feature: MA Experiment 108689 PARAMETER Experiment Name: Zm_Drought_Roots_P Parameter: Organism Value: Zea mays
  misc_feature: MA Experiment 108689 PARAMETER Experiment Name: Zm_Drought_Roots_P Parameter: Plant Line Value: 35A19
  misc_feature: MA Experiment 108689 PARAMETER Experiment Name: Zm_Drought_Roots_P Parameter: Timepoint (hr) Value: 24
  misc_feature: MA Experiment 108689 PARAMETER Experiment Name: Zm_Drought_Roots_P Parameter: Tissue Value: Roots
  misc_feature: MA Experiment 108689 PARAMETER Experiment Name: Zm_Drought_Roots_P Parameter: Treatment Value: Drought vs. No Drought
  misc_feature: MA Experiment ID: 20000477 Result: Down-regulated in Transcription
  misc_feature: MA Experiment 20000477 PARAMETER Experiment Name: Zm_5mM_SA_P Parameter: Age (day) Value: 10
  misc_feature: MA Experiment 20000477 PARAMETER Experiment Name: Zm_5mM_SA_P Parameter: Organism Value: Zea mays
  misc_feature: MA Experiment 20000477 PARAMETER Experiment Name: Zm_5mM_SA_P Parameter: Plant Line Value: 35A19
  misc_feature: MA Experiment 20000477 PARAMETER Experiment Name: Zm_5mM_SA_P Parameter: Timepoint (hr) Value: 48
  misc_feature: MA Experiment 20000477 PARAMETER Experiment Name: Zm_5mM_SA_P Parameter: Tissue Value: Aerial
  misc_feature: MA Experiment 20000477 PARAMETER Experiment Name: Zm_5mM_SA_P Parameter: Treatment Value: 5mM SA vs. No Treatment
  misc_feature: MA Experiment ID: 20000478 Result: Down-regulated in Transcription
  misc_feature: MA Experiment 20000478 PARAMETER Experiment Name: Zm_5mM_SA_P Parameter: Age (day) Value: 11
  misc_feature: MA Experiment 20000478 PARAMETER Experiment Name: Zm_5mM_SA_P Parameter: Organism Value: Zea mays
  misc_feature: MA Experiment 20000478 PARAMETER Experiment Name: Zm_5mM_SA_P Parameter: Plant Line Value: 35A19
  misc_feature: MA Experiment 20000478 PARAMETER Experiment Name: Zm_5mM_SA_P Parameter: Timepoint (hr) Value: 72
  misc_feature: MA Experiment 20000478 PARAMETER Experiment Name: Zm_5mM_SA_P Parameter: Tissue Value: Aerial
  misc_feature: MA Experiment 20000478 PARAMETER Experiment Name: Zm_5mM_SA_P Parameter: Treatment Value: 5mM SA vs. No Treatment
  misc_feature: MA Experiment ID: 20000479 Result: Down-regulated in Transcription
  misc_feature: MA Experiment 20000479 PARAMETER Experiment Name: Zm_Drought_P Parameter: Age (day) Value: 10
  misc_feature: MA Experiment 20000479 PARAMETER Experiment Name: Zm_Drought_P Parameter: Organism Value: Zea mays
  misc_feature: MA Experiment 20000479 PARAMETER Experiment Name: Zm_Drought_P Parameter: Plant Line Value: 35A19
  misc_feature: MA Experiment 20000479 PARAMETER Experiment Name: Zm_Drought_P Parameter: Timepoint (hr) Value: 48
  misc_feature: MA Experiment 20000479 PARAMETER Experiment Name: Zm_Drought_P Parameter: Tissue Value: Aerial
  misc_feature: MA Experiment 20000479 PARAMETER Experiment Name: Zm_Drought_P Parameter: Treatment Value: Drought vs. No Drought
  misc_feature: MA Experiment ID: 20000480 Result: Down-regulated in Transcription
  misc_feature: MA Experiment 20000480 PARAMETER Experiment Name: Zm_Drought_P Parameter: Age (day) Value: 11
  misc_feature: MA Experiment 20000480 PARAMETER Experiment Name: Zm_Drought_P Parameter: Organism Value: Zea mays
  misc_feature: MA Experiment 20000480 PARAMETER Experiment Name: Zm_Drought_P Parameter: Plant Line Value: 35A19
  misc_feature: MA Experiment 20000480 PARAMETER Experiment Name: Zm_Drought_P Parameter: Timepoint (hr) Value: 72
  misc_feature: MA Experiment 20000480 PARAMETER Experiment Name: Zm_Drought_P Parameter: Tissue Value: Aerial
  misc_feature: MA Experiment 20000480 PARAMETER Experiment Name: Zm_Drought_P Parameter: Treatment Value: Drought vs. No Drought
  misc_feature: MA Experiment ID: 20000487 Result: Down-regulated in Transcription
  misc_feature: MA Experiment 20000487 PARAMETER Experiment Name: Zm_50mM_NH4NO3_L_to_H_P Parameter: Organism Value: Zea mays
  misc_feature: MA Experiment 20000487 PARAMETER Experiment Name: Zm_50mM_NH4NO3_L_to_H_P Parameter: Timepoint (hr) Value: 4
  misc_feature: MA Experiment 20000487 PARAMETER Experiment Name: Zm_50mM_NH4NO3_L_to_H_P Parameter: Tissue Value: Leaves
  misc_feature: MA Experiment 20000487 PARAMETER Experiment Name: Zm_50mM_NH4NO3_L_to_H_P Parameter: Treatment Value: 50mM NH4NO3 vs. 100mM Mannitol
  misc_feature: MA Experiment ID: 20000488 Result: Down-regulated in Transcription
  misc_feature: MA Experiment 20000488 PARAMETER Experiment Name: Zm_50mM_NH4NO3_L_to_H_P Parameter: Organism Value: Zea mays
  misc_feature: MA Experiment 20000488 PARAMETER Experiment Name: Zm_50mM_NH4NO3_L_to_H_P Parameter: Timepoint (hr) Value: 8
  misc_feature: MA Experiment 20000488 PARAMETER Experiment Name: Zm_50mM_NH4NO3_L_to_H_P Parameter: Tissue Value: Leaves
  misc_feature: MA Experiment 20000488 PARAMETER Experiment Name: Zm_50mM_NH4NO3_L_to_H_P Parameter: Treatment Value: 50mM NH4NO3 vs. 100mM Mannitol
  misc_feature: MA Experiment ID: 20000492 Result: Down-regulated in Transcription
  misc_feature: MA Experiment 20000492 PARAMETER Experiment Name: Zm_Hybrid_Seed_Dev_P Parameter: DAP Value: 12
  misc_feature: MA Experiment 20000492 PARAMETER Experiment Name: Zm_Hybrid_Seed_Dev_P Parameter: Organism Value: Zea mays
  misc_feature: MA Experiment 20000492 PARAMETER Experiment Name: Zm_Hybrid_Seed_Dev_P Parameter: Plant Line Value: 35A19
  misc_feature: MA Experiment 20000492 PARAMETER Experiment Name: Zm_Hybrid_Seed_Dev_P Parameter: Tissue Value: Fert Kernel vs. Unfert Floret
  misc_feature: MA Experiment ID: 20000535 Result: Down-regulated in Transcription
  misc_feature: MA Experiment 20000535 PARAMETER Experiment Name: Zm_Hybrid_Seed_Dev_P Parameter: DAP Value: 30 vs. 12
  misc_feature: MA Experiment 20000535 PARAMETER Experiment Name: Zm_Hybrid_Seed_Dev_P Parameter: Organism Value: Zea mays
  misc_feature: MA Experiment 20000535 PARAMETER Experiment Name: Zm_Hybrid_Seed_Dev_P Parameter: Plant Line Value: 35A19
  misc_feature: MA Experiment 20000535 PARAMETER Experiment Name: Zm_Hybrid_Seed_Dev_P Parameter: Tissue Value: Embryo vs. Unfert Floret
cttgtggacttgtggccttgtggggcaattggctagatgggaaagaaggtggctgttgtggtgggagggagtgttgctgggctagcgtgcgctcacgccgtggctggcgcgggatgggaggtggttgtgctggagaaggcggcagcgccggcggcggggagcggcacgggcgccggactgggcctcgacgcgcagtctatggagattctctcgcgctggatcccggggtggggaatcgacgcggtcacgctgccgctcgccgtcgatctgaacgtagccacggacagcgcgacgaaggcggtgaggacgctggcgagggacgaagacttcaaattccgggcggcccactggggcgacctgcaccggcggctgcacgaggagctgccgcccgcggtgagcgtgctgtgggggcaccagttcctgtcgttcgaggcgccggacgacacacgcggggtcgtcgcgacggcccgcgtgctgcggacgggagggacggttgaggccacgggggacctgctcatcgccgcggacggctccacgtcgtctgtccgtcgcagcttcttgccagacctcaagctcaggtattccgggtactgcgcgtggcggggcgtgtttgatttcagcgggaaggagagctctgacaccatgaccagcatccgaagagcctacccggagctcggcaactgcctctacttcgaccttgcttacaagacccacgccgtgctctacgagctgcccaggagcaggctcaactggctctggtacatcaacggcccagaaccggagctcgcggggaactcggtgaccatggaggcgactgacgccatggtgggacgaatgcggaacgaggcggagcgcgtctggtgccccgagctggcgcgtctggtcagggagaccgcggcgccgttcgtaaacgtgatctacgacgcagacccgctgccgcggttgtcgtggacgggcggccgcgtggtactggtcggcgacgcggcgcacccgacgactccgcacgggctgcggagcaccaacatgtcggtcatggacgcgtgcacgctcgggcagtgcttggcgaactggaactcagagccgacgcctgcgcgcgcgctggcagagtacgaggcggtgcgcctgcccgttgtggcggaacaagtgctccacgcccgccagctcgggaggctcaagcagggcctgccagtggacggtgaggcggaggacgggtttgacgtgacgacggcaaaggccgaggtgctgcagctacggcagaggacaatgccgttcttcgatggcgcacctgccgcagttggcggtgattttcctctcgttggcagtacaagatgaatcgagacagcattacctgtatgactctgacatttaatcatggtttggcatagcttcaccaaatacaattaaaaaatatatagtttagaattacctgtatgactatgaaatttaatgatggcttggcatagcttcaccaaatacaatt

SEQ ID NO: 17434 - protein, 431 aa, Zea mays subsp. mays
  peptide (1)..(431): Ceres Seq. ID no. 12359860
  misc_feature (157)..(374): Pfam Name: Monooxygenase Pfam Description: Monooxygenase
  misc_feature (7)..(191): Homolog of NCBI NO: 33601754 NR Description: putative monooxygenase [Bordetella
  misc_feature (6)..(394): Homolog of NCBI NO: 27381191 NR Description: bll6080 [Bradyrhizobium japonicum]
  misc_feature (3)..(131): Homolog of NCBI NO: 22986825 NR Description: hypothetical protein [Burkholderia fungorum]
  misc_feature (105)..(363): Homolog of NCBI NO: 22986825 NR Description: hypothetical protein [Burkholderia fungorum]
  misc_feature (6)..(53): Homolog of NCBI NO: 5916090 NR Description: hypothetical protein [Ralstonia eutropha]
  misc_feature (154)..(383): Homolog of NCBI NO: 5916090 NR Description: hypothetical protein [Ralstonia eutropha]
  misc_feature (43)..(390): Homolog of NCBI NO: 33601729 NR Description: putative monooxygenase [Bordetella
  misc_feature (6)..(359): Homolog of NCBI NO: 17549132 NR Description: PUTATIVE SALICYLATE HYDROXYLASE OXIDOREDUCTASE
  misc_feature (2)..(377): Homolog of NCBI NO: 34766436 NR Description: FscO [Streptomyces sp. FR-008]
  misc_feature (1)..(417): Homolog of NCBI NO: 15239022 NR Description: 2,6-dihydroxypyridine 3-hydroxylase (DHPH)-related
MGKKVAVVVGGSVAGLACAHAVAGAGWEVVVLEKAAAPAAGSGTGAGLGLDAQSMEILSRWIPGWGIDAVTLPLAVDLNVATDSATKAVRTLARDEDFKFRAAHWGDLHRRLHEELPPAVSVLWGHQFLSFEAPDDTRGVVATARVLRTGGTVEATGDLLIAADGSTSSVRRSFLPDLKLRYSGYCAWRGVFDFSGKESSDTMTSIRRAYPELGNCLYFDLAYKTHAVLYELPRSRLNWLWYINGPEPELAGNSVTMEATDAMVGRMRNEAERVWCPELARLVRETAAPFVNVIYDADPLPRLSWTGGRVVLVGDAAHPTTPHGLRSTNMSVMDACTLGQCLANWNSEPTPARALAEYEAVRLPVVAEQVLHARQLGRLKQGLPVDGEAEDGFDVTTAKAEVLQLRQRTMPFFDGAPAAVGGDFPLVGSTR

SEQ ID NO: 17435 - protein, 377 aa, Zea mays subsp. mays
  peptide (1)..(377): Ceres Seq. ID no. 12359861
  misc_feature (103)..(320): Pfam Name: Monooxygenase Pfam Description: Monooxygenase
  misc_feature (172)..(316): Homolog of NCBI NO: 33601754 NR Description: putative monooxygenase [Bordetella
  misc_feature (1)..(137): Homolog of NCBI NO: 33601754 NR Description: putative monooxygenase [Bordetella
  misc_feature (1)..(340): Homolog of NCBI NO: 27381191 NR Description: bll6080 [Bradyrhizobium japonicum]
  misc_feature (1)..(77): Homolog of NCBI NO: 22986825 NR Description: hypothetical protein [Burkholderia fungorum]
  misc_feature (51)..(309): Homolog of NCBI NO: 22986825 NR Description: hypothetical protein [Burkholderia fungorum]
  misc_feature (100)..(329): Homolog of NCBI NO: 5916090 NR Description: hypothetical protein [Ralstonia eutropha]
  misc_feature (1)..(336): Homolog of NCBI NO: 33601729 NR Description: putative monooxygenase [Bordetella
  misc_feature (1)..(305): Homolog of NCBI NO: 17549132 NR Description: PUTATIVE SALICYLATE HYDROXYLASE OXIDOREDUCTASE
  misc_feature (1)..(323): Homolog of NCBI NO: 34766436 NR Description: FscO [Streptomyces sp. FR-008]
  misc_feature (1)..(363): Homolog of NCBI NO: 15239022 NR Description: 2,6-dihydroxypyridine 3-hydroxylase (DHPH)-related
MEILSRWIPGWGIDAVTLPLAVDLNVATDSATKAVRTLARDEDFKFRAAHWGDLHRRLHEELPPAVSVLWGHQFLSFEAPDDTRGVVATARVLRTGGTVEATGDLLIAADGSTSSVRRSFLPDLKLRYSGYCAWRGVFDFSGKESSDTMTSIRRAYPELGNCLYFDLAYKTHAVLYELPRSRLNWLWYINGPEPELAGNSVTMEATDAMVGRMRNEAERVWCPELARLVRETAAPFVNVIYDADPLPRLSWTGGRVVLVGDAAHPTTPHGLRSTNMSVMDACTLGQCLANWNSEPTPARALAEYEAVRLPVVAEQVLHARQLGRLKQGLPVDGEAEDGFDVTTAKAEVLQLRQRTMPFFDGAPAAVGGDFPLVGSTR

SEQ ID NO: 17436 - protein, 229 aa, Zea mays subsp. mays
  peptide (1)..(229): Ceres Seq. ID no. 12359862
  misc_feature (1)..(172): Pfam Name: Monooxygenase Pfam Description: Monooxygenase
  misc_feature (1)..(177): Homolog of NCBI NO: 13476746 NR Description: salicylate hydroxylase [Mesorhizobium loti]
  misc_feature (73)..(161): Homolog of NCBI NO: 22989579 NR Description: hypothetical protein [Burkholderia fungorum]
  misc_feature (24)..(168): Homolog of NCBI NO: 33601754 NR Description: putative monooxygenase [Bordetella
  misc_feature (1)..(192): Homolog of NCBI NO: 27381191 NR Description: bll6080 [Bradyrhizobium japonicum]
  misc_feature (1)..(161): Homolog of NCBI NO: 22986825 NR Description: hypothetical protein [Burkholderia fungorum]
  misc_feature (1)..(181): Homolog of NCBI NO: 5916090 NR Description: hypothetical protein [Ralstonia eutropha]
  misc_feature (1)..(188): Homolog of NCBI NO: 33601729 NR Description: putative monooxygenase [Bordetella
  misc_feature (1)..(157): Homolog of NCBI NO: 17549132 NR Description: PUTATIVE SALICYLATE HYDROXYLASE OXIDOREDUCTASE
  misc_feature (1)..(175): Homolog of NCBI NO: 34766436 NR Description: FscO [Streptomyces sp. FR-008]
  misc_feature (1)..(215): Homolog of NCBI NO: 15239022 NR Description: 2,6-dihydroxypyridine 3-hydroxylase (DHPH)-related
MTSIRRAYPELGNCLYFDLAYKTHAVLYELPRSRLNWLWYINGPEPELAGNSVTMEATDAMVGRMRNEAERVWCPELARLVRETAAPFVNVIYDADPLPRLSWTGGRVVLVGDAAHPTTPHGLRSTNMSVMDACTLGQCLANWNSEPTPARALAEYEAVRLPVVAEQVLHARQLGRLKQGLPVDGEAEDGFDVTTAKAEVLQLRQRTMPFFDGAPAAVGGDFPLVGSTR

SEQ ID NO: 17437 - DNA, 1285 bp, Zea mays subsp. mays
  misc_feature (1)..(1285): Ceres Seq. ID no. 12383461
  misc_feature: MA Experiment ID: 108515 Result: Up-regulated in Transcription
  misc_feature: MA Experiment 108515 PARAMETER Experiment Name: Zm_2mM_SA_P Parameter: Age (day) Value: 8
  misc_feature: MA Experiment 108515 PARAMETER Experiment Name: Zm_2mM_SA_P Parameter: Organism Value: Zea mays
  misc_feature: MA Experiment 108515 PARAMETER Experiment Name: Zm_2mM_SA_P Parameter: Plant Line Value: 35A19
  misc_feature: MA Experiment 108515 PARAMETER Experiment Name: Zm_2mM_SA_P Parameter: Timepoint (hr) Value: 12
  misc_feature: MA Experiment 108515 PARAMETER Experiment Name: Zm_2mM_SA_P Parameter: Tissue Value: Aerial
  misc_feature: MA Experiment 108515 PARAMETER Experiment Name: Zm_2mM_SA_P Parameter: Treatment Value: 2mM SA vs. No Treatment
  misc_feature: MA Experiment ID: 108522 Result: Up-regulated in Transcription
  misc_feature: MA Experiment 108522 PARAMETER Experiment Name: Zm_42deg_Heat_P Parameter: Age (day) Value: 8
  misc_feature: MA Experiment 108522 PARAMETER Experiment Name: Zm_42deg_Heat_P Parameter: Organism Value: Zea mays
  misc_feature: MA Experiment 108522 PARAMETER Experiment Name: Zm_42deg_Heat_P Parameter: Plant Line Value: 35A19
  misc_feature: MA Experiment 108522 PARAMETER Experiment Name: Zm_42deg_Heat_P Parameter: Temperature (deg C) Value: 42 vs. 22
  misc_feature: MA Experiment 108522 PARAMETER Experiment Name: Zm_42deg_Heat_P Parameter: Timepoint (hr) Value: 1
  misc_feature: MA Experiment 108522 PARAMETER Experiment Name: Zm_42deg_Heat_P Parameter: Tissue Value: Aerial
  misc_feature: MA Experiment ID: 108527 Result: Up-regulated in Transcription
  misc_feature: MA Experiment 108527 PARAMETER Experiment Name: Zm_5mM_NO_P Parameter: Age (day) Value: 8
  misc_feature: MA Experiment 108527 PARAMETER Experiment Name: Zm_5mM_NO_P Parameter: Organism Value: Zea mays
  misc_feature: MA Experiment 108527 PARAMETER Experiment Name: Zm_5mM_NO_P Parameter: Plant Line Value: 35A19
  misc_feature: MA Experiment 108527 PARAMETER Experiment Name: Zm_5mM_NO_P Parameter: Timepoint (hr) Value: 6
  misc_feature: MA Experiment 108527 PARAMETER Experiment Name: Zm_5mM_NO_P Parameter: Tissue Value: Aerial
  misc_feature: MA Experiment 108527 PARAMETER Experiment Name: Zm_5mM_NO_P Parameter: Treatment Value: 5mM NO vs. No Treatment
  misc_feature: MA Experiment ID: 108543 Result: Down-regulated in Transcription
  misc_feature: MA Experiment ID: 108559 Result: Up-regulated in Transcription
  misc_feature: MA Experiment 108559 PARAMETER Experiment Name: Zm_5mM_NO_P Parameter: Age (day) Value: 8
  misc_feature: MA Experiment 108559 PARAMETER Experiment Name: Zm_5mM_NO_P Parameter: Organism Value: Zea mays
  misc_feature: MA Experiment 108559 PARAMETER Experiment Name: Zm_5mM_NO_P Parameter: Plant Line Value: 35A19
  misc_feature: MA Experiment 108559 PARAMETER Experiment Name: Zm_5mM_NO_P Parameter: Timepoint (hr) Value: 12
  misc_feature: MA Experiment 108559 PARAMETER Experiment Name: Zm_5mM_NO_P Parameter: Tissue Value: Aerial
  misc_feature: MA Experiment 108559 PARAMETER Experiment Name: Zm_5mM_NO_P Parameter: Treatment Value: 5mM NO vs. No Treatment
atacatccctctccgtctccctaccgctcccgtcccgtccgctgctggctctgcatatcccgcgcccgactcccgttgctgcgtgcggcggcccgactagtcgcgccgcgctgcgctcggcttgattgaaccggccgggatgggggtgttggaggacctcgtggcgagagcgggcgggtgcgcggtcatcgacggcggcttcgccacgcagctggaggcgctcggcgccgacatcaacgacccgctctggagcgccgcttgcctcatcaccaggccgcacctcgtcaaggaggttcatatgcagtatcttgaagctggtgcggacgtcatcatttcatcatcttaccaggcaacaatcccgggtttcatagctagaggaatgtctgtcgctgaggcagaagatttactgcgaacaagtgtaaaactggccaatgaagctcgagatgaattttggaagtcaacactgaggaagtccaaacctatttacaaccgtgctctggttgctgcatccattggtagctacggagcctatcttgctgatggatcggagtacagtggatcatacggagctgacatcacagccgagaagctgaaggacttccacaggcgccggctgcaggttcttgcaagtgccggtcctgacctgattgcgtttgaggccattcctaaccaaatggaggcacaggcattggttgagcttctggaggaagagaaagtccagatcccttcctggatctgcttcagctccgtggacggtaagaacctgtgctctggggagagttttgcggactgccttaagatcctcaacgcgagcgagaaggtggccgttgtaggcgtgaactgcacacctcctcagttcatcgagggcatcatatgtgaatttaggaagcaaaccaagaaggcgattgcagtttacccgaacagcggcgaagtttgggacgggagagcgaagaggtggctgccggttgagtgcttgggtcacaaaagcttcgacgctctcgcgaagagatggcaggaggcgggggccagcctcatcggagggtgctgccggacaacgccttcaactattagggctgtttccaagatcctcaaaggaaggacggggcattgatttgtttattataattgagctgttgttgcattatgtcactagccagaataacattcagaatatgtatcctgttgctcttccgttcccctttctaaaataaggtatcaatataattttgcagtgtaaaacgtaatactagtttgtagcgctgacccacagtattgcttagtctcc

SEQ ID NO: 17438 - protein, 323 aa, Zea mays subsp. mays
  peptide (1)..(323): Ceres Seq. ID no. 12383462
  misc_feature (14)..(319): Pfam Name: Homocysteine S-methyltransferase Pfam Description: Homocysteine S-methyltransferase
  misc_feature (1)..(318): Homolog of NCBI NO: 10732791 NR Description: homocysteine S-methyltransferase-4 [Zea mays]
  misc_feature (3)..(317): Homolog of NCBI NO: 21593147 NR Description: putative selenocysteine methyltransferase
  misc_feature (2)..(317): Homolog of NCBI NO: 10732787 NR Description: homocysteine S-methyltransferase-2 [Zea mays]
  misc_feature (3)..(317): Homolog of NCBI NO: 18403505 NR Description: putative selenocysteine methyltransferase
  misc_feature (1)..(317): Homolog of NCBI NO: 10732789 NR Description: homocysteine S-methyltransferase-3 [Zea mays]
  misc_feature (4)..(320): Homolog of NCBI NO: 25453566 NR Description: homocysteine S-methyltransferase (EC 2.1.1.10)
  misc_feature (4)..(320): Homolog of NCBI NO: 15229396 NR Description: homocysteine S-methyltransferase AtHMT-2
  misc_feature (3)..(320): Homolog of NCBI NO: 15230929 NR Description: homocysteine S-methyltransferase AtHMT-1
  misc_feature (4)..(323): Homolog of NCBI NO: 22748320 NR Description: Putative homocysteine S-methyltransferase-1
  misc_feature (1)..(323): Homolog of NCBI NO: 10732785 NR Description: homocysteine S-methyltransferase-1 [Zea mays]
MGVLEDLVARAGGCAVIDGGFATQLEALGADINDPLWSAACLITRPHLVKEVHMQYLEAGADVIISSSYQATIPGFIARGMSVAEAEDLLRTSVKLANEARDEFWKSTLRKSKPIYNRALVAASIGSYGAYLADGSEYSGSYGADITAEKLKDFHRRRLQVLASAGPDLIAFEAIPNQMEAQALVELLEEEKVQIPSWICFSSVDGKNLCSGESFADCLKILNASEKVAVVGVNCTPPQFIEGIICEFRKQTKKAIAVYPNSGEVWDGRAKRWLPVECLGHKSFDALAKRWQEAGASLIGGCCRTTPSTIRAVSKILKGRTGH

SEQ ID NO: 17439 - protein, 270 aa, Zea mays subsp. mays
  peptide (1)..(270): Ceres Seq. ID no. 12383463
  misc_feature (1)..(266): Pfam Name: Homocysteine S-methyltransferase Pfam Description: Homocysteine S-methyltransferase
  misc_feature (1)..(267): Homolog of NCBI NO: 15229396 NR Description: homocysteine S-methyltransferase AtHMT-2
  misc_feature (1)..(267): Homolog of NCBI NO: 15230929 NR Description: homocysteine S-methyltransferase AtHMT-1
  misc_feature (1)..(265): Homolog of NCBI NO: 10732791 NR Description: homocysteine S-methyltransferase-4 [Zea mays]
  misc_feature (1)..(264): Homolog of NCBI NO: 10732787 NR Description: homocysteine S-methyltransferase-2 [Zea mays]
  misc_feature (1)..(264): Homolog of NCBI NO: 10732789 NR Description: homocysteine S-methyltransferase-3 [Zea mays]
  misc_feature (1)..(267): Homolog of NCBI NO: 25453566 NR Description: homocysteine S-methyltransferase (EC 2.1.1.10)
  misc_feature (1)..(264): Homolog of NCBI NO: 18403505 NR Description: putative selenocysteine methyltransferase
  misc_feature (1)..(264): Homolog of NCBI NO: 21593147 NR Description: putative selenocysteine methyltransferase
  misc_feature (1)..(270): Homolog of NCBI NO: 22748320 NR Description: Putative homocysteine S-methyltransferase-1
  misc_feature (1)..(270): Homolog of NCBI NO: 10732785 NR Description: homocysteine S-methyltransferase-1 [Zea mays]
MQYLEAGADVIISSSYQATIPGFIARGMSVAEAEDLLRTSVKLANEARDEFWKSTLRKSKPIYNRALVAASIGSYGAYLADGSEYSGSYGADITAEKLKDFHRRRLQVLASAGPDLIAFEAIPNQMEAQALVELLEEEKVQIPSWICFSSVDGKNLCSGESFADCLKILNASEKVAVVGVNCTPPQFIEGIICEFRKQTKKAIAVYPNSGEVWDGRAKRWLPVECLGHKSFDALAKRWQEAGASLIGGCCRTTPSTIRAVSKILKGRTGH

SEQ ID NO: 17440 - protein, 243 aa, Zea mays subsp. mays
  peptide (1)..(243): Ceres Seq. ID no. 12383464
  misc_feature (1)..(239): Pfam Name: Homocysteine S-methyltransferase Pfam Description: Homocysteine S-methyltransferase
  misc_feature (1)..(238): Homolog of NCBI NO: 10732791 NR Description: homocysteine S-methyltransferase-4 [Zea mays]
  misc_feature (1)..(237): Homolog of NCBI NO: 21593147 NR Description: putative selenocysteine methyltransferase
  misc_feature (1)..(237): Homolog of NCBI NO: 10732787 NR Description: homocysteine S-methyltransferase-2 [Zea mays]
  misc_feature (1)..(237): Homolog of NCBI NO: 18403505 NR Description: putative selenocysteine methyltransferase
  misc_feature (1)..(237): Homolog of NCBI NO: 10732789 NR Description: homocysteine S-methyltransferase-3 [Zea mays]
  misc_feature (1)..(240): Homolog of NCBI NO: 25453566 NR Description: homocysteine S-methyltransferase (EC 2.1.1.10)
  misc_feature (1)..(240): Homolog of NCBI NO: 15229396 NR Description: homocysteine S-methyltransferase AtHMT-2
  misc_feature (1)..(240): Homolog of NCBI NO: 15230929 NR Description: homocysteine S-methyltransferase AtHMT-1
  misc_feature (1)..(243): Homolog of NCBI NO: 22748320 NR Description: Putative homocysteine S-methyltransferase-1
  misc_feature (1)..(243): Homolog of NCBI NO: 10732785 NR Description: homocysteine S-methyltransferase-1 [Zea mays]
MSVAEAEDLLRTSVKLANEARDEFWKSTLRKSKPIYNRALVAASIGSYGAYLADGSEYSGSYGADITAEKLKDFHRRRLQVLASAGPDLIAFEAIPNQMEAQALVELLEEEKVQIPSWICFSSVDGKNLCSGESFADCLKILNASEKVAVVGVNCTPPQFIEGIICEFRKQTKKAIAVYPNSGEVWDGRAKRWLPVECLGHKSFDALAKRWQEAGASLIGGCCRTTPSTIRAVSKILKGRTGH

SEQ ID NO: 17441 - DNA, 1658 bp, Zea mays subsp. mays
  misc_feature (1)..(1658): Ceres Seq. ID no. 13493696
  misc_feature: MA Experiment ID: 108528 Result: Up-regulated in Transcription
  misc_feature: MA Experiment 108528 PARAMETER Experiment Name: Zm_Imbibed_Seeds_P Parameter: Age (day) Value: 5 vs. 2
  misc_feature: MA Experiment 108528 PARAMETER Experiment Name: Zm_Imbibed_Seeds_P Parameter: Organism Value: Zea mays
  misc_feature: MA Experiment 108528 PARAMETER Experiment Name: Zm_Imbibed_Seeds_P Parameter: Plant Line Value: 35A19
  misc_feature: MA Experiment 108528 PARAMETER Experiment Name: Zm_Imbibed_Seeds_P Parameter: Tissue Value: Aerial vs. Embryo
  misc_feature: MA Experiment ID: 108535 Result: Down-regulated in Transcription
  misc_feature: MA Experiment 108535 PARAMETER Experiment Name: Zm_Meristem_P Parameter: Age (day) Value: 8
  misc_feature: MA Experiment 108535 PARAMETER Experiment Name: Zm_Meristem_P Parameter: Organism Value: Zea mays
  misc_feature: MA Experiment 108535 PARAMETER Experiment Name: Zm_Meristem_P Parameter: Plant Line Value: 35A19
  misc_feature: MA Experiment 108535 PARAMETER Experiment Name: Zm_Meristem_P Parameter: Tissue Value: Root Meristem vs. Above Root Meristem
  misc_feature: MA Experiment ID: 108543 Result: Down-regulated in Transcription
  misc_feature: MA Experiment ID: 108544 Result: Down-regulated in Transcription
  misc_feature: MA Experiment ID: 108556 Result: Down-regulated in Transcription
  misc_feature: MA Experiment 108556 PARAMETER Experiment Name: Zm_Drought_P Parameter: Age (day) Value: 9
  misc_feature: MA Experiment 108556 PARAMETER Experiment Name: Zm_Drought_P Parameter: Organism Value: Zea mays
  misc_feature: MA Experiment 108556 PARAMETER Experiment Name: Zm_Drought_P Parameter: Plant Line Value: 35A19
  misc_feature: MA Experiment 108556 PARAMETER Experiment Name: Zm_Drought_P Parameter: Timepoint (hr) Value: 24
  misc_feature: MA Experiment 108556 PARAMETER Experiment Name: Zm_Drought_P Parameter: Tissue Value: Aerial
  misc_feature: MA Experiment 108556 PARAMETER Experiment Name: Zm_Drought_P Parameter: Treatment Value: Drought vs. No Drought
  misc_feature: MA Experiment ID: 20000477 Result: Down-regulated in Transcription
  misc_feature: MA Experiment 20000477 PARAMETER Experiment Name: Zm_5mM_SA_P Parameter: Age (day) Value: 10
  misc_feature: MA Experiment 20000477 PARAMETER Experiment Name: Zm_5mM_SA_P Parameter: Organism Value: Zea mays
  misc_feature: MA Experiment 20000477 PARAMETER Experiment Name: Zm_5mM_SA_P Parameter: Plant Line Value: 35A19
  misc_feature: MA Experiment 20000477 PARAMETER Experiment Name: Zm_5mM_SA_P Parameter: Timepoint (hr) Value: 48
  misc_feature: MA Experiment 20000477 PARAMETER Experiment Name: Zm_5mM_SA_P Parameter: Tissue Value: Aerial
  misc_feature: MA Experiment 20000477 PARAMETER Experiment Name: Zm_5mM_SA_P Parameter: Treatment Value: 5mM SA vs. No Treatment
  misc_feature: MA Experiment ID: 20000479 Result: Down-regulated in Transcription
  misc_feature: MA Experiment 20000479 PARAMETER Experiment Name: Zm_Drought_P Parameter: Age (day) Value: 10
  misc_feature: MA Experiment 20000479 PARAMETER Experiment Name: Zm_Drought_P Parameter: Organism Value: Zea mays
  misc_feature: MA Experiment 20000479 PARAMETER Experiment Name: Zm_Drought_P Parameter: Plant Line Value: 35A19
  misc_feature: MA Experiment 20000479 PARAMETER Experiment Name: Zm_Drought_P Parameter: Timepoint (hr) Value: 48
  misc_feature: MA Experiment 20000479 PARAMETER Experiment Name: Zm_Drought_P Parameter: Tissue Value: Aerial
  misc_feature: MA Experiment 20000479 PARAMETER Experiment Name: Zm_Drought_P Parameter: Treatment Value: Drought vs. No Drought
  misc_feature: MA Experiment ID: 20000480 Result: Down-regulated in Transcription
  misc_feature: MA Experiment 20000480 PARAMETER Experiment Name: Zm_Drought_P Parameter: Age (day) Value: 11
  misc_feature: MA Experiment 20000480 PARAMETER Experiment Name: Zm_Drought_P Parameter: Organism Value: Zea mays
  misc_feature: MA Experiment 20000480 PARAMETER Experiment Name: Zm_Drought_P Parameter: Plant Line Value: 35A19
  misc_feature: MA Experiment 20000480 PARAMETER Experiment Name: Zm_Drought_P Parameter: Timepoint (hr) Value: 72
  misc_feature: MA Experiment 20000480 PARAMETER Experiment Name: Zm_Drought_P Parameter: Tissue Value: Aerial
  misc_feature: MA Experiment 20000480 PARAMETER Experiment Name: Zm_Drought_P Parameter: Treatment Value: Drought vs. No Drought
gcacgagaccattacctagaacatcctaatcaaaaagcaaccagcaggccattctctcgccgtctcatcacaactagcgccactctagtagtaagtactaagtagtagtaggaggtggcagcagcagccaatcttgccacgatgacactctgcaccgtcttgctccagatcctccttccaacgctgctcttggtttctgccatcacaggcgcggacgctagcggcatcggcgtcaactacggcacgcggggcacgacgctcccggcgccggccgacgtggcgcggttcctggcccgggacaccatcttcgaccgcgtgaggctgttggacgccgacccggtcctgctgcgggccttcgcaggcacgggcctcgccgtggacgtgacggtgcccaacggcgtcgtcccgcgcctgttgaatctgaccttcgcgcggcgctgggtgcgcgacaacgtgacgccctacgcgggcgccaccaacatctcgcgcctcctggtcggcgacgaggtgaccaccgaggccaaccggacgctgctgctggcgctggtgccggccatgcagaacctgcacaccgcgctggtcgccgcgtccctgcacggccgggtgaaggtctccaccacgcactcgctcggggtgctcaccaccacggagcagccgtcggcggcgcggttccgcgacggctacgacgcggccatcgtgaggccgctgctcaggttcctccgcgcgaccggcgcgccgttcatggtgaacgcgtacccgttctacgcgctcgccaacgacagcagcctcgacttcgcgctgttccgggtgaacgacggcgtcatggaccagggcaccgggctggtgtacggcaacatgctggacgcgcagctcgacgccgtgcactcggccgtcaggcggatgggcttcggggacgtcgacatcgccgtgtcggagaccgggtggccatcggccggggaggactgggaggtcggcgtcggcgcggacctcgcccgggactacaacatcaacgccatccgccacctcggctccggcgtcggcacgccgctcatgcccaaccgcaccttcgaggtctccatcttctccctcttcgacgagaacctcaagccagggccggtgtcggagaggaatttcggcttgttccgcggcgacatgacgccggtctacgacgtcggcatcttcactgatccggagacccttgagccggtgagagcgaaggtgacgagccggaaatggtgcgtgccggagccggcggcggacgagatggtgctgcaggaaaacatcgacttcgcgtgcggccaaaagggcgtcgactgtaccgcgatccggccgggcggcgtctgctacgagccggacacggtgcaggcccacgcggcgtacgccatgaacctctacttccaggccaatggccagcatgcctttgactgcgattttggacagacaggcattgttaccacagctgatcccagttatggaggctgcaaattcatgtgaacaaggcataggggatgtttgttttgaggaatcactctattgaaatttagatggtacatcatgagtccatttctcaaatttgttgggatgattatattacttatattaatactaactaactatgaaaaatgagatagtgatagataaactcattttatttcatc

SEQ ID NO: 17442 - protein, 450 aa, Zea mays subsp. mays
  peptide (1)..(450): Ceres Seq. ID no. 13493697
  misc_feature (29)..(346): Pfam Name: Glycosyl hydrolases family 17 Pfam Description: Glycosyl hydrolases family 17
  misc_feature (336)..(449): Homolog of NCBI NO: 30678225 NR Description: glycosyl hydrolase family 17 [Arabidopsis
  misc_feature (7)..(349): Homolog of NCBI NO: 30678225 NR Description: glycosyl hydrolase family 17 [Arabidopsis
  misc_feature (15)..(449): Homolog of NCBI NO: 15028379 NR Description: putative beta-1,3-glucanase [Arabidopsis thaliana]
  misc_feature (15)..(449): Homolog of NCBI NO: 15233271 NR Description: glycosyl hydrolase family 17 (beta-1,3-glucanase)
  misc_feature (15)..(449): Homolog of NCBI NO: 21617932 NR Description: beta-1,3-glucanase-like protein [Arabidopsis
  misc_feature (7)..(449): Homolog of NCBI NO: 31126737 NR Description: putative beta 1,3-glucanase
  misc_feature (1)..(449): Homolog of NCBI NO: 14279169 NR Description: beta-1,3-glucanase-like protein [Olea europaea]
  misc_feature (8)..(443): Homolog of NCBI NO: 15226720 NR Description: glycosyl hydrolase family 17 [Arabidopsis
  misc_feature (1)..(448): Homolog of NCBI NO: 11279328 NR Description: glucan endo-1,3-beta-D-glucosidase (EC 3.2.1.39)
  misc_feature (8)..(450): Homolog of NCBI NO: 1706551 NR Description: GLUCAN ENDO-1,3-BETA-GLUCOSIDASE PRECURSOR ((1-
MTLCTVLLQILLPTLLLVSAITGADASGIGVNYGTRGTTLPAPADVARFLARDTIFDRVRLLDADPVLLRAFAGTGLAVDVTVPNGVVPRLLNLTFARRWVRDNVTPYAGATNISRLLVGDEVTTEANRTLLLALVPAMQNLHTALVAASLHGRVKVSTTHSLGVLTTTEQPSAARFRDGYDAAIVRPLLRFLRATGAPFMVNAYPFYALANDSSLDFALFRVNDGVMDQGTGLVYGNMLDAQLDAVHSAVRRMGFGDVDIAVSETGWPSAGEDWEVGVGADLARDYNINAIRHLGSGVGTPLMPNRTFEVSIFSLFDENLKPGPVSERNFGLFRGDMTPVYDVGIFTDPETLEPVRAKVTSRKWCVPEPAADEMVLQENIDFACGQKGVDCTAIRPGGVCYEPDTVQAHAAYAMNLYFQANGQHAFDCDFGQTGIVTTADPSYGGCKFM

SEQ ID NO: 17443 - protein, 312 aa, Zea mays subsp. mays
  peptide (1)..(312): Ceres Seq. ID no. 13493698
  misc_feature (1)..(208): Pfam Name: Glycosyl hydrolases family 17 Pfam Description: Glycosyl hydrolases family 17
  misc_feature (198)..(311): Homolog of NCBI NO: 30678225 NR Description: glycosyl hydrolase family 17 [Arabidopsis
  misc_feature (1)..(211): Homolog of NCBI NO: 30678225 NR Description: glycosyl hydrolase family 17 [Arabidopsis
  misc_feature (1)..(311): Homolog of NCBI NO: 15028379 NR Description: putative beta-1,3-glucanase [Arabidopsis thaliana]
  misc_feature (1)..(311): Homolog of NCBI NO: 15233271 NR Description: glycosyl hydrolase family 17 (beta-1,3-glucanase)
  misc_feature (1)..(311): Homolog of NCBI NO: 21617932 NR Description: beta-1,3-glucanase-like protein [Arabidopsis
  misc_feature (1)..(311): Homolog of NCBI NO: 31126737 NR Description: putative beta 1,3-glucanase
  misc_feature (1)..(311): Homolog of NCBI NO: 14279169 NR Description: beta-1,3-glucanase-like protein [Olea europaea]
  misc_feature (1)..(305): Homolog of NCBI NO: 15226720 NR Description: glycosyl hydrolase family 17 [Arabidopsis
  misc_feature (1)..(310): Homolog of NCBI NO: 11279328 NR Description: glucan endo-1,3-beta-D-glucosidase (EC 3.2.1.39)
  misc_feature (1)..(312): Homolog of NCBI NO: 1706551 NR Description: GLUCAN ENDO-1,3-BETA-GLUCOSIDASE PRECURSOR ((1-
MQNLHTALVAASLHGRVKVSTTHSLGVLTTTEQPSAARFRDGYDAAIVRPLLRFLRATGAPFMVNAYPFYALANDSSLDFALFRVNDGVMDQGTGLVYGNMLDAQLDAVHSAVRRMGFGDVDIAVSETGWPSAGEDWEVGVGADLARDYNINAIRHLGSGVGTPLMPNRTFEVSIFSLFDENLKPGPVSERNFGLFRGDMTPVYDVGIFTDPETLEPVRAKVTSRKWCVPEPAADEMVLQENIDFACGQKGVDCTAIRPGGVCYEPDTVQAHAAYAMNLYFQANGQHAFDCDFGQTGIVTTADPSYGGCKFM

SEQ ID NO: 17444 - protein, 250 aa, Zea mays subsp. mays
  peptide (1)..(250): Ceres Seq. ID no. 13493699
  misc_feature (1)..(146): Pfam Name: Glycosyl hydrolases family 17 Pfam Description: Glycosyl hydrolases family 17
  misc_feature (136)..(249): Homolog of NCBI NO: 30678225 NR Description: glycosyl hydrolase family 17 [Arabidopsis
  misc_feature (1)..(149): Homolog of NCBI NO: 30678225 NR Description: glycosyl hydrolase family 17 [Arabidopsis
  misc_feature (1)..(249): Homolog of NCBI NO: 15028379 NR Description: putative beta-1,3-glucanase [Arabidopsis thaliana]
  misc_feature (1)..(249): Homolog of NCBI NO: 15233271 NR Description: glycosyl hydrolase family 17 (beta-1,3-glucanase)
  misc_feature (1)..(249): Homolog of NCBI NO: 21617932 NR Description: beta-1,3-glucanase-like protein [Arabidopsis
  misc_feature (1)..(249): Homolog of NCBI NO: 31126737 NR Description: putative beta 1,3-glucanase
  misc_feature (1)..(249): Homolog of NCBI NO: 14279169 NR Description: beta-1,3-glucanase-like protein [Olea europaea]
  misc_feature (1)..(243): Homolog of NCBI NO: 15226720 NR Description: glycosyl hydrolase family 17 [Arabidopsis
  misc_feature (1)..(248): Homolog of NCBI NO: 11279328 NR Description: glucan endo-1,3-beta-D-glucosidase (EC 3.2.1.39)
  misc_feature (1)..(250): Homolog of NCBI NO: 1706551 NR Description: GLUCAN ENDO-1,3-BETA-GLUCOSIDASE PRECURSOR ((1-
MVNAYPFYALANDSSLDFALFRVNDGVMDQGTGLVYGNMLDAQLDAVHSAVRRMGFGDVDIAVSETGWPSAGEDWEVGVGADLARDYNINAIRHLGSGVGTPLMPNRTFEVSIFSLFDENLKPGPVSERNFGLFRGDMTPVYDVGIFTDPETLEPVRAKVTSRKWCVPEPAADEMVLQENIDFACGQKGVDCTAIRPGGVCYEPDTVQAHAAYAMNLYFQANGQHAFDCDFGQTGIVTTADPSYGGCKFM

SEQ ID NO: 17445 - DNA, 1863 bp, Zea mays subsp. mays
  misc_feature (1)..(1863): Ceres Seq. ID no. 12387583
  misc_feature: MA Experiment ID: 108522 Result: Down-regulated in Transcription
  misc_feature: MA Experiment 108522 PARAMETER Experiment Name: Zm_42deg_Heat_P Parameter: Age (day) Value: 8
  misc_feature: MA Experiment 108522 PARAMETER Experiment Name: Zm_42deg_Heat_P Parameter: Organism Value: Zea mays
  misc_feature: MA Experiment 108522 PARAMETER Experiment Name: Zm_42deg_Heat_P Parameter: Plant Line Value: 35A19
  misc_feature: MA Experiment 108522 PARAMETER Experiment Name: Zm_42deg_Heat_P Parameter: Temperature (deg C) Value: 42 vs. 22
  misc_feature: MA Experiment 108522 PARAMETER Experiment Name: Zm_42deg_Heat_P Parameter: Timepoint (hr) Value: 1
  misc_feature: MA Experiment 108522 PARAMETER Experiment Name: Zm_42deg_Heat_P Parameter: Tissue Value: Aerial
gcacgagaccattacctagaacatcctaatcgaaaaaccatttcgtttcggcttgagcagccggggagctgagcagcgcggcgcccatgtcggactccgagctgtcccagggcacgctagtgttcggcctccacctctgggagctcgtcggcatcggtgtcggtgccgcattcgtgctcctcctcgtcctcctctccctgctctgcctcctcgcctcccgccgccgccgacgccgccgtgctgcccccgtcctccacctccccgccgtcgtgcccaatgcccagcccaagcaccccgccaagccccccaaggacatccaagaggtgccctcccgcggcaccgcggcccccgccgccccggccaaggcgccgctcgcccaggtgctgcaggcgccgccgccggactccatccagatcgagacggggaaggagcaccgtatcacgttcccggagcagccgccgcccccgcaccaccagcggagcggggggccgtcgtctcggggcgccagcggggagagccgtggcggtggtggggaaccgggggtcccggaggtgtcgcacctggggtggggccactggtacacactcaaggagctggaggacgccacgtgcatgttcgccgacgagaaggtgatcggcgagggcggctacggcatagtgtaccacggcgtgctggagggcggagtgcaggtcgccgtcaaaaacttgctcaacaacagggggcaggcagaacgggaattcaaggttgaggtggaagctatcgggcgagtgcgacacaagaaccttgttcggttgttaggatactgcgctgaaggcaaccaaaggatgcttgtgtatgagtacgttaataatggaaacttggagcaatggctccatggggatgttggccctgtgagccctcttacatgggatatcagaatgaagattattctgggaacagcaaaagggttaatgtatttgcacgagggacttgagccaaaggttgttcaccgtgatgtcaagtcgagcaatattcttcttgacaagcattggaatgcaaagctttctgattttgggctagcgaaacttttgggttcagaaaggagttatgtcacaaccagggtcatggggacatttgggtatgttgcgccagagtatgcgggcactggcatgttgaatgaaactagcgatgtctatagtttcggaattcttatcatggaaataatatctggccgtgtacctgttgattacaacaggccgccaggggagattaatctagttgagtggctgaagacgatggtcagcaacagaaattctgaaggggttttggatccaaagatgaccgagaagcctacttctagggcattgaagaaggctttgctagtggctctgcggtgcgtagaccccgaagctcgcaagaggccaaagattgggcatgtcattcacatgcttgaggttgacgatttcccgtacagagatgagcgccggggtggcaaagctccagcccaagcaagatcggtggaaacgccacctgcaagcgaacctggcgatagcagcggaaacaacactccaaaggacgcgcctaatggagaacctttcaagtggagaaactaagaggactagccaccaggaaaacggtggttgcttgagtttgtgcctgataaagaagctggatatggttggttggttggttggttggttggtcgggcatgcaaactccacaagcaccagtgtcggtcgtcgtcgtgacagtatatgtacattgttgaatcgatatgttagccatagcgattttttttccagttggttttcttggggccgtatatttatgcgaaggatgattttgtgtgataaaggcgcgcgctctcgtgtgtattcctgaggc

SEQ ID NO: 17446 - protein, 501 aa, Zea mays subsp. mays
  peptide (1)..(501): Ceres Seq. ID no. 12387584
  misc_feature (179)..(448): Pfam Name: Protein kinase domain Pfam Description: Protein kinase domain
  misc_feature (83)..(211): Homolog of NCBI NO: 25518287 NR Description: hypothetical protein F22L4.8 - Arabidopsis
  misc_feature (211)..(486): Homolog of NCBI NO: 25518287 NR Description: hypothetical protein F22L4.8 - Arabidopsis
  misc_feature (64)..(486): Homolog of NCBI NO: 15235432 NR Description: putative serine/threonine protein kinase; protein
  misc_feature (3)..(96): Homolog of NCBI NO: 15234142 NR Description: putative protein kinase; protein id: At4g01330.1
  misc_feature (64)..(457): Homolog of NCBI NO: 15234142 NR Description: putative protein kinase; protein id: At4g01330.1
  misc_feature (1)..(89): Homolog of NCBI NO: 15223428 NR Description: protein serine/threonine kinase, putative
  misc_feature (1)..(89): Homolog of NCBI NO: 14194119 NR Description: At1g01540/F22L4_6 [Arabidopsis thaliana]
  misc_feature (83)..(486): Homolog of NCBI NO: 15223428 NR Description: protein serine/threonine kinase, putative
  misc_feature (83)..(486): Homolog of NCBI NO: 14194119 NR Description: At1g01540/F22L4_6 [Arabidopsis thaliana]
  misc_feature (21)..(501): Homolog of NCBI NO: 34897534 NR Description: OSJNBa0042L16.4 [Oryza sativa (japonica
MSDSELSQGTLVFGLHLWELVGIGVGAAFVLLLVLLSLLCLLASRRRRRRRAAPVLHLPAVVPNAQPKHPAKPPKDIQEVPSRGTAAPAAPAKAPLAQVLQAPPPDSIQIETGKEHRITFPEQPPPPHHQRSGGPSSRGASGESRGGGGEPGVPEVSHLGWGHWYTLKELEDATCMFADEKVIGEGGYGIVYHGVLEGGVQVAVKNLLNNRGQAEREFKVEVEAIGRVRHKNLVRLLGYCAEGNQRMLVYEYVNNGNLEQWLHGDVGPVSPLTWDIRMKIILGTAKGLMYLHEGLEPKVVHRDVKSSNILLDKHWNAKLSDFGLAKLLGSERSYVTTRVMGTFGYVAPEYAGTGMLNETSDVYSFGILIMEIISGRVPVDYNRPPGEINLVEWLKTMVSNRNSEGVLDPKMTEKPTSRALKKALLVALRCVDPEARKRPKIGHVIHMLEVDDFPYRDERRGGKAPAQARSVETPPASEPGDSSGNNTPKDAPNGEPFKWRN

SEQ ID NO: 17447 - protein, 326 aa, Zea mays subsp. mays
  peptide (1)..(326): Ceres Seq. ID no. 12387585
  misc_feature (4)..(273): Pfam Name: Protein kinase domain Pfam Description: Protein kinase domain
  misc_feature (1)..(288): Homolog of NCBI NO: 30690058 NR Description: protein kinase family [Arabidopsis thaliana]
  misc_feature (1)..(310): Homolog of NCBI NO: 37535714 NR Description: putative kinase [Oryza sativa (japonica
  misc_feature (1)..(283): Homolog of NCBI NO: 37536398 NR Description: putative receptor-like protein kinase
  misc_feature (1)..(36): Homolog of NCBI NO: 25518287 NR Description: hypothetical protein F22L4.8 - Arabidopsis
  misc_feature (36)..(311): Homolog of NCBI NO: 25518287 NR Description: hypothetical protein F22L4.8 - Arabidopsis
  misc_feature (1)..(311): Homolog of NCBI NO: 15235432 NR Description: putative serine/threonine protein kinase; protein
  misc_feature (1)..(282): Homolog of NCBI NO: 15234142 NR Description: putative protein kinase; protein id: At4g01330.1
  misc_feature (1)..(311): Homolog of NCBI NO: 15223428 NR Description: protein serine/threonine kinase, putative
  misc_feature (1)..(311): Homolog of NCBI NO: 14194119 NR Description: At1g01540/F22L4_6 [Arabidopsis thaliana]
  misc_feature (1)..(326): Homolog of NCBI NO: 34897534 NR Description: OSJNBa0042L16.4 [Oryza sativa (japonica
MFADEKVIGEGGYGIVYHGVLEGGVQVAVKNLLNNRGQAEREFKVEVEAIGRVRHKNLVRLLGYCAEGNQRMLVYEYVNNGNLEQWLHGDVGPVSPLTWDIRMKIILGTAKGLMYLHEGLEPKVVHRDVKSSNILLDKHWNAKLSDFGLAKLLGSERSYVTTRVMGTFGYVAPEYAGTGMLNETSDVYSFGILIMEIISGRVPVDYNRPPGEINLVEWLKTMVSNRNSEGVLDPKMTEKPTSRALKKALLVALRCVDPEARKRPKIGHVIHMLEVDDFPYRDERRGGKAPAQARSVETPPASEPGDSSGNNTPKDAPNGEPFKWRN

SEQ ID NO: 17448 - protein, 255 aa, Zea mays subsp. mays
  peptide (1)..(255): Ceres Seq. ID no. 12387586
  misc_feature (1)..(202): Pfam Name: Protein kinase domain Pfam Description: Protein kinase domain
  misc_feature (1)..(210): Homolog of NCBI NO: 7488207 NR Description: probable serine/threonine-specific protein kinase
  misc_feature (1)..(217): Homolog of NCBI NO: 30690058 NR Description: protein kinase family [Arabidopsis thaliana]
  misc_feature (1)..(239): Homolog of NCBI NO: 37535714 NR Description: putative kinase [Oryza sativa (japonica
  misc_feature (1)..(212): Homolog of NCBI NO: 37536398 NR Description: putative receptor-like protein kinase
  misc_feature (1)..(240): Homolog of NCBI NO: 25518287 NR Description: hypothetical protein F22L4.8 - Arabidopsis
  misc_feature (1)..(240): Homolog of NCBI NO: 15235432 NR Description: putative serine/threonine protein kinase; protein
  misc_feature (1)..(211): Homolog of NCBI NO: 15234142 NR Description: putative protein kinase; protein id: At4g01330.1
  misc_feature (1)..(240): Homolog of NCBI NO: 15223428 NR Description: protein serine/threonine kinase, putative
  misc_feature (1)..(240): Homolog of NCBI NO: 14194119 NR Description: At1g01540/F22L4_6 [Arabidopsis thaliana]
  misc_feature (1)..(255): Homolog of NCBI NO: 34897534 NR Description: OSJNBa0042L16.4 [Oryza sativa (japonica
MLVYEYVNNGNLEQWLHGDVGPVSPLTWDIRMKIILGTAKGLMYLHEGLEPKVVHRDVKSSNILLDKHWNAKLSDFGLAKLLGSERSYVTTRVMGTFGYVAPEYAGTGMLNETSDVYSFGILIMEIISGRVPVDYNRPPGEINLVEWLKTMVSNRNSEGVLDPKMTEKPTSRALKKALLVALRCVDPEARKRPKIGHVIHMLEVDDFPYRDERRGGKAPAQARSVETPPASEPGDSSGNNTPKDAPNGEPFKWRN

SEQ ID NO: 17449 - DNA, 1821 bp, Zea mays subsp. mays
  misc_feature (1)..(1821): Ceres Seq. ID no. 12375293
  misc_feature: MA Experiment ID: 20000534 Result: Down-regulated in Transcription
  misc_feature: MA Experiment 20000534 PARAMETER Experiment Name: Zm_Hybrid_Pollen_P Parameter: Age (day) Value: 8
  misc_feature: MA Experiment 20000534 PARAMETER Experiment Name: Zm_Hybrid_Pollen_P Parameter: Organism Value: Zea mays
  misc_feature: MA Experiment 20000534 PARAMETER Experiment Name: Zm_Hybrid_Pollen_P Parameter: Plant Line Value: 35A19
  misc_feature: MA Experiment 20000534 PARAMETER Experiment Name: Zm_Hybrid_Pollen_P Parameter: Tissue Value: Pollen vs. Aerial
attaccgcctccgcaaccagcccgccgcgcccccgagcgtttcgttccgggagcggcaagactgggacacgccagccctttatttcgagctttctgcgtgcgggaggggggttgacaggcgatggcggccgagggcgaggcggcggcgctggagttcacaccgacgtggatcgtcgcggcggtctgctctctcatcgtgctcctctcgctcgtcgccgagcgatgcctccactacctcggcaagacgctcaagaggaagaaccagaagccgctcttcgaggcgctgctcaaggtcaaagaagagttgatgcttctggggttcatctccctgctgctgacggtgttccaggggatgatccggaggacgtgcatccctgaacgctggacattccacatgctgccatgcgagaagccagatgagaaggccggtgaggccgccaccatggagcattttgtagggacgcttggcaggatcggtaggcgtctgttgcaggaaggcactgctggggctgagcaatgccagaagaagggaaaagttccacttttgtcccttgaagccatacatcagctgcacattttcatatttgttctggcaatcacacatgttattttcagcgtcacaactatgcttttaggaggtgcacagatacaccaatggaaacagtgggagaatggaattaaaaaagatgctcctggaaatgggcctaaggtaaccaatgtacatcatcatgaatttatcaagaaacgttttaagggtattggcaaagattctataatattgagttggctgcattcttttggtaagcagttttatagatcagtatctaaatcagattacaccacaatgcgtcttggttttatcatgactcactgccctggaaatccaaaatttgatttccatagatacatggtaagggttttagaggcggattttaagaaagtggtaggcataagctggtacttgtgggtcttcgtggtgatatttctgttgctgaatgttaatggctgggcacacatacttttggattgctttccttccccttattcttctgttagccattggcactaagctggagcatgtcatagctcagctagcccatgatgtagctgagaagcacacagcggtcgagggcgatgtgatcgtaaaaccatcagatgaacacttctggttcggcaagcctagggttatcctttacctgatccacttcatcctctttcagaatgcgtttgagattgcgtttttcttctggatactgagcacttatggattcgactcgtgcatcatgggacaagttcgttttattgtgccaaggcttgtcatcggggtggttattcagcttctctgcagctacagcaccttgcctctgtatgcaattgtaacccagatggggagctgctacaagaaggagatcttcaacgagcatgtgcagcagggcgtcctgggctgggctcagaaggtcaagatgaaaaagggactgaagggagctgcatctgctagcaaggacgaatcgattaccaatgccgattcggcaggaccttccgttaagattgaaatggcgaaggctggggaggatgttgagatcgttggaaacacaggttgattgggacaatagggtgcccgtgttgtaatgatgtaacaggctaatatgccatcatcttttttttgtagatactagatagcttgctgtggcaataccgcaatagcggtgaactagagaaggtttgggcccgggagcctcatctgttatcggtccagtaggaagcaaattcttatatacgggatatcgataaaaaatgaactaagttcctggattcattacc

SEQ ID NO: 17450 - protein, 315 aa, Zea mays subsp. mays
  peptide (1)..(315): Ceres Seq. ID no. 12375294
  misc_feature (5)..(296): Pfam Name: Mlo family Pfam Description: Mlo family
  misc_feature (5)..(296): Pfam Name: Mlo family Pfam Description: Mlo family
  misc_feature (121)..(301): Homolog of NCBI NO: 13784985 NR Description: seven transmembrane protein Mlo6 [Zea mays]
  misc_feature (1)..(299): Homolog of NCBI NO: 13784977 NR Description: seven transmembrane protein Mlo2 [Zea mays]
  misc_feature (84)..(296): Homolog of NCBI NO: 7487333 NR Description: hypothetical protein T22A6.80 - Arabidopsis
  misc_feature (5)..(296): Homolog of NCBI NO: 13784987 NR Description: seven transmembrane protein Mlo7 [Zea mays]
  misc_feature (6)..(296): Homolog of NCBI NO: 13784979 NR Description: seven transmembrane protein Mlo3 [Zea mays]
  misc_feature (3)..(296): Homolog of NCBI NO: 18416311 NR Description: Mlo-like protein
  misc_feature (5)..(299): Homolog of NCBI NO: 15224823 NR Description: similar to Mlo proteins from H. vulgare
  misc_feature (1)..(296): Homolog of NCBI NO: 15235429 NR Description: AtMlo-h1-like protein
  misc_feature (1)..(296): Homolog of NCBI NO: 34907492 NR Description: putative seven transmembrane protein
  misc_feature (1)..(296): Homolog of NCBI NO: 13784989 NR Description: seven transmembrane protein Mlo8 [Zea mays]
  misc_feature (121)..(301): Homolog of NCBI NO: 13784985 NR Description: seven transmembrane protein Mlo6 [Zea mays]
  misc_feature (1)..(299): Homolog of NCBI NO: 13784977 NR Description: seven transmembrane protein Mlo2 [Zea mays]
  misc_feature (84)..(296): Homolog of NCBI NO: 7487333 NR Description: hypothetical protein T22A6.80 - Arabidopsis
  misc_feature (5)..(296): Homolog of NCBI NO: 13784987 NR Description: seven transmembrane protein Mlo7 [Zea mays]
  misc_feature (6)..(296): Homolog of NCBI NO: 13784979 NR Description: seven transmembrane protein Mlo3 [Zea mays]
  misc_feature (3)..(296): Homolog of NCBI NO: 18416311 NR Description: Mlo-like protein
  misc_feature (5)..(299): Homolog of NCBI NO: 15224823 NR Description: similar to Mlo proteins from H. vulgare
  misc_feature (1)..(296): Homolog of NCBI NO: 15235429 NR Description: AtMlo-h1-like protein
  misc_feature (1)..(296): Homolog of NCBI NO: 34907492 NR Description: putative seven transmembrane protein
  misc_feature (1)..(296): Homolog of NCBI NO: 13784989 NR Description: seven transmembrane protein Mlo8 [Zea mays]
MAAEGEAAALEFTPTWIVAAVCSLIVLLSLVAERCLHYLGKTLKRKNQKPLFEALLKVKEELMLLGFISLLLTVFQGMIRRTCIPERWTFHMLPCEKPDEKAGEAATMEHFVGTLGRIGRRLLQEGTAGAEQCQKKGKVPLLSLEAIHQLHIFIFVLAITHVIFSVTTMLLGGAQIHQWKQWENGIKKDAPGNGPKVTNVHHHEFIKKRFKGIGKDSIILSWLHSFGKQFYRSVSKSDYTTMRLGFIMTHCPGNPKFDFHRYMVRVLEADFKKVVGISWYLWVFVVIFLLLNVNGWAHILLDCFPSPYSSVSHWH

SEQ ID NO: 17451 - protein, 253 aa, Zea mays subsp. mays
  peptide (1)..(253): Ceres Seq. ID no. 12375295
  misc_feature (1)..(234): Pfam Name: Mlo family Pfam Description: Mlo family
  misc_feature (1)..(234): Pfam Name: Mlo family Pfam Description: Mlo family
  misc_feature (59)..(239): Homolog of NCBI NO: 13784985 NR Description: seven transmembrane protein Mlo6 [Zea mays]
  misc_feature (1)..(237): Homolog of NCBI NO: 13784977 NR Description: seven transmembrane protein Mlo2 [Zea mays]
  misc_feature (22)..(234): Homolog of NCBI NO: 7487333 NR Description: hypothetical protein T22A6.80 - Arabidopsis
  misc_feature (1)..(234): Homolog of NCBI NO: 13784987 NR Description: seven transmembrane protein Mlo7 [Zea mays]
  misc_feature (1)..(234): Homolog of NCBI NO: 13784979 NR Description: seven transmembrane protein Mlo3 [Zea mays]
  misc_feature (59)..(239): Homolog of NCBI NO: 13784985 NR Description: seven transmembrane protein Mlo6 [Zea mays]
  misc_feature (22)..(234): Homolog of NCBI NO: 7487333 NR Description: hypothetical protein T22A6.80 - Arabidopsis
  misc_feature (1)..(234): Homolog of NCBI NO: 13784979 NR Description: seven transmembrane protein Mlo3 [Zea mays]
  misc_feature (1)..(234): Homolog of NCBI NO: 13784989 NR Description: seven transmembrane protein Mlo8 [Zea mays]
  misc_feature (1)..(234): Homolog of NCBI NO: 34907492 NR Description: putative seven transmembrane protein
  misc_feature (1)..(234): Homolog of NCBI NO: 15235429 NR Description: AtMlo-h1-like protein
  misc_feature (1)..(237): Homolog of NCBI NO: 15224823 NR Description: similar to Mlo proteins from H. vulgare
  misc_feature (1)..(234): Homolog of NCBI NO: 18416311 NR Description: Mlo-like protein
  misc_feature (1)..(234): Homolog of NCBI NO: 13784987 NR Description: seven transmembrane protein Mlo7 [Zea mays]
  misc_feature (1)..(237): Homolog of NCBI NO: 13784977 NR Description: seven transmembrane protein Mlo2 [Zea mays]
  misc_feature (1)..(234): Homolog of NCBI NO: 18416311 NR Description: Mlo-like protein
  misc_feature (1)..(237): Homolog of NCBI NO: 15224823 NR Description: similar to Mlo proteins from H. vulgare
  misc_feature (1)..(234): Homolog of NCBI NO: 15235429 NR Description: AtMlo-h1-like protein
  misc_feature (1)..(234): Homolog of NCBI NO: 34907492 NR Description: putative seven transmembrane protein
  misc_feature (1)..(234): Homolog of NCBI NO: 13784989 NR Description: seven transmembrane protein Mlo8 [Zea mays]
MLLGFISLLLTVFQGMIRRTCIPERWTFHMLPCEKPDEKAGEAATMEHFVGTLGRIGRRLLQEGTAGAEQCQKKGKVPLLSLEAIHQLHIFIFVLAITHVIFSVTTMLLGGAQIHQWKQWENGIKKDAPGNGPKVTNVHHHEFIKKRFKGIGKDSIILSWLHSFGKQFYRSVSKSDYTTMRLGFIMTHCPGNPKFDFHRYMVRVLEADFKKVVGISWYLWVFVVIFLLLNVNGWAHILLDCFPSPYSSVSHWH

SEQ ID NO: 17452 - protein, 238 aa, Zea mays subsp. mays
  peptide (1)..(238): Ceres Seq. ID no. 12375296
  misc_feature (1)..(219): Pfam Name: Mlo family Pfam Description: Mlo family
  misc_feature (1)..(219): Pfam Name: Mlo family Pfam Description: Mlo family
  misc_feature (44)..(224): Homolog of NCBI NO: 13784985 NR Description: seven transmembrane protein Mlo6 [Zea mays]
  misc_feature (1)..(222): Homolog of NCBI NO: 13784977 NR Description: seven transmembrane protein Mlo2 [Zea mays]
  misc_feature (7)..(219): Homolog of NCBI NO: 7487333 NR Description: hypothetical protein T22A6.80 - Arabidopsis
  misc_feature (1)..(219): Homolog of NCBI NO: 13784987 NR Description: seven transmembrane protein Mlo7 [Zea mays]
  misc_feature (1)..(219): Homolog of NCBI NO: 13784979 NR Description: seven transmembrane protein Mlo3 [Zea mays]
  misc_feature (44)..(224): Homolog of NCBI NO: 13784985 NR Description: seven transmembrane protein Mlo6 [Zea mays]
  misc_feature (7)..(219): Homolog of NCBI NO: 7487333 NR Description: hypothetical protein T22A6.80 - Arabidopsis
  misc_feature (1)..(219): Homolog of NCBI NO: 13784979 NR Description: seven transmembrane protein Mlo3 [Zea mays]
  misc_feature (1)..(219): Homolog of NCBI NO: 13784989 NR Description: seven transmembrane protein Mlo8 [Zea mays]
  misc_feature (1)..(219): Homolog of NCBI NO: 34907492 NR Description: putative seven transmembrane protein
  misc_feature (1)..(219): Homolog of NCBI NO: 15235429 NR Description: AtMlo-h1-like protein
  misc_feature (1)..(222): Homolog of NCBI NO: 15224823 NR Description: similar to Mlo proteins from H. vulgare
  misc_feature (1)..(219): Homolog of NCBI NO: 18416311 NR Description: Mlo-like protein
  misc_feature (1)..(219): Homolog of NCBI NO: 13784987 NR Description: seven transmembrane protein Mlo7 [Zea mays]
  misc_feature (1)..(222): Homolog of NCBI NO: 13784977 NR Description: seven transmembrane protein Mlo2 [Zea mays]
  misc_feature (1)..(219): Homolog of NCBI NO: 18416311 NR Description: Mlo-like protein
  misc_feature (1)..(222): Homolog of NCBI NO: 15224823 NR Description: similar to Mlo proteins from H. vulgare
  misc_feature (1)..(219): Homolog of NCBI NO: 15235429 NR Description: AtMlo-h1-like protein
  misc_feature (1)..(219): Homolog of NCBI NO: 34907492 NR Description: putative seven transmembrane protein
  misc_feature (1)..(219): Homolog of NCBI NO: 13784989 NR Description: seven transmembrane protein Mlo8 [Zea mays]
MIRRTCIPERWTFHMLPCEKPDEKAGEAATMEHFVGTLGRIGRRLLQEGTAGAEQCQKKGKVPLLSLEAIHQLHIFIFVLAITHVIFSVTTMLLGGAQIHQWKQWENGIKKDAPGNGPKVTNVHHHEFIKKRFKGIGKDSIILSWLHSFGKQFYRSVSKSDYTTMRLGFIMTHCPGNPKFDFHRYMVRVLEADFKKVVGISWYLWVFVVIFLLLNVNGWAHILLDCFPSPYSSVSHWH

SEQ ID NO: 17453 - DNA, 2228 bp, Zea mays subsp. mays
  misc_feature (1)..(2228): Ceres Seq. ID no. 12377954
  misc_feature: MA Experiment ID: 108526 Result: Up-regulated in Transcription
  misc_feature: MA Experiment 108526 PARAMETER Experiment Name: Zm_5mM_NO_P Parameter: Age (day) Value: 8
  misc_feature: MA Experiment 108526 PARAMETER Experiment Name: Zm_5mM_NO_P Parameter: Organism Value: Zea mays
  misc_feature: MA Experiment 108526 PARAMETER Experiment Name: Zm_5mM_NO_P Parameter: Plant Line Value: 35A19
  misc_feature: MA Experiment 108526 PARAMETER Experiment Name: Zm_5mM_NO_P Parameter: Timepoint (hr) Value: 1
  misc_feature: MA Experiment 108526 PARAMETER Experiment Name: Zm_5mM_NO_P Parameter: Tissue Value: Aerial
  misc_feature: MA Experiment 108526 PARAMETER Experiment Name: Zm_5mM_NO_P Parameter: Treatment Value: 5mM NO vs. No Treatment
  misc_feature: MA Experiment ID: 108527 Result: Up-regulated in Transcription
  misc_feature: MA Experiment 108527 PARAMETER Experiment Name: Zm_5mM_NO_P Parameter: Age (day) Value: 8
  misc_feature: MA Experiment 108527 PARAMETER Experiment Name: Zm_5mM_NO_P Parameter: Organism Value: Zea mays
  misc_feature: MA Experiment 108527 PARAMETER Experiment Name: Zm_5mM_NO_P Parameter: Plant Line Value: 35A19
  misc_feature: MA Experiment 108527 PARAMETER Experiment Name: Zm_5mM_NO_P Parameter: Timepoint (hr) Value: 6
  misc_feature: MA Experiment 108527 PARAMETER Experiment Name: Zm_5mM_NO_P Parameter: Tissue Value: Aerial
  misc_feature: MA Experiment 108527 PARAMETER Experiment Name: Zm_5mM_NO_P Parameter: Treatment Value: 5mM NO vs. No Treatment
  misc_feature: MA Experiment ID: 108535 Result: Down-regulated in Transcription
  misc_feature: MA Experiment 108535 PARAMETER Experiment Name: Zm_Meristem_P Parameter: Age (day) Value: 8
  misc_feature: MA Experiment 108535 PARAMETER Experiment Name: Zm_Meristem_P Parameter: Organism Value: Zea mays
  misc_feature: MA Experiment 108535 PARAMETER Experiment Name: Zm_Meristem_P Parameter: Plant Line Value: 35A19
  misc_feature: MA Experiment 108535 PARAMETER Experiment Name: Zm_Meristem_P Parameter: Tissue Value: Root Meristem vs. Above Root Meristem
  misc_feature: MA Experiment ID: 108559 Result: Up-regulated in Transcription
  misc_feature: MA Experiment 108559 PARAMETER Experiment Name: Zm_5mM_NO_P Parameter: Age (day) Value: 8
  misc_feature: MA Experiment 108559 PARAMETER Experiment Name: Zm_5mM_NO_P Parameter: Organism Value: Zea mays
  misc_feature: MA Experiment 108559 PARAMETER Experiment Name: Zm_5mM_NO_P Parameter: Plant Line Value: 35A19
  misc_feature: MA Experiment 108559 PARAMETER Experiment Name: Zm_5mM_NO_P Parameter: Timepoint (hr) Value: 12
  misc_feature: MA Experiment 108559 PARAMETER Experiment Name: Zm_5mM_NO_P Parameter: Tissue Value: Aerial
  misc_feature: MA Experiment 108559 PARAMETER Experiment Name: Zm_5mM_NO_P Parameter: Treatment Value: 5mM NO vs. No Treatment
gcacgagaccattacctagaacatcctaatcgaaaaaccttcctccgttgcctcctcttccgcggccccgtcgatgggcttggctttaccagtggcgggttcccacacgggggctagacgccgccaccgctgaccccgtctacaccgaatcccccgcgcgatttaacccctcgcctcgctcgccgcctccgcttccatacaaccgcgcactccaaacgcgcacgcgctgttcgttcctcggccgctctgtccacccccgtccttctccgccctcaacagatctccgccggccgtgcggttccttaattcgccttctccgggactgtcggatctccgcggcggctggggatgggcaactgctgcgtgacgccgaaagcagccgacgacgccggcggcggcaagaagcccaaggagccgaagcagaagaagggtaagaagccgaaccccttctcgatcgattacaaccgctcggggccaggcgagcgcgccaaagctggtggtgctgcgggatcccacggggcgggacatcgcggcgcggtacgagctcggcgcggagctcgggcgcggcgagttcggggttacctacctctgcacagaccgtgcctcaggggaggcgctggcctgcaagtctatctccaagaagaagctccgcaccgccgtcgacctcgaggacgtgcgccgggaggtggagatcatgcgccacctccccaagcaccccaacgtcgtcacgctcagggacacgtacgaggacgacaatgccgtgcacctcgtcatggagctctgcgagggcggtgagctcttcgaccgcatcgtggcgcggggacactacactgagcgtgctgccgccttggtcttacgcactatcgttgaggtcgtgcagatgtgccataagcatggagtgatgcacagggatctcaaaccagaaaatttcttgtttgcaaacaagaaagaatcagcggcacttaaggccattgattttggcctgtctgtatttttcacaccaggcgaacggttttctgagattgttggaagtccttattacatggctccagaggtgctaaagagaaactatggcccagaggttgatgtttggagtgcaggagtgattctgtacattcttctttgtggtgtccccccattctgggcagaaacggaacagggtgttgctcaggcaatcattcgatctgtcattgatttcaaaagagatccatggccaagggtgtctgataatgccaaagaccttgtcagaggaatgctgaatccggacccaaaacgacgattgacagctcaccaagtgcttggtcacccatggttgcagaacattaagaaggctccaaatgtcaatttgggtgaaactgttaaggccagactccaacaattctctgtgatgaacaagttcaagaagcatgcacttagggttatagctgagcatctttcggtagaagaggctgctgacataaaggatatgtttgagaagatggatcttaacaaggatcaaatgcttagtttcgaggagctgaagcttggtctgcataagtttggtcaccagatgcctgatgcagatgttcaaacactaatggaagcggcggatgctgatggaaatggatccttgaattatggagaatttgttacattatttgttcatctaagaaagattggaaatgatgagcatctgcataaggcatttgcatacttcgaccggaaccagagtggttatattgaaattgatgaactccgtgagtcattagctgatgaccttggacaaaaccgtgaagagattatcaatgccatcatccgtgatgtagacaccgataaggatggcaagataagctacgatgagtttgcgacgatgatgaaggccggaacagactggaggaaagcatccagacagtactcgagagagcggttcaccagtctgagccttaagctgcaaaaggatggatcgctgcagatgacgagtacacggtagcccgataacaccataggcaagttgtgaattacagatggaaaccatgtgtagatttttctggttgtttgttgacagctcttctgcttgtcctgatgttccattgctttgtattcttcgcttgcggcctgtttgaaggattaggggggattgtttatgctatgattgtatttagactgcatgatccatgcctcgctcgtttccaaagtgtactgtacaaaagaaagaggagaaagggattatgaggctctgctcatttctt

SEQ ID NO: 17454 - protein, 424 aa, Zea mays subsp. mays
  peptide (1)..(424): Ceres Seq. ID no. 12377955
  misc_feature (1)..(207): Pfam Name: Protein kinase domain Pfam Description: Protein kinase domain
  misc_feature (1)..(422): Homolog of NCBI NO: 34907990 NR Description: putative calcium-dependent protein kinase
  misc_feature (1)..(420): Homolog of NCBI NO: 17064926 NR Description: calcium-dependent protein kinase [Arabidopsis
  misc_feature (1)..(420): Homolog of NCBI NO: 22331739 NR Description: calcium-dependent protein kinase
  misc_feature (1)..(419): Homolog of NCBI NO: 15227452 NR Description: putative calcium-dependent protein kinase
  misc_feature (1)..(419): Homolog of NCBI NO: 11259874 NR Description: calcium-dependent protein kinase - Arabidopsis
  misc_feature (1)..(424): Homolog of NCBI NO: 30694663 NR Description: calcium-dependent protein kinase, putative (CDPK)
  misc_feature (1)..(419): Homolog of NCBI NO: 2665890 NR Description: calcium-dependent protein kinase [Fragaria x
  misc_feature (1)..(420): Homolog of NCBI NO: 18416872 NR Description: calcium-dependent protein kinase-like protein
  misc_feature (1)..(420): Homolog of NCBI NO: 15239742 NR Description: calcium-dependent protein kinase
  misc_feature (1)..(424): Homolog of NCBI NO: 34899838 NR Description: putative calcium-dependent protein kinase
MRHLPKHPNVVTLRDTYEDDNAVHLVMELCEGGELFDRIVARGHYTERAAALVLRTIVEVVQMCHKHGVMHRDLKPENFLFANKKESAALKAIDFGLSVFFTPGERFSEIVGSPYYMAPEVLKRNYGPEVDVWSAGVILYILLCGVPPFWAETEQGVAQAIIRSVIDFKRDPWPRVSDNAKDLVRGMLNPDPKRRLTAHQVLGHPWLQNIKKAPNVNLGETVKARLQQFSVMNKFKKHALRVIAEHLSVEEAADIKDMFEKMDLNKDQMLSFEELKLGLHKFGHQMPDADVQTLMEAADADGNGSLNYGEFVTLFVHLRKIGNDEHLHKAFAYFDRNQSGYIEIDELRESLADDLGQNREEIINAIIRDVDTDKDGKISYDEFATMMKAGTDWRKASRQYSRERFTSLSLKLQKDGSLQMTSTR

SEQ ID NO: 17455 - protein, 398 aa, Zea mays subsp. mays
  peptide (1)..(398): Ceres Seq. ID no. 12377956
  misc_feature (1)..(181): Pfam Name: Protein kinase domain Pfam Description: Protein kinase domain
  misc_feature (1)..(396): Homolog of NCBI NO: 34907990 NR Description: putative calcium-dependent protein kinase
  misc_feature (1)..(394): Homolog of NCBI NO: 17064926 NR Description: calcium-dependent protein kinase [Arabidopsis
  misc_feature (1)..(394): Homolog of NCBI NO: 22331739 NR Description: calcium-dependent protein kinase
  misc_feature (1)..(393): Homolog of NCBI NO: 15227452 NR Description: putative calcium-dependent protein kinase
  misc_feature (1)..(393): Homolog of NCBI NO: 11259874 NR Description: calcium-dependent protein kinase - Arabidopsis
  misc_feature (1)..(398): Homolog of NCBI NO: 30694663 NR Description: calcium-dependent protein kinase, putative (CDPK)
  misc_feature (1)..(393): Homolog of NCBI NO: 2665890 NR Description: calcium-dependent protein kinase [Fragaria x
  misc_feature (1)..(394): Homolog of NCBI NO: 18416872 NR Description: calcium-dependent protein kinase-like protein
  misc_feature (1)..(394): Homolog of NCBI NO: 15239742 NR Description: calcium-dependent protein kinase
  misc_feature (1)..(398): Homolog of NCBI NO: 34899838 NR Description: putative calcium-dependent protein kinase
MELCEGGELFDRIVARGHYTERAAALVLRTIVEVVQMCHKHGVMHRDLKPENFLFANKKESAALKAIDFGLSVFFTPGERFSEIVGSPYYMAPEVLKRNYGPEVDVWSAGVILYILLCGVPPFWAETEQGVAQAIIRSVIDFKRDPWPRVSDNAKDLVRGMLNPDPKRRLTAHQVLGHPWLQNIKKAPNVNLGETVKARLQQFSVMNKFKKHALRVIAEHLSVEEAADIKDMFEKMDLNKDQMLSFEELKLGLHKFGHQMPDADVQTLMEAADADGNGSLNYGEFVTLFVHLRKIGNDEHLHKAFAYFDRNQSGYIEIDELRESLADDLGQNREEIINAIIRDVDTDKDGKISYDEFATMMKAGTDWRKASRQYSRERFTSLSLKLQKDGSLQMTSTR

SEQ ID NO: 17456 - protein, 362 aa, Zea mays subsp. mays
  peptide (1)..(362): Ceres Seq. ID no. 12377957
  misc_feature (1)..(145): Pfam Name: Protein kinase domain Pfam Description: Protein kinase domain
  misc_feature (1)..(360): Homolog of NCBI NO: 34907990 NR Description: putative calcium-dependent protein kinase
  misc_feature (1)..(358): Homolog of NCBI NO: 17064926 NR Description: calcium-dependent protein kinase [Arabidopsis
  misc_feature (1)..(358): Homolog of NCBI NO: 22331739 NR Description: calcium-dependent protein kinase
  misc_feature (1)..(357): Homolog of NCBI NO: 15227452 NR Description: putative calcium-dependent protein kinase
  misc_feature (1)..(357): Homolog of NCBI NO: 11259874 NR Description: calcium-dependent protein kinase - Arabidopsis
  misc_feature (1)..(362): Homolog of NCBI NO: 30694663 NR Description: calcium-dependent protein kinase, putative (CDPK)
  misc_feature (1)..(357): Homolog of NCBI NO: 2665890 NR Description: calcium-dependent protein kinase [Fragaria x
  misc_feature (1)..(358): Homolog of NCBI NO: 18416872 NR Description: calcium-dependent protein kinase-like protein
  misc_feature (1)..(358): Homolog of NCBI NO: 15239742 NR Description: calcium-dependent protein kinase
  misc_feature (1)..(362): Homolog of NCBI NO: 34899838 NR Description: putative calcium-dependent protein kinase
MCHKHGVMHRDLKPENFLFANKKESAALKAIDFGLSVFFTPGERFSEIVGSPYYMAPEVLKRNYGPEVDVWSAGVILYILLCGVPPFWAETEQGVAQAIIRSVIDFKRDPWPRVSDNAKDLVRGMLNPDPKRRLTAHQVLGHPWLQNIKKAPNVNLGETVKARLQQFSVMNKFKKHALRVIAEHLSVEEAADIKDMFEKMDLNKDQMLSFEELKLGLHKFGHQMPDADVQTLMEAADADGNGSLNYGEFVTLFVHLRKIGNDEHLHKAFAYFDRNQSGYIEIDELRESLADDLGQNREEIINAIIRDVDTDKDGKISYDEFATMMKAGTDWRKASRQYSRERFTSLSLKLQKDGSLQMTSTR

SEQ ID NO: 17457 - DNA, 2039 bp, Zea mays subsp. mays
  misc_feature (1)..(2039): Ceres Seq. ID no. 12375245
  misc_feature: MA Experiment ID: 108528 Result: Up-regulated in Transcription
  misc_feature: MA Experiment 108528 PARAMETER Experiment Name: Zm_Imbibed_Seeds_P Parameter: Age (day) Value: 5 vs. 2
  misc_feature: MA Experiment 108528 PARAMETER Experiment Name: Zm_Imbibed_Seeds_P Parameter: Organism Value: Zea mays
  misc_feature: MA Experiment 108528 PARAMETER Experiment Name: Zm_Imbibed_Seeds_P Parameter: Plant Line Value: 35A19
  misc_feature: MA Experiment 108528 PARAMETER Experiment Name: Zm_Imbibed_Seeds_P Parameter: Tissue Value: Aerial vs. Embryo
  misc_feature: MA Experiment ID: 108536 Result: Down-regulated in Transcription
  misc_feature: MA Experiment 108536 PARAMETER Experiment Name: Zm_Meristem_P Parameter: Age (day) Value: 8
  misc_feature: MA Experiment 108536 PARAMETER Experiment Name: Zm_Meristem_P Parameter: Organism Value: Zea mays
  misc_feature: MA Experiment 108536 PARAMETER Experiment Name: Zm_Meristem_P Parameter: Plant Line Value: 35A19
  misc_feature: MA Experiment 108536 PARAMETER Experiment Name: Zm_Meristem_P Parameter: Tissue Value: Shoot Meristem vs. Above Shoot Meristem
  misc_feature: MA Experiment ID: 108545 Result: Up-regulated in Transcription
  misc_feature: MA Experiment 108545 PARAMETER Experiment Name: Zm_Imbibed_Seeds_P Parameter: Age (day) Value: 3 vs. 2
  misc_feature: MA Experiment 108545 PARAMETER Experiment Name: Zm_Imbibed_Seeds_P Parameter: Organism Value: Zea mays
  misc_feature: MA Experiment 108545 PARAMETER Experiment Name: Zm_Imbibed_Seeds_P Parameter: Plant Line Value: 35A19
  misc_feature: MA Experiment 108545 PARAMETER Experiment Name: Zm_Imbibed_Seeds_P Parameter: Tissue Value: Aerial vs. Embryo
  misc_feature: MA Experiment ID: 108547 Result: Up-regulated in Transcription
  misc_feature: MA Experiment 108547 PARAMETER Experiment Name: Zm_Imbibed_Seeds_P Parameter: Age (day) Value: 4 vs. 2
  misc_feature: MA Experiment 108547 PARAMETER Experiment Name: Zm_Imbibed_Seeds_P Parameter: Organism Value: Zea mays
  misc_feature: MA Experiment 108547 PARAMETER Experiment Name: Zm_Imbibed_Seeds_P Parameter: Plant Line Value: 35A19
  misc_feature: MA Experiment 108547 PARAMETER Experiment Name: Zm_Imbibed_Seeds_P Parameter: Tissue Value: Aerial vs. Embryo
  misc_feature: MA Experiment ID: 20000478 Result: Down-regulated in Transcription
  misc_feature: MA Experiment 20000478 PARAMETER Experiment Name: Zm_5mM_SA_P Parameter: Age (day) Value: 11
  misc_feature: MA Experiment 20000478 PARAMETER Experiment Name: Zm_5mM_SA_P Parameter: Organism Value: Zea mays
  misc_feature: MA Experiment 20000478 PARAMETER Experiment Name: Zm_5mM_SA_P Parameter: Plant Line Value: 35A19
  misc_feature: MA Experiment 20000478 PARAMETER Experiment Name: Zm_5mM_SA_P Parameter: Timepoint (hr) Value: 72
  misc_feature: MA Experiment 20000478 PARAMETER Experiment Name: Zm_5mM_SA_P Parameter: Tissue Value: Aerial
  misc_feature: MA Experiment 20000478 PARAMETER Experiment Name: Zm_5mM_SA_P Parameter: Treatment Value: 5mM SA vs. No Treatment
  misc_feature: MA Experiment ID: 20000479 Result: Down-regulated in Transcription
  misc_feature: MA Experiment 20000479 PARAMETER Experiment Name: Zm_Drought_P Parameter: Age (day) Value: 10
  misc_feature: MA Experiment 20000479 PARAMETER Experiment Name: Zm_Drought_P Parameter: Organism Value: Zea mays
  misc_feature: MA Experiment 20000479 PARAMETER Experiment Name: Zm_Drought_P Parameter: Plant Line Value: 35A19
  misc_feature: MA Experiment 20000479 PARAMETER Experiment Name: Zm_Drought_P Parameter: Timepoint (hr) Value: 48
  misc_feature: MA Experiment 20000479 PARAMETER Experiment Name: Zm_Drought_P Parameter: Tissue Value: Aerial
  misc_feature: MA Experiment 20000479 PARAMETER Experiment Name: Zm_Drought_P Parameter: Treatment Value: Drought vs. No Drought
  misc_feature: MA Experiment ID: 20000480 Result: Down-regulated in Transcription
  misc_feature: MA Experiment 20000480 PARAMETER Experiment Name: Zm_Drought_P Parameter: Age (day) Value: 11
  misc_feature: MA Experiment 20000480 PARAMETER Experiment Name: Zm_Drought_P Parameter: Organism Value: Zea mays
  misc_feature: MA Experiment 20000480 PARAMETER Experiment Name: Zm_Drought_P Parameter: Plant Line Value: 35A19
  misc_feature: MA Experiment 20000480 PARAMETER Experiment Name: Zm_Drought_P Parameter: Timepoint (hr) Value: 72
  misc_feature: MA Experiment 20000480 PARAMETER Experiment Name: Zm_Drought_P Parameter: Tissue Value: Aerial
  misc_feature: MA Experiment 20000480 PARAMETER Experiment Name: Zm_Drought_P Parameter: Treatment Value: Drought vs. No Drought
gcacgagaccattacctagaacatcctaatcgaaaaaaaaataggaaacgagcaaaggtctggcgagctacctaccaataaactaccatctccacaaacaggctagcacgtagctatatgccagaactgacctagtagaggatcgatcgcagatggtgtttcctgccatcctccccaaggtggccgcacgatggctcttcacgttctaccgcgccgccagaaagctcaggcgccacgccttccagctctactaccgcaacaccgccgccaagccgtcgtccgccgtctcgcagcagcaggccggggccgccgccactgtcactgccgccgccgccttcaagaccggcgccgccatccctgacgccggcggccggaccgttgtgtgcgacatgcacggcgccctgctgcgctccaccgcgctcttcccctacttcatgctcgtggcctgcgagggcggcagcctcgtccgcgccatgctgctgctctgcgccttccccctcgtctgggcgctcggggagcgccgcggcgccggcgtccgggtgatggcgttcgtcaccttcgcggggctcaggcccagggacgtggacctcgtggcccgcgccgtcctgcccaagcactacatggagcagctcagcgcgctggcgtacggcagcctctggctcccggccaggaggaaggtggcggtgaccagcgcgccgcgggtcatgtccgagtggttcctcaaggagtacatggccgccgacgcggtggtcgggctcgagctgcagcacgtcaacgtcggccgccgccggtacttcactgggttgctgctgtcgtccggtcacgcgacgggaacggagctgaggcagaaggcgatcacggaggcgttgttaggcgccgaggacgaccccattgccgtcgtgggcatcatcagcgactccagcccgctcgacgacgagctcttcgtcccctactgcaaggaactttacgtcgtgagcagagagagcgcaaagaacgacaagctctcgcgggagaaatacccaaagccgctcatcttccacgacgggcgcctcgccttcctccccacccccgccgccatgctcgccttcttcctcttccttccgctcggcgtcgtcctctccgtcatccgcattaacatcggtatcgttctcccttacaagatcaacttcgcgacagccgcgatcttcggcgtccgcttccgcgcctccggcctccgcgccccgccggcagacggcgagcggcggaggggcgtcctctacgtgtgcacgcaccggacgcttgtcgaccccatcatgctcaccacggcgctgcagaagcccgtgccggccttgacgtacagcctcagccgcctgtccgagctgatcgcgcccatcaagacggtgcggctgacgcgcgaccgcgcgcgggacgccgagaccatgtccaggctgctggcgcagggcgacctcgcggtctgccccgagggaaccacctgccgcgagccttacctcctgccttcagcccgctgttcgcggagctcgcggacgacatggagcccgtggcgctggacgctcaggtgacgacgctctacggcaccacggcgagcggacacaagtggctcgaccctgtggcgttcttcgccaacccggtgccctcgtaccgggtggagtttctgggtgccgtcccgcgggagtggacgcgcgccgggggcaggacaggcgtcgaggtggctaactgggtgcagcggcggctgggccaggctctggacttcgagtgcaccgggctgactcgccgcgacaagtacatgatgctcgccggtaacgatggcgtggtcgccaagtagagagagcgcccggcgcgcgctgcaacagctgggtgtgtttttattatgcatacatgctgagtaaattattgtcgaaagctagttactgtaatttgcatggcagtaatggatcttttggttccgctgtgtagagaaattttgattagctgcaaaactaatcaaatactagatgcttggatttaaattcaaatcaaaatagtatatatatattttgtct

SEQ ID NO: 17458 - protein, 468 aa, Zea mays subsp. mays
  peptide (1)..(468): Ceres Seq. ID no. 12375246
  misc_feature (70)..(447): Homolog of NCBI NO: 15235185 NR Description: unknown protein
  misc_feature (97)..(447): Homolog of NCBI NO: 29788867 NR Description: hypothetical protein [Oryza sativa (japonica
  misc_feature (68)..(447): Homolog of NCBI NO: 15224445 NR Description: unknown protein
  misc_feature (73)..(447): Homolog of NCBI NO: 34902820 NR Description: unnamed protein product [Oryza sativa (japonica
  misc_feature (75)..(447): Homolog of NCBI NO: 18481713 NR Description: hypothetical protein [Sorghum bicolor]
  misc_feature (70)..(447): Homolog of NCBI NO: 18378959 NR Description: expressed protein
  misc_feature (70)..(447): Homolog of NCBI NO: 38000002 NR Description: unknown protein [Oryza sativa (japonica
  misc_feature (49)..(447): Homolog of NCBI NO: 37534314 NR Description: hypothetical protein [Oryza sativa (japonica
  misc_feature (75)..(447): Homolog of NCBI NO: 18390661 NR Description: expressed protein
  misc_feature (75)..(447): Homolog of NCBI NO: 21618047 NR Description: unknown [Arabidopsis thaliana]
MVFPAILPKVAARWLFTFYRAARKLRRHAFQLYYRNTAAKPSSAVSQQQAGAAATVTAAAAFKTGAAIPDAGGRTVVCDMHGALLRSTALFPYFMLVACEGGSLVRAMLLLCAFPLVWALGERRGAGVRVMAFVTFAGLRPRDVDLVARAVLPKHYMEQLSALAYGSLWLPARRKVAVTSAPRVMSEWFLKEYMAADAVVGLELQHVNVGRRRYFTGLLLSSGHATGTELRQKAITEALLGAEDDPIAVVGIISDSSPLDDELFVPYCKELYVVSRESAKNDKLSREKYPKPLIFHDGRLAFLPTPAAMLAFFLFLPLGVVLSVIRINIGIVLPYKINFATAAIFGVRFRASGLRAPPADGERRRGVLYVCTHRTLVDPIMLTTALQKPVPALTYSLSRLSELIAPIKTVRLTRDRARDAETMSRLLAQGDLAVCPEGTTCREPYLLPSARCSRSSRTTWSPWRWTLR

SEQ ID NO: 17459 - protein, 389 aa, Zea mays subsp. mays
  peptide (1)..(389): Ceres Seq. ID no. 12375247
  misc_feature (18)..(368): Homolog of NCBI NO: 29788867 NR Description: hypothetical protein [Oryza sativa (japonica
  misc_feature (1)..(368): Homolog of NCBI NO: 15224445 NR Description: unknown protein
  misc_feature (1)..(368): Homolog of NCBI NO: 34902820 NR Description: unnamed protein product [Oryza sativa (japonica
  misc_feature (1)..(368): Homolog of NCBI NO: 18481713 NR Description: hypothetical protein [Sorghum bicolor]
  misc_feature (1)..(368): Homolog of NCBI NO: 18378959 NR Description: expressed protein
  misc_feature (1)..(368): Homolog of NCBI NO: 38000002 NR Description: unknown protein [Oryza sativa (japonica
  misc_feature (1)..(368): Homolog of NCBI NO: 37534314 NR Description: hypothetical protein [Oryza sativa (japonica
  misc_feature (1)..(368): Homolog of NCBI NO: 18390661 NR Description: expressed protein
  misc_feature (1)..(368): Homolog of NCBI NO: 21618047 NR Description: unknown [Arabidopsis thaliana]
  misc_feature (1)..(368): Homolog of NCBI NO: 15235185 NR Description: unknown protein
MHGALLRSTALFPYFMLVACEGGSLVRAMLLLCAFPLVWALGERRGAGVRVMAFVTFAGLRPRDVDLVARAVLPKHYMEQLSALAYGSLWLPARRKVAVTSAPRVMSEWFLKEYMAADAVVGLELQHVNVGRRRYFTGLLLSSGHATGTELRQKAITEALLGAEDDPIAVVGIISDSSPLDDELFVPYCKELYVVSRESAKNDKLSREKYPKPLIFHDGRLAFLPTPAAMLAFFLFLPLGVVLSVIRINIGIVLPYKINFATAAIFGVRFRASGLRAPPADGERRRGVLYVCTHRTLVDPIMLTTALQKPVPALTYSLSRLSELIAPIKTVRLTRDRARDAETMSRLLAQGDLAVCPEGTTCREPYLLPSARCSRSSRTTWSPWRWTLR

SEQ ID NO: 17460 - protein, 374 aa, Zea mays subsp. mays
  peptide (1)..(374): Ceres Seq. ID no. 12375248
  misc_feature (1)..(353): Homolog of NCBI NO: 15235185 NR Description: unknown protein
  misc_feature (3)..(353): Homolog of NCBI NO: 29788867 NR Description: hypothetical protein [Oryza sativa (japonica
  misc_feature (1)..(353): Homolog of NCBI NO: 15224445 NR Description: unknown protein
  misc_feature (1)..(353): Homolog of NCBI NO: 34902820 NR Description: unnamed protein product [Oryza sativa (japonica
  misc_feature (1)..(353): Homolog of NCBI NO: 18481713 NR Description: hypothetical protein [Sorghum bicolor]
  misc_feature (1)..(353): Homolog of NCBI NO: 18378959 NR Description: expressed protein
  misc_feature (1)..(353): Homolog of NCBI NO: 38000002 NR Description: unknown protein [Oryza sativa (japonica
  misc_feature (1)..(353): Homolog of NCBI NO: 37534314 NR Description: hypothetical protein [Oryza sativa (japonica
  misc_feature (1)..(353): Homolog of NCBI NO: 18390661 NR Description: expressed protein
  misc_feature (1)..(353): Homolog of NCBI NO: 21618047 NR Description: unknown [Arabidopsis thaliana]
MLVACEGGSLVRAMLLLCAFPLVWALGERRGAGVRVMAFVTFAGLRPRDVDLVARAVLPKHYMEQLSALAYGSLWLPARRKVAVTSAPRVMSEWFLKEYMAADAVVGLELQHVNVGRRRYFTGLLLSSGHATGTELRQKAITEALLGAEDDPIAVVGIISDSSPLDDELFVPYCKELYVVSRESAKNDKLSREKYPKPLIFHDGRLAFLPTPAAMLAFFLFLPLGVVLSVIRINIGIVLPYKINFATAAIFGVRFRASGLRAPPADGERRRGVLYVCTHRTLVDPIMLTTALQKPVPALTYSLSRLSELIAPIKTVRLTRDRARDAETMSRLLAQGDLAVCPEGTTCREPYLLPSARCSRSSRTTWSPWRWTLR

SEQ ID NO: 17461 - DNA, 2124 bp, Zea mays subsp. mays
  misc_feature (1)..(2124): Ceres Seq. ID no. 12417416
  misc_feature: MA Experiment ID: 108543 Result: Down-regulated in Transcription
  misc_feature: MA Experiment ID: 20000487 Result: Up-regulated in Transcription
  misc_feature: MA Experiment 20000487 PARAMETER Experiment Name: Zm_50mM_NH4NO3_L_to_H_P Parameter: Organism Value: Zea mays
  misc_feature: MA Experiment 20000487 PARAMETER Experiment Name: Zm_50mM_NH4NO3_L_to_H_P Parameter: Timepoint (hr) Value: 4
  misc_feature: MA Experiment 20000487 PARAMETER Experiment Name: Zm_50mM_NH4NO3_L_to_H_P Parameter: Tissue Value: Leaves
  misc_feature: MA Experiment 20000487 PARAMETER Experiment Name: Zm_50mM_NH4NO3_L_to_H_P Parameter: Treatment Value: 50mM NH4NO3 vs. 100mM Mannitol
atccaacgacccacactgagacgtcccctccccgctccgtcctctctcctctgccgccgagacgacgcgatggcggggtccgccgccttgccgccgctcgccgccttcgcgtcgctccttaccgcgcggcgcttcgccgccgccaggtccaagctccggtccctgctcacgccgcgcctactggcggtgccgttcgcggacctcgccgcctcgtcgctcccgcgcggcgcgccgccgcacgccgtggcggcgttccacgacatgctcttccgcgcgtacgcggacgcgggcgcggcgtgccgcgcggccgaggcgctcgacgccgccgtgtcccgcctcggcagcctcgacccgcgctcgctcacgttctcgctgctctcgctccgccgcgccgggcgcctcgcggacgccgcgggcctcctggagcgggcgctcggctcgtgcccgggctccgtctcgccgttcgccgcgtccgtcgtcgtcgacgggctctgcaagtcggggcgcgtggacgacgcgcgccggctgctcgacgatatgcctcgccacggcgtgagtctgaatgcgctgtgctacaactcgctgcttgactgttacgtgcgacaaaaggatgacgggcgggtccaggagattctagagatcatggagaacgaaggcatcgaggcgacggtcgggacgtatacgatccttgtggatagtttgtcgaccgccagggacatcagcaaggtcgaggctctgtttaatgagatgaaggcgaataatgttgtgggggatgtgtacctgtacaccgctgtcatcaacgcgtattgccgagcagggaacatgcggagggccgccaaggttttggatgaatgcgttggcaatggcgttgagccaaacgagcgtacatatggtgtattgatcaaagggttctgcaagattgggcagatggaggctgcagagatgttgctggcagacatgcaagggcaaggtgtagggcttaaccaaatcattttcaataccatgattgatggctattgtcgcaaagggatggtggacgatgctcttaaaataaaggcggccatggagaaaattggcgtcgaactgaacatctacacatacaacacactggcctgtggactgtgcagggtgaatagattggatgaggcaaagactctattgcacatcatgatcgagatgggtgtcgtgccaaattacgtcacttacactacactgatcagcatacactgcaaggatggcgacatggtggaggctagaaggctgttccgagaaatggcagagaaaggggcgacgcccagtgttgtgacctacagtgttatgattcatgggtacgccaagaaggggaggatccgtgaggctgagaggttcagaaagcagatggagaagaaagggtttgttccagatgtatacacctatgcatcgctagttcatgggcactgtgtcaatgggaaggtggatgtggcgctgaagctattcgaagagatgaagcagaggggaacggaacctaatgtcgtggcctatacggctctgatatcaggtctggcgaaggaagggagatcagaggcggcgttccagctgtatgatgatatgctgaaagctggattgatcccagatgactccctatattctgcccttgtaggaagccttcacacagataaccggaaagatgttaaggtttcttaggcagcttcgcttttaagggaaagcaacctaagtttttgtaagttaccctgtagcaactgaagaggtcggaagtccagaattaactccataatgttattcagtttacaaggtgggatggagtactagactgttgcatttcagttaaatgacataaggagatctcagctagctgtgatgaagcagcaaagttgcagaaatgattacatgctgacgtgcaatattacatggccacctccagattccaattcctcattgggtaacaaattttatttttgttttaagcatgtttagaacactggaacaagaggaggctgtgcagattttatttcaagattaagtttgtaatagtagtattagtagtcatggaattgttacaaaacaagcagttcttgtacattactcttgaaattgctcactgttatagagatatttgcacttggc

SEQ ID NO: 17462 - protein, 560 aa, Zea mays subsp. mays
  peptide (1)..(560): Ceres Seq. ID no. 12417417
  misc_feature (470)..(504): Pfam Name: PPR repeat Pfam Description: PPR repeat
  misc_feature (42)..(556): Homolog of NCBI NO: 34902570 NR Description: Putative indole-3-acetate
  misc_feature (130)..(549): Homolog of NCBI NO: 15218325 NR Description: hypothetical protein; protein id: At1g09900.1
  misc_feature (141)..(548): Homolog of NCBI NO: 15242446 NR Description: putative protein; protein id: At5g39710.1
  misc_feature (2)..(556): Homolog of NCBI NO: 34394343 NR Description: putative fertility restorer homologue
  misc_feature (80)..(546): Homolog of NCBI NO: 15242446 NR Description: putative protein; protein id: At5g39710.1
  misc_feature (86)..(560): Homolog of NCBI NO: 15242446 NR Description: putative protein; protein id: At5g39710.1
  misc_feature (86)..(546): Homolog of NCBI NO: 15228763 NR Description: hypothetical protein; protein id: At3g22470.1
  misc_feature (86)..(546): Homolog of NCBI NO: 11994279 NR Description: gb|AAD43616.1~gene_id:F16J14.3~strong similarity
  misc_feature (39)..(551): Homolog of NCBI NO: 15225722 NR Description: putative salt-inducible protein; protein id:
  misc_feature (23)..(558): Homolog of NCBI NO: 22831126 NR Description: putative crp1(chloroplast RNA processing 1)
IQRPTLRRPLPAPSSLLCRRDDAMAGSAALPPLAAFASLLTARRFAAARSKLRSLLTPRLLAVPFADLAASSLPRGAPPHAVAAFHDMLFRAYADAGAACRAAEALDAAVSRLGSLDPRSLTFSLLSLRRAGRLADAAGLLERALGSCPGSVSPFAASVVVDGLCKSGRVDDARRLLDDMPRHGVSLNALCYNSLLDCYVRQKDDGRVQEILEIMENEGIEATVGTYTILVDSLSTARDISKVEALFNEMKANNVVGDVYLYTAVINAYCRAGNMRRAAKVLDECVGNGVEPNERTYGVLIKGFCKIGQMEAAEMLLADMQGQGVGLNQIIFNTMIDGYCRKGMVDDALKIKAAMEKIGVELNIYTYNTLACGLCRVNRLDEAKTLLHIMIEMGVVPNYVTYTTLISIHCKDGDMVEARRLFREMAEKGATPSVVTYSVMIHGYAKKGRIREAERFRKQMEKKGFVPDVYTYASLVHGHCVNGKVDVALKLFEEMKQRGTEPNVVAYTALISGLAKEGRSEAAFQLYDDMLKAGLIPDDSLYSALVGSLHTDNRKDVKVS

SEQ ID NO: 17463 - protein, 537 aa, Zea mays subsp. mays
  peptide (1)..(537): Ceres Seq. ID no. 12417418
  misc_feature (447)..(481): Pfam Name: PPR repeat Pfam Description: PPR repeat
  misc_feature (19)..(533): Homolog of NCBI NO: 34902570 NR Description: Putative indole-3-acetate
  misc_feature (107)..(526): Homolog of NCBI NO: 15218325 NR Description: hypothetical protein; protein id: At1g09900.1
  misc_feature (118)..(525): Homolog of NCBI NO: 15242446 NR Description: putative protein; protein id: At5g39710.1
  misc_feature (1)..(533): Homolog of NCBI NO: 34394343 NR Description: putative fertility restorer homologue
  misc_feature (57)..(523): Homolog of NCBI NO: 15242446 NR Description: putative protein; protein id: At5g39710.1
  misc_feature (63)..(537): Homolog of NCBI NO: 15242446 NR Description: putative protein; protein id: At5g39710.1
  misc_feature (63)..(523): Homolog of NCBI NO: 15228763 NR Description: hypothetical protein; protein id: At3g22470.1
  misc_feature (63)..(523): Homolog of NCBI NO: 11994279 NR Description: gb|AAD43616.1~gene_id:F16J14.3~strong similarity
  misc_feature (16)..(528): Homolog of NCBI NO: 15225722 NR Description: putative salt-inducible protein; protein id:
  misc_feature (1)..(535): Homolog of NCBI NO: 22831126 NR Description: putative crp1(chloroplast RNA processing 1)
MAGSAALPPLAAFASLLTARRFAAARSKLRSLLTPRLLAVPFADLAASSLPRGAPPHAVAAFHDMLFRAYADAGAACRAAEALDAAVSRLGSLDPRSLTFSLLSLRRAGRLADAAGLLERALGSCPGSVSPFAASVVVDGLCKSGRVDDARRLLDDMPRHGVSLNALCYNSLLDCYVRQKDDGRVQEILEIMENEGIEATVGTYTILVDSLSTARDISKVEALFNEMKANNVVGDVYLYTAVINAYCRAGNMRRAAKVLDECVGNGVEPNERTYGVLIKGFCKIGQMEAAEMLLADMQGQGVGLNQIIFNTMIDGYCRKGMVDDALKIKAAMEKIGVELNIYTYNTLACGLCRVNRLDEAKTLLHIMIEMGVVPNYVTYTTLISIHCKDGDMVEARRLFREMAEKGATPSVVTYSVMIHGYAKKGRIREAERFRKQMEKKGFVPDVYTYASLVHGHCVNGKVDVALKLFEEMKQRGTEPNVVAYTALISGLAKEGRSEAAFQLYDDMLKAGLIPDDSLYSALVGSLHTDNRKDVKVS

SEQ ID NO: 17464 - protein, 473 aa, Zea mays subsp. mays
  peptide (1)..(473): Ceres Seq. ID no. 12417419
  misc_feature (383)..(417): Pfam Name: PPR repeat Pfam Description: PPR repeat
  misc_feature (1)..(469): Homolog of NCBI NO: 34902570 NR Description: Putative indole-3-acetate
  misc_feature (43)..(462): Homolog of NCBI NO: 15218325 NR Description: hypothetical protein; protein id: At1g09900.1
  misc_feature (54)..(461): Homolog of NCBI NO: 15242446 NR Description: putative protein; protein id: At5g39710.1
  misc_feature (1)..(469): Homolog of NCBI NO: 34394343 NR Description: putative fertility restorer homologue
  misc_feature (1)..(459): Homolog of NCBI NO: 15242446 NR Description: putative protein; protein id: At5g39710.1
  misc_feature (1)..(473): Homolog of NCBI NO: 15242446 NR Description: putative protein; protein id: At5g39710.1
  misc_feature (1)..(459): Homolog of NCBI NO: 15228763 NR Description: hypothetical protein; protein id: At3g22470.1
  misc_feature (1)..(459): Homolog of NCBI NO: 11994279 NR Description: gb|AAD43616.1~gene_id:F16J14.3~strong similarity
  misc_feature (1)..(464): Homolog of NCBI NO: 15225722 NR Description: putative salt-inducible protein; protein id:
  misc_feature (1)..(471): Homolog of NCBI NO: 22831126 NR Description: putative crp1(chloroplast RNA processing 1)
MLFRAYADAGAACRAAEALDAAVSRLGSLDPRSLTFSLLSLRRAGRLADAAGLLERALGSCPGSVSPFAASVVVDGLCKSGRVDDARRLLDDMPRHGVSLNALCYNSLLDCYVRQKDDGRVQEILEIMENEGIEATVGTYTILVDSLSTARDISKVEALFNEMKANNVVGDVYLYTAVINAYCRAGNMRRAAKVLDECVGNGVEPNERTYGVLIKGFCKIGQMEAAEMLLADMQGQGVGLNQIIFNTMIDGYCRKGMVDDALKIKAAMEKIGVELNIYTYNTLACGLCRVNRLDEAKTLLHIMIEMGVVPNYVTYTTLISIHCKDGDMVEARRLFREMAEKGATPSVVTYSVMIHGYAKKGRIREAERFRKQMEKKGFVPDVYTYASLVHGHCVNGKVDVALKLFEEMKQRGTEPNVVAYTALISGLAKEGRSEAAFQLYDDMLKAGLIPDDSLYSALVGSLHTDNRKDVKVS

SEQ ID NO: 17465 - DNA, 2085 bp, Zea mays subsp. mays
  misc_feature (1)..(2085): Ceres Seq. ID no. 12382290
  misc_feature: MA Experiment ID: 108504 Result: Down-regulated in Transcription
  misc_feature: MA Experiment 108504 PARAMETER Experiment Name: Zm_Drought_P Parameter: Age (day) Value: 8
  misc_feature: MA Experiment 108504 PARAMETER Experiment Name: Zm_Drought_P Parameter: Organism Value: Zea mays
  misc_feature: MA Experiment 108504 PARAMETER Experiment Name: Zm_Drought_P Parameter: Plant Line Value: 35A19
  misc_feature: MA Experiment 108504 PARAMETER Experiment Name: Zm_Drought_P Parameter: Timepoint (hr) Value: 12
  misc_feature: MA Experiment 108504 PARAMETER Experiment Name: Zm_Drought_P Parameter: Tissue Value: Aerial
  misc_feature: MA Experiment 108504 PARAMETER Experiment Name: Zm_Drought_P Parameter: Treatment Value: Drought vs. No Drought
  misc_feature: MA Experiment ID: 108544 Result: Down-regulated in Transcription
  misc_feature: MA Experiment ID: 108556 Result: Down-regulated in Transcription
  misc_feature: MA Experiment 108556 PARAMETER Experiment Name: Zm_Drought_P Parameter: Age (day) Value: 9
  misc_feature: MA Experiment 108556 PARAMETER Experiment Name: Zm_Drought_P Parameter: Organism Value: Zea mays
  misc_feature: MA Experiment 108556 PARAMETER Experiment Name: Zm_Drought_P Parameter: Plant Line Value: 35A19
  misc_feature: MA Experiment 108556 PARAMETER Experiment Name: Zm_Drought_P Parameter: Timepoint (hr) Value: 24
  misc_feature: MA Experiment 108556 PARAMETER Experiment Name: Zm_Drought_P Parameter: Tissue Value: Aerial
  misc_feature: MA Experiment 108556 PARAMETER Experiment Name: Zm_Drought_P Parameter: Treatment Value: Drought vs. No Drought
  misc_feature: MA Experiment ID: 108689 Result: Down-regulated in Transcription
  misc_feature: MA Experiment 108689 PARAMETER Experiment Name: Zm_Drought_Roots_P Parameter: Age (day) Value: 9
  misc_feature: MA Experiment 108689 PARAMETER Experiment Name: Zm_Drought_Roots_P Parameter: Organism Value: Zea mays
  misc_feature: MA Experiment 108689 PARAMETER Experiment Name: Zm_Drought_Roots_P Parameter: Plant Line Value: 35A19
  misc_feature: MA Experiment 108689 PARAMETER Experiment Name: Zm_Drought_Roots_P Parameter: Timepoint (hr) Value: 24
  misc_feature: MA Experiment 108689 PARAMETER Experiment Name: Zm_Drought_Roots_P Parameter: Tissue Value: Roots
  misc_feature: MA Experiment 108689 PARAMETER Experiment Name: Zm_Drought_Roots_P Parameter: Treatment Value: Drought vs. No Drought
  misc_feature: MA Experiment ID: 20000478 Result: Down-regulated in Transcription
  misc_feature: MA Experiment 20000478 PARAMETER Experiment Name: Zm_5mM_SA_P Parameter: Age (day) Value: 11
  misc_feature: MA Experiment 20000478 PARAMETER Experiment Name: Zm_5mM_SA_P Parameter: Organism Value: Zea mays
  misc_feature: MA Experiment 20000478 PARAMETER Experiment Name: Zm_5mM_SA_P Parameter: Plant Line Value: 35A19
  misc_feature: MA Experiment 20000478 PARAMETER Experiment Name: Zm_5mM_SA_P Parameter: Timepoint (hr) Value: 72
  misc_feature: MA Experiment 20000478 PARAMETER Experiment Name: Zm_5mM_SA_P Parameter: Tissue Value: Aerial
  misc_feature: MA Experiment 20000478 PARAMETER Experiment Name: Zm_5mM_SA_P Parameter: Treatment Value: 5mM SA vs. No Treatment
  misc_feature: MA Experiment ID: 20000480 Result: Down-regulated in Transcription
  misc_feature: MA Experiment 20000480 PARAMETER Experiment Name: Zm_Drought_P Parameter: Age (day) Value: 11
  misc_feature: MA Experiment 20000480 PARAMETER Experiment Name: Zm_Drought_P Parameter: Organism Value: Zea mays
  misc_feature: MA Experiment 20000480 PARAMETER Experiment Name: Zm_Drought_P Parameter: Plant Line Value: 35A19
  misc_feature: MA Experiment 20000480 PARAMETER Experiment Name: Zm_Drought_P Parameter: Timepoint (hr) Value: 72
  misc_feature: MA Experiment 20000480 PARAMETER Experiment Name: Zm_Drought_P Parameter: Tissue Value: Aerial
  misc_feature: MA Experiment 20000480 PARAMETER Experiment Name: Zm_Drought_P Parameter: Treatment Value: Drought vs. No Drought
gcacgagaccattacctagaacatcctaatcgaaatatcctccctccatcagttctcgtcctgttctttgctacgtacggctctgtgcctagctagcaatagcatagcaatgagggcgcttggaacggttgcttgggcatggctgctgctcctgcagcagctcgccggggcctctcatgtcgtctacgagaaccttgaggtggaggcgacgacagccgccgtgcggccctccattgtcgaccccctgctgaggaccgggtaccatttccagcctcgcaagaactggatcaatgatcccaacgctccactgtactacaaggggtggtaccatctcttctaccaatacaacccgaagggcgcggtgtggggcaacatcgtgtggggccactcggtgtcgcgagacctgatcaactgggtggccctgcaaccggcgatcgagccgagcatcccgtccgacaggtacgggtgctggtctgggtcggcgacgacgctggccgacggcacgccggcgatcatgtacacgggcgtgaaccggccggacgtgaactaccaggtgcagaacgtggcgtacccgcggaacaggtcggacccgctgctgcgggagtgggtgaagccgtcgcacaaccccatcatcgtgcccgggggcggcatcaacgcgacgcagttccgggacccgaccacggcctggcgcggcgcgggagacggccgctggcgcctgctcatcggcagcgtcaccgaggcgcgccacggcgtggcgtacgtgtaccggagccgcgacttcaggcgctggacgcgggcgcggcggccgctccactcggcggccacggggatgtgggagtgccccgacttctacccggtcggcgcgcccggccggcgcgcgggcgtcgagacggagacgtcggcggcgtccgacggcgacggcggctctcctcgtcgtcgtgagcagtccaagtacgtgctgaagaacagcctcgacctgcggcggtacgactactacaccgtcggcacgtacgaccgggcggccgagcggtacgtgccggacgaccccgcgggagacgagcgccacctgcggtacgactacggcaacttctacgcgtccaagacgttcttcgaccccgtgaagcggcggcgggtgctctggggctgggccaacgagtccgacaccgccgcngacgacgtggccaaagggtgggctgggatccaggcgattcctangacggtgtggctagaccccagcgggaagcagctgctgcagtggccaatcgaggaggtggaggctctgagaggcaggtcggtcgctctcaagaacagggtgatcaagccaggacagcacgtcgaggtcaccgggatacaaacggcacaggccgacgtggaggtgagcttcgaggtgtcgagcctggcgggcgccgaggcgctgctggacccggcgctggccagcgacgcgcagcggctgtgcggcgccaggggcgcggccgtggagggcggcgtgggcccgttcgggctgtgggtgctcgcctccggcgaccgcgaggagaggaccgccgtgttcttcagggtgtttcgcggcggcggcggccacgacgacaagcccgtggtgctcatgtgcaccgaccccaccaagtcatctctggacgcgaacctgtaccagccgacgttcgcaggttttgtcgacacagacatttcgaacgggaagatatctctcagaactctgatcgaccggtcggtggtggagagctttggaggcgggggcaggacctgcatcctgtcgagggtgtacccgtcgctcgccatcggcagcaaggctcgcctctacgtgttcaacaacgggagggcggacgtcagggtgtcccgtctcaccgcgtgggagatgaagaagccactcatgaacggcgcttgaaatgtttttattgcgtgatatggaatggtgctcgcctttgtacaatatggtatggctagatacatatatatgagagcttccacgctcggtcgtcgtgtggaaaaaacctatgatgagtgtgtacgatcttagggatgttcgattcagatgccactaggggcaataactatattctaattcatgatttc

SEQ ID NO: 17466 - protein, 595 aa, Zea mays subsp. mays
  peptide (1)..(595): Ceres Seq. ID no. 12382291
  misc_feature (52)..(547): Pfam Name: Glycosyl hydrolases family 32 Pfam Description: Glycosyl hydrolases family 32
  misc_feature (1)..(593): Homolog of NCBI NO: 4105123 NR Description: cell wall invertase; Incw3;
  misc_feature (11)..(595): Homolog of NCBI NO: 27802647 NR Description: cell wall invertase [Musa acuminata]
  misc_feature (2)..(595): Homolog of NCBI NO: 1352469 NR Description: BETA-FRUCTOFURANOSIDASE, CELL WALL ISOZYME
  misc_feature (12)..(595): Homolog of NCBI NO: 4105721 NR Description: cell wall invertase Incw1; beta-fructosidase [Zea
  misc_feature (45)..(595): Homolog of NCBI NO: 26986190 NR Description: apoplastic invertase 1 [Hordeum vulgare subsp.
  misc_feature (10)..(595): Homolog of NCBI NO: 6318663 NR Description: cell wall invertase [Zea mays]
  misc_feature (1)..(595): Homolog of NCBI NO: 6318661 NR Description: cell wall invertase 2 [Zea mays]
  misc_feature (1)..(595): Homolog of NCBI NO: 6318659 NR Description: cell wall invertase 2 [Zea mays]
  misc_feature (1)..(595): Homolog of NCBI NO: 7435479 NR Description: beta-fructofuranosidase (EC 3.2.1.26) INCW2 -
  misc_feature (1)..(595): Homolog of NCBI NO: 4105719 NR Description: cell wall invertase Incw2; beta-fructosidase [Zea
  misc_feature (354)..(354): Xaa is any aa, unknown or other
  misc_feature (369)..(369): Xaa is any aa, unknown or other
MRALGTVAWAWLLLLQQLAGASHVVYENLEVEATTAAVRPSIVDPLLRTGYHFQPRKNWINDPNAPLYYKGWYHLFYQYNPKGAVWGNIVWGHSVSRDLINWVALQPAIEPSIPSDRYGCWSGSATTLADGTPAIMYTGVNRPDVNYQVQNVAYPRNRSDPLLREWVKPSHNPIIVPGGGINATQFRDPTTAWRGAGDGRWRLLIGSVTEARHGVAYVYRSRDFRRWTRARRPLHSAATGMWECPDFYPVGAPGRRAGVETETSAASDGDGGSPRRREQSKYVLKNSLDLRRYDYYTVGTYDRAAERYVPDDPAGDERHLRYDYGNFYASKTFFDPVKRRRVLWGWANESDTAXDDVAKGWAGIQAIPXTVWLDPSGKQLLQWPIEEVEALRGRSVALKNRVIKPGQHVEVTGIQTAQADVEVSFEVSSLAGAEALLDPALASDAQRLCGARGAAVEGGVGPFGLWVLASGDREERTAVFFRVFRGGGGHDDKPVVLMCTDPTKSSLDANLYQPTFAGFVDTDISNGKISLRTLIDRSVVESFGGGGRTCILSRVYPSLAIGSKARLYVFNNGRADVRVSRLTAWEMKKPLMNGA

SEQ ID NO: 17467 - protein, 460 aa, Zea mays subsp. mays
  peptide (1)..(460): Ceres Seq. ID no. 12382292
  misc_feature (1)..(412): Pfam Name: Glycosyl hydrolases family 32 Pfam Description: Glycosyl hydrolases family 32
  misc_feature (1)..(458): Homolog of NCBI NO: 4105123 NR Description: cell wall invertase; Incw3;
  misc_feature (1)..(460): Homolog of NCBI NO: 27802647 NR Description: cell wall invertase [Musa acuminata]
  misc_feature (1)..(460): Homolog of NCBI NO: 1352469 NR Description: BETA-FRUCTOFURANOSIDASE, CELL WALL ISOZYME
  misc_feature (1)..(460): Homolog of NCBI NO: 4105721 NR Description: cell wall invertase Incw1; beta-fructosidase [Zea
  misc_feature (1)..(460): Homolog of NCBI NO: 26986190 NR Description: apoplastic invertase 1 [Hordeum vulgare subsp.
  misc_feature (1)..(460): Homolog of NCBI NO: 6318663 NR Description: cell wall invertase [Zea mays]
  misc_feature (1)..(460): Homolog of NCBI NO: 6318661 NR Description: cell wall invertase 2 [Zea mays]
  misc_feature (1)..(460): Homolog of NCBI NO: 6318659 NR Description: cell wall invertase 2 [Zea mays]
  misc_feature (1)..(460): Homolog of NCBI NO: 7435479 NR Description: beta-fructofuranosidase (EC 3.2.1.26) INCW2 -
  misc_feature (1)..(460): Homolog of NCBI NO: 4105719 NR Description: cell wall invertase Incw2; beta-fructosidase [Zea
  misc_feature (219)..(219): Xaa is any aa, unknown or other
  misc_feature (234)..(234): Xaa is any aa, unknown or other
MYTGVNRPDVNYQVQNVAYPRNRSDPLLREWVKPSHNPIIVPGGGINATQFRDPTTAWRGAGDGRWRLLIGSVTEARHGVAYVYRSRDFRRWTRARRPLHSAATGMWECPDFYPVGAPGRRAGVETETSAASDGDGGSPRRREQSKYVLKNSLDLRRYDYYTVGTYDRAAERYVPDDPAGDERHLRYDYGNFYASKTFFDPVKRRRVLWGWANESDTAXDDVAKGWAGIQAIPXTVWLDPSGKQLLQWPIEEVEALRGRSVALKNRVIKPGQHVEVTGIQTAQADVEVSFEVSSLAGAEALLDPALASDAQRLCGARGAAVEGGVGPFGLWVLASGDREERTAVFFRVFRGGGGHDDKPVVLMCTDPTKSSLDANLYQPTFAGFVDTDISNGKISLRTLIDRSVVESFGGGGRTCILSRVYPSLAIGSKARLYVFNNGRADVRVSRLTAWEMKKPLMNGA

SEQ ID NO: 17468 - protein, 355 aa, Zea mays subsp. mays
  peptide (1)..(355): Ceres Seq. ID no. 12382293
  misc_feature (1)..(307): Pfam Name: Glycosyl hydrolases family 32 Pfam Description: Glycosyl hydrolases family 32
  misc_feature (1)..(353): Homolog of NCBI NO: 4105123 NR Description: cell wall invertase; Incw3;
  misc_feature (1)..(355): Homolog of NCBI NO: 27802647 NR Description: cell wall invertase [Musa acuminata]
  misc_feature (1)..(355): Homolog of NCBI NO: 1352469 NR Description: BETA-FRUCTOFURANOSIDASE, CELL WALL ISOZYME
  misc_feature (1)..(355): Homolog of NCBI NO: 4105721 NR Description: cell wall invertase Incw1; beta-fructosidase [Zea
  misc_feature (1)..(355): Homolog of NCBI NO: 26986190 NR Description: apoplastic invertase 1 [Hordeum vulgare subsp.
  misc_feature (1)..(355): Homolog of NCBI NO: 6318663 NR Description: cell wall invertase [Zea mays]
  misc_feature (1)..(355): Homolog of NCBI NO: 6318661 NR Description: cell wall invertase 2 [Zea mays]
  misc_feature (1)..(355): Homolog of NCBI NO: 6318659 NR Description: cell wall invertase 2 [Zea mays]
  misc_feature (1)..(355): Homolog of NCBI NO: 7435479 NR Description: beta-fructofuranosidase (EC 3.2.1.26) INCW2 -
  misc_feature (1)..(355): Homolog of NCBI NO: 4105719 NR Description: cell wall invertase Incw2; beta-fructosidase [Zea
  misc_feature (114)..(114): Xaa is any aa, unknown or other
  misc_feature (129)..(129): Xaa is any aa, unknown or other
MWECPDFYPVGAPGRRAGVETETSAASDGDGGSPRRREQSKYVLKNSLDLRRYDYYTVGTYDRAAERYVPDDPAGDERHLRYDYGNFYASKTFFDPVKRRRVLWGWANESDTAXDDVAKGWAGIQAIPXTVWLDPSGKQLLQWPIEEVEALRGRSVALKNRVIKPGQHVEVTGIQTAQADVEVSFEVSSLAGAEALLDPALASDAQRLCGARGAAVEGGVGPFGLWVLASGDREERTAVFFRVFRGGGGHDDKPVVLMCTDPTKSSLDANLYQPTFAGFVDTDISNGKISLRTLIDRSVVESFGGGGRTCILSRVYPSLAIGSKARLYVFNNGRADVRVSRLTAWEMKKPLMNGA

SEQ ID NO: 17469 - DNA, 2498 bp, Zea mays subsp. mays
  misc_feature (1)..(2498): Ceres Seq. ID no. 12360983
  misc_feature: MA Experiment ID: 108528 Result: Up-regulated in Transcription
  misc_feature: MA Experiment 108528 PARAMETER Experiment Name: Zm_Imbibed_Seeds_P Parameter: Age (day) Value: 5 vs. 2
  misc_feature: MA Experiment 108528 PARAMETER Experiment Name: Zm_Imbibed_Seeds_P Parameter: Organism Value: Zea mays
  misc_feature: MA Experiment 108528 PARAMETER Experiment Name: Zm_Imbibed_Seeds_P Parameter: Plant Line Value: 35A19
  misc_feature: MA Experiment 108528 PARAMETER Experiment Name: Zm_Imbibed_Seeds_P Parameter: Tissue Value: Aerial vs. Embryo
  misc_feature: MA Experiment ID: 108530 Result: Up-regulated in Transcription
  misc_feature: MA Experiment 108530 PARAMETER Experiment Name: Zm_Imbibed_Seeds_P Parameter: Age (day) Value: 6 vs. 2
  misc_feature: MA Experiment 108530 PARAMETER Experiment Name: Zm_Imbibed_Seeds_P Parameter: Organism Value: Zea mays
  misc_feature: MA Experiment 108530 PARAMETER Experiment Name: Zm_Imbibed_Seeds_P Parameter: Plant Line Value: 35A19
  misc_feature: MA Experiment 108530 PARAMETER Experiment Name: Zm_Imbibed_Seeds_P Parameter: Tissue Value: Aerial vs. Embryo
  misc_feature: MA Experiment ID: 108535 Result: Up-regulated in Transcription
  misc_feature: MA Experiment 108535 PARAMETER Experiment Name: Zm_Meristem_P Parameter: Age (day) Value: 8
  misc_feature: MA Experiment 108535 PARAMETER Experiment Name: Zm_Meristem_P Parameter: Organism Value: Zea mays
  misc_feature: MA Experiment 108535 PARAMETER Experiment Name: Zm_Meristem_P Parameter: Plant Line Value: 35A19
  misc_feature: MA Experiment 108535 PARAMETER Experiment Name: Zm_Meristem_P Parameter: Tissue Value: Root Meristem vs. Above Root Meristem
  misc_feature: MA Experiment ID: 108545 Result: Up-regulated in Transcription
  misc_feature: MA Experiment 108545 PARAMETER Experiment Name: Zm_Imbibed_Seeds_P Parameter: Age (day) Value: 3 vs. 2
  misc_feature: MA Experiment 108545 PARAMETER Experiment Name: Zm_Imbibed_Seeds_P Parameter: Organism Value: Zea mays
  misc_feature: MA Experiment 108545 PARAMETER Experiment Name: Zm_Imbibed_Seeds_P Parameter: Plant Line Value: 35A19
  misc_feature: MA Experiment 108545 PARAMETER Experiment Name: Zm_Imbibed_Seeds_P Parameter: Tissue Value: Aerial vs. Embryo
  misc_feature: MA Experiment ID: 108547 Result: Up-regulated in Transcription
  misc_feature: MA Experiment 108547 PARAMETER Experiment Name: Zm_Imbibed_Seeds_P Parameter: Age (day) Value: 4 vs. 2
  misc_feature: MA Experiment 108547 PARAMETER Experiment Name: Zm_Imbibed_Seeds_P Parameter: Organism Value: Zea mays
  misc_feature: MA Experiment 108547 PARAMETER Experiment Name: Zm_Imbibed_Seeds_P Parameter: Plant Line Value: 35A19
  misc_feature: MA Experiment 108547 PARAMETER Experiment Name: Zm_Imbibed_Seeds_P Parameter: Tissue Value: Aerial vs. Embryo
  misc_feature: MA Experiment ID: 108556 Result: Up-regulated in Transcription
  misc_feature: MA Experiment 108556 PARAMETER Experiment Name: Zm_Drought_P Parameter: Age (day) Value: 9
  misc_feature: MA Experiment 108556 PARAMETER Experiment Name: Zm_Drought_P Parameter: Organism Value: Zea mays
  misc_feature: MA Experiment 108556 PARAMETER Experiment Name: Zm_Drought_P Parameter: Plant Line Value: 35A19
  misc_feature: MA Experiment 108556 PARAMETER Experiment Name: Zm_Drought_P Parameter: Timepoint (hr) Value: 24
  misc_feature: MA Experiment 108556 PARAMETER Experiment Name: Zm_Drought_P Parameter: Tissue Value: Aerial
  misc_feature: MA Experiment 108556 PARAMETER Experiment Name: Zm_Drought_P Parameter: Treatment Value: Drought vs. No Drought
  misc_feature: MA Experiment ID: 20000480 Result: Up-regulated in Transcription
  misc_feature: MA Experiment 20000480 PARAMETER Experiment Name: Zm_Drought_P Parameter: Age (day) Value: 11
  misc_feature: MA Experiment 20000480 PARAMETER Experiment Name: Zm_Drought_P Parameter: Organism Value: Zea mays
  misc_feature: MA Experiment 20000480 PARAMETER Experiment Name: Zm_Drought_P Parameter: Plant Line Value: 35A19
  misc_feature: MA Experiment 20000480 PARAMETER Experiment Name: Zm_Drought_P Parameter: Timepoint (hr) Value: 72
  misc_feature: MA Experiment 20000480 PARAMETER Experiment Name: Zm_Drought_P Parameter: Tissue Value: Aerial
  misc_feature: MA Experiment 20000480 PARAMETER Experiment Name: Zm_Drought_P Parameter: Treatment Value: Drought vs. No Drought
  misc_feature: MA Experiment ID: 20000492 Result: Down-regulated in Transcription
  misc_feature: MA Experiment 20000492 PARAMETER Experiment Name: Zm_Hybrid_Seed_Dev_P Parameter: DAP Value: 12
  misc_feature: MA Experiment 20000492 PARAMETER Experiment Name: Zm_Hybrid_Seed_Dev_P Parameter: Organism Value: Zea mays
  misc_feature: MA Experiment 20000492 PARAMETER Experiment Name: Zm_Hybrid_Seed_Dev_P Parameter: Plant Line Value: 35A19
  misc_feature: MA Experiment 20000492 PARAMETER Experiment Name: Zm_Hybrid_Seed_Dev_P Parameter: Tissue Value: Fert Kernel vs. Unfert Floret
  misc_feature: MA Experiment ID: 20000534 Result: Down-regulated in Transcription
  misc_feature: MA Experiment 20000534 PARAMETER Experiment Name: Zm_Hybrid_Pollen_P Parameter: Age (day) Value: 8
  misc_feature: MA Experiment 20000534 PARAMETER Experiment Name: Zm_Hybrid_Pollen_P Parameter: Organism Value: Zea mays
  misc_feature: MA Experiment 20000534 PARAMETER Experiment Name: Zm_Hybrid_Pollen_P Parameter: Plant Line Value: 35A19
  misc_feature: MA Experiment 20000534 PARAMETER Experiment Name: Zm_Hybrid_Pollen_P Parameter: Tissue Value: Pollen vs. Aerial
gcacgagaccattacctagaacatcctaatcgaaaaaaactgccttttcttccggcttccaacttccaagtggcgactgctgccgactgccgggtgcgagaagagggagagatcagagtatcagacaagctgttgtccgaatccactccggcgaggacgagtgctgaggtcgaaatggggagaggagcggatgaggtggtgaaggtcgtggattcggaggacggcgagggggaggaggaagaggcagaggccgcggcggcggaggggtcgagcaaggagacgccgatgctgccaaggatgccggtgcgcgtgctactcgccgagggcgacgactccacgcgccacgtcatctccgcgctgctacgcaagtgcggctaccgagttgctgcagcctctgatggtgtgaaggcgtgggacatattaaaagaaaaatctttcaacatagaccttgttttaactgaagttgaactgcctttgatgtctgggttcctcttgttatccacgatcatggagcatgatgcatccaagaacatccctgttataatgatgtcttcacacgactctgtaagcatggttttcaaatgcatgctaaagggtgcagcagatttccttgttaagccgctaagaaagaacgaattaaggaacttgtggcagcacgtttggagaaaacaactggcaaacggtgggcccgatgtgcagcacatacaagaagagaatcttgcagaaagaatggaacagaagactggcgtgacaaaagctgataatttgaacagcgatggtccccgtaaaaatagagaatgcagtgaacaagaaagtgatgctcaaagttcttgcacaaggtcagagttggaggctgaaagtaagcaaactaacaacattttggagtatatgcaatcaactgaaaggcatttgtctattcgtagccacaaggatttagagctaaatggagagaccaaaacacgaactaagggtaataacttgattccaacaagagaagacgatttatcgccaaagaaaagaacatgtttgaatgacaataattctgagagaacttccagagatatggagctagtccacattatggacaatcagcagaagcatgacacacagagggatgtggatactatgagaacaacatccaggggaaatgatgagaactccatcccagcacaccagttggaactttctcttagaagaactgactatggaaaattagagaaccacgagaaaaatgatagaagaacactgaaccattcaacttcatctgcattttacttgtataattgcaggactgcgtccagcttagtaaatgctggtgatggtcaattatgcagcacctcagaaacactagtggatgttgaaaatagaaatggagatttggcagctctgtctgaagacacgactgaaacaaatcgtcctcctatcagagttgtaccatttcctgtccctgttcaatgcttcacatttgatgggcagccgttctggaatggtacaccggtggcatctccattctacccacagtcagctccccccatttggaatatcaaaacaccaacgtggcaagaatcaactccacaagcaacttcactgccgcaaaaatcgcaacagaatgaaccaattgaaatggatgctaaaccagttgaaaatgcagaggaacaatttgtcgtaggtcctcccagtgccagtgggaagcagctgcatgttgaaattcccaaagatgatctacggcatatttctcctgtgaccggtgaaagtggaatcagtacggtgctagacagcaccagaaatactctgagcagcagtggctgtgatagcacttccaaccagatcaccgcctctactgaaccatcatccaatgtatacaggggcgttcctgaaaccgcaagagccgaaggtttacgacacctgagccagcgtgaggctgcactgaacaagttccggctaaagaggaaggacaggtgctttgagaagaaggttcggtaccagagccggaaattactcgcagagcagcgtccacgggtcaagggccagtttgtccgtcaagatcatagcatccaaggaagctagggtccagttactgagctggaactctttcccattatctaaaaaaaaagtcactgtaagtgactccactgctgggtatcctgatgtcaggttttttcgaagagttagaagcaatcagaccgaagttacggtttgctgtgtatgtttgttaaagcttgtaatatatgtatgtataggctgactctgttctttccttaggttaggcacaggacctggcacgttctagacggtttgtcggtagacgttagaaaatacaggcatacttgtgtcctttagtagcacgtgtgctttaagccttgtattatgtaactagccaagttgtttttgatgtttcggattagatgtacactgtggatgtatggcgtgaaggatgtccaccaaagtatgctcgtttctgtgcagcttgttgcaatgaacattgttggcctggtttt

SEQ ID NO: 17470 - protein, 688 aa, Zea mays subsp. mays
  peptide (1)..(688): Ceres Seq. ID no. 12360984
  misc_feature (102)..(224): Pfam Name: Response regulator receiver domain Pfam Description: Response regulator receiver domain
  misc_feature (521)..(660): Homolog of NCBI NO: 7485762 NR Description: hypothetical protein At2g46790 [imported] -
  misc_feature (65)..(259): Homolog of NCBI NO: 7485762 NR Description: hypothetical protein At2g46790 [imported] -
  misc_feature (596)..(688): Homolog of NCBI NO: 18424319 NR Description: pseudo-response regulator - like
  misc_feature (97)..(447): Homolog of NCBI NO: 18424319 NR Description: pseudo-response regulator - like
  misc_feature (521)..(684): Homolog of NCBI NO: 18407171 NR Description: expressed protein
  misc_feature (65)..(259): Homolog of NCBI NO: 18407171 NR Description: expressed protein
  misc_feature (638)..(686): Homolog of NCBI NO: 18420797 NR Description: putative protein
  misc_feature (638)..(686): Homolog of NCBI NO: 9758535 NR Description: contains similarity to two-component response
  misc_feature (66)..(287): Homolog of NCBI NO: 18420797 NR Description: putative protein
  misc_feature (66)..(287): Homolog of NCBI NO: 9758535 NR Description: contains similarity to two-component response
ARDHYLEHPNRKKLPFLPASNFQVATAADCRVREEGEIRVSDKLLSESTPARTSAEVEMGRGADEVVKVVDSEDGEGEEEEAEAAAAEGSSKETPMLPRMPVRVLLAEGDDSTRHVISALLRKCGYRVAAASDGVKAWDILKEKSFNIDLVLTEVELPLMSGFLLLSTIMEHDASKNIPVIMMSSHDSVSMVFKCMLKGAADFLVKPLRKNELRNLWQHVWRKQLANGGPDVQHIQEENLAERMEQKTGVTKADNLNSDGPRKNRECSEQESDAQSSCTRSELEAESKQTNNILEYMQSTERHLSIRSHKDLELNGETKTRTKGNNLIPTREDDLSPKKRTCLNDNNSERTSRDMELVHIMDNQQKHDTQRDVDTMRTTSRGNDENSIPAHQLELSLRRTDYGKLENHEKNDRRTLNHSTSSAFYLYNCRTASSLVNAGDGQLCSTSETLVDVENRNGDLAALSEDTTETNRPPIRVVPFPVPVQCFTFDGQPFWNGTPVASPFYPQSAPPIWNIKTPTWQESTPQATSLPQKSQQNEPIEMDAKPVENAEEQFVVGPPSASGKQLHVEIPKDDLRHISPVTGESGISTVLDSTRNTLSSSGCDSTSNQITASTEPSSNVYRGVPETARAEGLRHLSQREAALNKFRLKRKDRCFEKKVRYQSRKLLAEQRPRVKGQFVRQDHSIQGS

SEQ ID NO: 17471 - protein, 630 aa, Zea mays subsp. mays
  peptide (1)..(630): Ceres Seq. ID no. 12360985
  misc_feature (44)..(166): Pfam Name: Response regulator receiver domain Pfam Description: Response regulator receiver domain
  misc_feature (7)..(201): Homolog of NCBI NO: 7485762 NR Description: hypothetical protein At2g46790 [imported] -
  misc_feature (538)..(630): Homolog of NCBI NO: 18424319 NR Description: pseudo-response regulator - like
  misc_feature (39)..(389): Homolog of NCBI NO: 18424319 NR Description: pseudo-response regulator - like
  misc_feature (463)..(626): Homolog of NCBI NO: 18407171 NR Description: expressed protein
  misc_feature (7)..(201): Homolog of NCBI NO: 18407171 NR Description: expressed protein
  misc_feature (463)..(602): Homolog of NCBI NO: 7485762 NR Description: hypothetical protein At2g46790 [imported] -
  misc_feature (580)..(628): Homolog of NCBI NO: 18420797 NR Description: putative protein
  misc_feature (580)..(628): Homolog of NCBI NO: 9758535 NR Description: contains similarity to two-component response
  misc_feature (8)..(229): Homolog of NCBI NO: 18420797 NR Description: putative protein
  misc_feature (8)..(229): Homolog of NCBI NO: 9758535 NR Description: contains similarity to two-component response
MGRGADEVVKVVDSEDGEGEEEEAEAAAAEGSSKETPMLPRMPVRVLLAEGDDSTRHVISALLRKCGYRVAAASDGVKAWDILKEKSFNIDLVLTEVELPLMSGFLLLSTIMEHDASKNIPVIMMSSHDSVSMVFKCMLKGAADFLVKPLRKNELRNLWQHVWRKQLANGGPDVQHIQEENLAERMEQKTGVTKADNLNSDGPRKNRECSEQESDAQSSCTRSELEAESKQTNNILEYMQSTERHLSIRSHKDLELNGETKTRTKGNNLIPTREDDLSPKKRTCLNDNNSERTSRDMELVHIMDNQQKHDTQRDVDTMRTTSRGNDENSIPAHQLELSLRRTDYGKLENHEKNDRRTLNHSTSSAFYLYNCRTASSLVNAGDGQLCSTSETLVDVENRNGDLAALSEDTTETNRPPIRVVPFPVPVQCFTFDGQPFWNGTPVASPFYPQSAPPIWNIKTPTWQESTPQATSLPQKSQQNEPIEMDAKPVENAEEQFVVGPPSASGKQLHVEIPKDDLRHISPVTGESGISTVLDSTRNTLSSSGCDSTSNQITASTEPSSNVYRGVPETARAEGLRHLSQREAALNKFRLKRKDRCFEKKVRYQSRKLLAEQRPRVKGQFVRQDHSIQGS

SEQ ID NO: 17472 - protein, 593 aa, Zea mays subsp. mays
  peptide (1)..(593): Ceres Seq. ID no. 12360986
  misc_feature (7)..(129): Pfam Name: Response regulator receiver domain Pfam Description: Response regulator receiver domain
  misc_feature (426)..(565): Homolog of NCBI NO: 7485762 NR Description: hypothetical protein At2g46790 [imported] -
  misc_feature (1)..(164): Homolog of NCBI NO: 7485762 NR Description: hypothetical protein At2g46790 [imported] -
  misc_feature (501)..(593): Homolog of NCBI NO: 18424319 NR Description: pseudo-response regulator - like
  misc_feature (2)..(352): Homolog of NCBI NO: 18424319 NR Description: pseudo-response regulator - like
  misc_feature (426)..(589): Homolog of NCBI NO: 18407171 NR Description: expressed protein
  misc_feature (1)..(164): Homolog of NCBI NO: 18407171 NR Description: expressed protein
  misc_feature (543)..(591): Homolog of NCBI NO: 18420797 NR Description: putative protein
  misc_feature (543)..(591): Homolog of NCBI NO: 9758535 NR Description: contains similarity to two-component response
  misc_feature (1)..(192): Homolog of NCBI NO: 18420797 NR Description: putative protein
  misc_feature (1)..(192): Homolog of NCBI NO: 9758535 NR Description: contains similarity to two-component response
MLPRMPVRVLLAEGDDSTRHVISALLRKCGYRVAAASDGVKAWDILKEKSFNIDLVLTEVELPLMSGFLLLSTIMEHDASKNIPVIMMSSHDSVSMVFKCMLKGAADFLVKPLRKNELRNLWQHVWRKQLANGGPDVQHIQEENLAERMEQKTGVTKADNLNSDGPRKNRECSEQESDAQSSCTRSELEAESKQTNNILEYMQSTERHLSIRSHKDLELNGETKTRTKGNNLIPTREDDLSPKKRTCLNDNNSERTSRDMELVHIMDNQQKHDTQRDVDTMRTTSRGNDENSIPAHQLELSLRRTDYGKLENHEKNDRRTLNHSTSSAFYLYNCRTASSLVNAGDGQLCSTSETLVDVENRNGDLAALSEDTTETNRPPIRVVPFPVPVQCFTFDGQPFWNGTPVASPFYPQSAPPIWNIKTPTWQESTPQATSLPQKSQQNEPIEMDAKPVENAEEQFVVGPPSASGKQLHVEIPKDDLRHISPVTGESGISTVLDSTRNTLSSSGCDSTSNQITASTEPSSNVYRGVPETARAEGLRHLSQREAALNKFRLKRKDRCFEKKVRYQSRKLLAEQRPRVKGQFVRQDHSIQGS

SEQ ID NO: 17473 - DNA, 2046 bp, Zea mays subsp. mays
  misc_feature (1)..(2046): Ceres Seq. ID no. 12362604
  misc_feature: MA Experiment ID: 108544 Result: Up-regulated in Transcription
  misc_feature: MA Experiment ID: 108545 Result: Up-regulated in Transcription
  misc_feature: MA Experiment 108545 PARAMETER Experiment Name: Zm_Imbibed_Seeds_P Parameter: Age (day) Value: 3 vs. 2
  misc_feature: MA Experiment 108545 PARAMETER Experiment Name: Zm_Imbibed_Seeds_P Parameter: Organism Value: Zea mays
  misc_feature: MA Experiment 108545 PARAMETER Experiment Name: Zm_Imbibed_Seeds_P Parameter: Plant Line Value: 35A19
  misc_feature: MA Experiment 108545 PARAMETER Experiment Name: Zm_Imbibed_Seeds_P Parameter: Tissue Value: Aerial vs. Embryo
  misc_feature: MA Experiment ID: 108687 Result: Up-regulated in Transcription
  misc_feature: MA Experiment 108687 PARAMETER Experiment Name: Zm_Embryos-Flowers__P Parameter: Tissue Value: Embryo vs. Aerial+
  misc_feature: MA Experiment ID: 20000478 Result: Up-regulated in Transcription
  misc_feature: MA Experiment 20000478 PARAMETER Experiment Name: Zm_5mM_SA_P Parameter: Age (day) Value: 11
  misc_feature: MA Experiment 20000478 PARAMETER Experiment Name: Zm_5mM_SA_P Parameter: Organism Value: Zea mays
  misc_feature: MA Experiment 20000478 PARAMETER Experiment Name: Zm_5mM_SA_P Parameter: Plant Line Value: 35A19
  misc_feature: MA Experiment 20000478 PARAMETER Experiment Name: Zm_5mM_SA_P Parameter: Timepoint (hr) Value: 72
  misc_feature: MA Experiment 20000478 PARAMETER Experiment Name: Zm_5mM_SA_P Parameter: Tissue Value: Aerial
  misc_feature: MA Experiment 20000478 PARAMETER Experiment Name: Zm_5mM_SA_P Parameter: Treatment Value: 5mM SA vs. No Treatment
  misc_feature: MA Experiment ID: 20000626 Result: Down-regulated in Transcription
  misc_feature: MA Experiment 20000626 PARAMETER Experiment Name: Zm_Herbicide-Treatments_P Parameter: Timepoint (hr) Value: 12
  misc_feature: MA Experiment 20000626 PARAMETER Experiment Name: Zm_Herbicide-Treatments_P Parameter: Tissue Value: Aerial
  misc_feature: MA Experiment 20000626 PARAMETER Experiment Name: Zm_Herbicide-Treatments_P Parameter: Treatment Value: Roundup vs. No Treatment
gcacgagaccattacctagaacatcctaatcgaaaaatctttttcaatcctcaggcaggcgcagcgcaggcagcatccacagcctgaatccaccacaccagcaccacccagcaccgatggccggcgacgacggacgtgctccctccggcctccgcgtcgtgatgttccccttcccgttctggagccacattaaccagatgctccagctcgggaagctcctccgtgcgcggggcctgggcgtcaccatgctccacaccgacttcaacgcgcccgaccccgcactccacccggacatcaccttcgtgtccatccgcgagtccctccccgccgaggtcgtcgccaaccccgacatggtagagcagatgatgcagctcaacgccgtctgcgaggcgccgttccaggcggccctcgccggggagctgctggcgcgcggtacaacaaccggtggcccgcgcgaggtcgcctgcgtggtggtcgacgggcagtggtacaagatgctgggcgcggccacgcgtgtcgctgtccccgcgctcgtgctgcgcgccgacggcgccgccaccttactcagcatgctcgccaccccgcgcctccgcgccgacggttacctccccatcaaaggcactcgatccaccaccctcttctcctccccttctccgcgtgacgatcttgtgccaccggcacggcaccgaccggttactcgttttttcttgtcttgcatgcagaagagcggctggacgaggtggtgccgggcctggagcccctgcgcgtgcgggacctgatccgcgtggacggcagcgacgacgagacggtgctccgtttcatcacccgcaacgccgaggccgtgcgggcctcgtcgtcgggcgtggtgctgaacacgttcgagggcatcgagggcgcggcgctggccaagatccggcgcgagctgtccggccgcccggtcttcgccgtggggccgctgcacctggcgtcgccggaccccgcggcggcggcggccgcggggtaccaggacgcgccggaccccacctgcttggcgtggctggacgcgcgcccgccgcgctccgttctgtacgtcagcatgggaagcgtggcgcgcgtcgaccgcgccgtgttcgaggagacggcgtgggcgctggccggcagcggcgtgccgttcctgtgggtcctccgccgcggctccgtccgcggcgcggatgaggaggtgccgccggtcccggaggagctccgcgagacggtgaggcacaggggcaagatcgtggcgtgggcaccgcagagggaggtcctggcgcacccggcggtgggtgggttctggacgcactgcgggtggaaatccatggtggaggccatatccgaaggggtgcccatgctcgtgcagccgtgcttcgccgagcagatagtgaacgcgaggtatgtgacgcaccagtggggcatcgggtacgaggtcgggaagccgcttgagaggacagccatggcgaaggcggctagaaagctgatggccggcgagctggggccacaggggccaagggagagggctcggcttcttaaggcgcaggcgaagcagtgcgttgcagaaagaggaggaattagtttggctctcgacggtctggtggactacatttgctcgctgtgatgtttgatcagctttcaggtttcagcatgacgatggcgctctgaataatgaactgcatgttatatgtccgatgcaataaggaatagaatgtggacagcattttggtttacttaattctctggcaaatatatcgttggagtttatgagctaaggtctatttattagtatcacattgataattgataatggaagagaaacaacttaaatagcttctttattgtcactcttcgctacttctttttgtgtgagttctactcgcctataaattagtggaacatcctcctcttaaacacaagaaaaaaatcaatctactatattttagtgagagagctatcttagggaggctccagcatgccatgtcagcgtctagtttcagcaaacccggtttttgatgattttgcacgagtcggatagttcgg

SEQ ID NO: 17474 - protein, 220 aa, Zea mays subsp. mays
  peptide (1)..(220): Ceres Seq. ID no. 12362605
  misc_feature (8)..(203): Homolog of NCBI NO: 18033230 NR Description: UDP-glucosyltransferase BX9 [Zea mays]
  misc_feature (1)..(191): Homolog of NCBI NO: 34900662 NR Description: glucuronosyl transferase-like protein
  misc_feature (13)..(98): Homolog of NCBI NO: 34900716 NR Description: glucuronosyl transferase-like protein
  misc_feature (8)..(170): Homolog of NCBI NO: 18033228 NR Description: UDP-glucosyltransferase BX8 [Zea mays]
  misc_feature (3)..(191): Homolog of NCBI NO: 34900678 NR Description: glucuronosyl transferase-like protein
  misc_feature (5)..(190): Homolog of NCBI NO: 34900682 NR Description: glucuronosyl transferase-like protein
  misc_feature (3)..(191): Homolog of NCBI NO: 33146633 NR Description: putative UDP-glucosyltransferase
  misc_feature (1)..(165): Homolog of NCBI NO: 34897378 NR Description: putative UDP-glucosyltransferase
  misc_feature (7)..(134): Homolog of NCBI NO: 34900684 NR Description: glucuronosyl transferase-like protein
  misc_feature (7)..(170): Homolog of NCBI NO: 33146634 NR Description: putative UDP-glucosyltransferase
MAGDDGRAPSGLRVVMFPFPFWSHINQMLQLGKLLRARGLGVTMLHTDFNAPDPALHPDITFVSIRESLPAEVVANPDMVEQMMQLNAVCEAPFQAALAGELLARGTTTGGPREVACVVVDGQWYKMLGAATRVAVPALVLRADGAATLLSMLATPRLRADGYLPIKGTRSTTLFSSPSPRDDLVPPARHRPVTRFFLSCMQKSGWTRWCRAWSPCACGT

SEQ ID NO: 17475 - protein, 205 aa, Zea mays subsp. mays
  peptide (1)..(205): Ceres Seq. ID no. 12362606
  misc_feature (1)..(188): Homolog of NCBI NO: 18033230 NR Description: UDP-glucosyltransferase BX9 [Zea mays]
  misc_feature (1)..(176): Homolog of NCBI NO: 34900662 NR Description: glucuronosyl transferase-like protein
  misc_feature (1)..(83): Homolog of NCBI NO: 34900716 NR Description: glucuronosyl transferase-like protein
  misc_feature (1)..(155): Homolog of NCBI NO: 18033228 NR Description: UDP-glucosyltransferase BX8 [Zea mays]
  misc_feature (1)..(176): Homolog of NCBI NO: 34900678 NR Description: glucuronosyl transferase-like protein
  misc_feature (1)..(175): Homolog of NCBI NO: 34900682 NR Description: glucuronosyl transferase-like protein
  misc_feature (1)..(176): Homolog of NCBI NO: 33146633 NR Description: putative UDP-glucosyltransferase
  misc_feature (1)..(150): Homolog of NCBI NO: 34897378 NR Description: putative UDP-glucosyltransferase
  misc_feature (1)..(119): Homolog of NCBI NO: 34900684 NR Description: glucuronosyl transferase-like protein
  misc_feature (1)..(155): Homolog of NCBI NO: 33146634 NR Description: putative UDP-glucosyltransferase
MFPFPFWSHINQMLQLGKLLRARGLGVTMLHTDFNAPDPALHPDITFVSIRESLPAEVVANPDMVEQMMQLNAVCEAPFQAALAGELLARGTTTGGPREVACVVVDGQWYKMLGAATRVAVPALVLRADGAATLLSMLATPRLRADGYLPIKGTRSTTLFSSPSPRDDLVPPARHRPVTRFFLSCMQKSGWTRWCRAWSPCACGT

SEQ ID NO: 17476 - protein, 193 aa, Zea mays subsp. mays
  peptide (1)..(193): Ceres Seq. ID no. 12362607
  misc_feature (1)..(176): Homolog of NCBI NO: 18033230 NR Description: UDP-glucosyltransferase BX9 [Zea mays]
  misc_feature (1)..(164): Homolog of NCBI NO: 34900662 NR Description: glucuronosyl transferase-like protein
  misc_feature (1)..(71): Homolog of NCBI NO: 34900716 NR Description: glucuronosyl transferase-like protein
  misc_feature (1)..(143): Homolog of NCBI NO: 18033228 NR Description: UDP-glucosyltransferase BX8 [Zea mays]
  misc_feature (1)..(164): Homolog of NCBI NO: 34900678 NR Description: glucuronosyl transferase-like protein
  misc_feature (1)..(163): Homolog of NCBI NO: 34900682 NR Description: glucuronosyl transferase-like protein
  misc_feature (1)..(164): Homolog of NCBI NO: 33146633 NR Description: putative UDP-glucosyltransferase
  misc_feature (1)..(138): Homolog of NCBI NO: 34897378 NR Description: putative UDP-glucosyltransferase
  misc_feature (1)..(107): Homolog of NCBI NO: 34900684 NR Description: glucuronosyl transferase-like protein
  misc_feature (1)..(143): Homolog of NCBI NO: 33146634 NR Description: putative UDP-glucosyltransferase
MLQLGKLLRARGLGVTMLHTDFNAPDPALHPDITFVSIRESLPAEVVANPDMVEQMMQLNAVCEAPFQAALAGELLARGTTTGGPREVACVVVDGQWYKMLGAATRVAVPALVLRADGAATLLSMLATPRLRADGYLPIKGTRSTTLFSSPSPRDDLVPPARHRPVTRFFLSCMQKSGWTRWCRAWSPCACGT

SEQ ID NO: 17477 - DNA, 1053 bp, Zea mays subsp. mays
  misc_feature (1)..(1053): Ceres Seq. ID no. 12417420
  misc_feature: MA Experiment ID: 108522 Result: Up-regulated in Transcription
  misc_feature: MA Experiment 108522 PARAMETER Experiment Name: Zm_42deg_Heat_P Parameter: Age (day) Value: 8
  misc_feature: MA Experiment 108522 PARAMETER Experiment Name: Zm_42deg_Heat_P Parameter: Organism Value: Zea mays
  misc_feature: MA Experiment 108522 PARAMETER Experiment Name: Zm_42deg_Heat_P Parameter: Plant Line Value: 35A19
  misc_feature: MA Experiment 108522 PARAMETER Experiment Name: Zm_42deg_Heat_P Parameter: Temperature (deg C) Value: 42 vs. 22
  misc_feature: MA Experiment 108522 PARAMETER Experiment Name: Zm_42deg_Heat_P Parameter: Timepoint (hr) Value: 1
  misc_feature: MA Experiment 108522 PARAMETER Experiment Name: Zm_42deg_Heat_P Parameter: Tissue Value: Aerial
  misc_feature: MA Experiment ID: 108527 Result: Down-regulated in Transcription
  misc_feature: MA Experiment 108527 PARAMETER Experiment Name: Zm_5mM_NO_P Parameter: Age (day) Value: 8
  misc_feature: MA Experiment 108527 PARAMETER Experiment Name: Zm_5mM_NO_P Parameter: Organism Value: Zea mays
  misc_feature: MA Experiment 108527 PARAMETER Experiment Name: Zm_5mM_NO_P Parameter: Plant Line Value: 35A19
  misc_feature: MA Experiment 108527 PARAMETER Experiment Name: Zm_5mM_NO_P Parameter: Timepoint (hr) Value: 6
  misc_feature: MA Experiment 108527 PARAMETER Experiment Name: Zm_5mM_NO_P Parameter: Tissue Value: Aerial
  misc_feature: MA Experiment 108527 PARAMETER Experiment Name: Zm_5mM_NO_P Parameter: Treatment Value: 5mM NO vs. No Treatment
  misc_feature: MA Experiment ID: 108528 Result: Down-regulated in Transcription
  misc_feature: MA Experiment 108528 PARAMETER Experiment Name: Zm_Imbibed_Seeds_P Parameter: Age (day) Value: 5 vs. 2
  misc_feature: MA Experiment 108528 PARAMETER Experiment Name: Zm_Imbibed_Seeds_P Parameter: Organism Value: Zea mays
  misc_feature: MA Experiment 108528 PARAMETER Experiment Name: Zm_Imbibed_Seeds_P Parameter: Plant Line Value: 35A19
  misc_feature: MA Experiment 108528 PARAMETER Experiment Name: Zm_Imbibed_Seeds_P Parameter: Tissue Value: Aerial vs. Embryo
  misc_feature: MA Experiment ID: 108529 Result: Down-regulated in Transcription
  misc_feature: MA Experiment 108529 PARAMETER Experiment Name: Zm_Imbibed_Seeds_P Parameter: Age (day) Value: 5 vs. 2
  misc_feature: MA Experiment 108529 PARAMETER Experiment Name: Zm_Imbibed_Seeds_P Parameter: Organism Value: Zea mays
  misc_feature: MA Experiment 108529 PARAMETER Experiment Name: Zm_Imbibed_Seeds_P Parameter: Plant Line Value: 35A19
  misc_feature: MA Experiment 108529 PARAMETER Experiment Name: Zm_Imbibed_Seeds_P Parameter: Tissue Value: Roots vs. Embryo
  misc_feature: MA Experiment ID: 108530 Result: Down-regulated in Transcription
  misc_feature: MA Experiment 108530 PARAMETER Experiment Name: Zm_Imbibed_Seeds_P Parameter: Age (day) Value: 6 vs. 2
  misc_feature: MA Experiment 108530 PARAMETER Experiment Name: Zm_Imbibed_Seeds_P Parameter: Organism Value: Zea mays
  misc_feature: MA Experiment 108530 PARAMETER Experiment Name: Zm_Imbibed_Seeds_P Parameter: Plant Line Value: 35A19
  misc_feature: MA Experiment 108530 PARAMETER Experiment Name: Zm_Imbibed_Seeds_P Parameter: Tissue Value: Aerial vs. Embryo
  misc_feature: MA Experiment ID: 108535 Result: Down-regulated in Transcription
  misc_feature: MA Experiment 108535 PARAMETER Experiment Name: Zm_Meristem_P Parameter: Age (day) Value: 8
  misc_feature: MA Experiment 108535 PARAMETER Experiment Name: Zm_Meristem_P Parameter: Organism Value: Zea mays
  misc_feature: MA Experiment 108535 PARAMETER Experiment Name: Zm_Meristem_P Parameter: Plant Line Value: 35A19
  misc_feature: MA Experiment 108535 PARAMETER Experiment Name: Zm_Meristem_P Parameter: Tissue Value: Root Meristem vs. Above Root Meristem
  misc_feature: MA Experiment ID: 108536 Result: Up-regulated in Transcription
  misc_feature: MA Experiment 108536 PARAMETER Experiment Name: Zm_Meristem_P Parameter: Age (day) Value: 8
  misc_feature: MA Experiment 108536 PARAMETER Experiment Name: Zm_Meristem_P Parameter: Organism Value: Zea mays
  misc_feature: MA Experiment 108536 PARAMETER Experiment Name: Zm_Meristem_P Parameter: Plant Line Value: 35A19
  misc_feature: MA Experiment 108536 PARAMETER Experiment Name: Zm_Meristem_P Parameter: Tissue Value: Shoot Meristem vs. Above Shoot Meristem
  misc_feature: MA Experiment ID: 108543 Result: Up-regulated in Transcription
  misc_feature: MA Experiment ID: 108544 Result: Up-regulated in Transcription
  misc_feature: MA Experiment ID: 108546 Result: Down-regulated in Transcription
  misc_feature: MA Experiment 108546 PARAMETER Experiment Name: Zm_Imbibed_Seeds_P Parameter: Age (day) Value: 3 vs. 2
  misc_feature: MA Experiment 108546 PARAMETER Experiment Name: Zm_Imbibed_Seeds_P Parameter: Organism Value: Zea mays
  misc_feature: MA Experiment 108546 PARAMETER Experiment Name: Zm_Imbibed_Seeds_P Parameter: Plant Line Value: 35A19
  misc_feature: MA Experiment 108546 PARAMETER Experiment Name: Zm_Imbibed_Seeds_P Parameter: Tissue Value: Roots vs. Embryo
  misc_feature: MA Experiment ID: 108547 Result: Down-regulated in Transcription
  misc_feature: MA Experiment 108547 PARAMETER Experiment Name: Zm_Imbibed_Seeds_P Parameter: Age (day) Value: 4 vs. 2
  misc_feature: MA Experiment 108547 PARAMETER Experiment Name: Zm_Imbibed_Seeds_P Parameter: Organism Value: Zea mays
  misc_feature: MA Experiment 108547 PARAMETER Experiment Name: Zm_Imbibed_Seeds_P Parameter: Plant Line Value: 35A19
  misc_feature: MA Experiment 108547 PARAMETER Experiment Name: Zm_Imbibed_Seeds_P Parameter: Tissue Value: Aerial vs. Embryo
  misc_feature: MA Experiment ID: 20000477 Result: Up-regulated in Transcription
  misc_feature: MA Experiment 20000477 PARAMETER Experiment Name: Zm_5mM_SA_P Parameter: Age (day) Value: 10
  misc_feature: MA Experiment 20000477 PARAMETER Experiment Name: Zm_5mM_SA_P Parameter: Organism Value: Zea mays
  misc_feature: MA Experiment 20000477 PARAMETER Experiment Name: Zm_5mM_SA_P Parameter: Plant Line Value: 35A19
  misc_feature: MA Experiment 20000477 PARAMETER Experiment Name: Zm_5mM_SA_P Parameter: Timepoint (hr) Value: 48
  misc_feature: MA Experiment 20000477 PARAMETER Experiment Name: Zm_5mM_SA_P Parameter: Tissue Value: Aerial
  misc_feature: MA Experiment 20000477 PARAMETER Experiment Name: Zm_5mM_SA_P Parameter: Treatment Value: 5mM SA vs. No Treatment
  misc_feature: MA Experiment ID: 20000492 Result: Down-regulated in Transcription
  misc_feature: MA Experiment 20000492 PARAMETER Experiment Name: Zm_Hybrid_Seed_Dev_P Parameter: DAP Value: 12
  misc_feature: MA Experiment 20000492 PARAMETER Experiment Name: Zm_Hybrid_Seed_Dev_P Parameter: Organism Value: Zea mays
  misc_feature: MA Experiment 20000492 PARAMETER Experiment Name: Zm_Hybrid_Seed_Dev_P Parameter: Plant Line Value: 35A19
  misc_feature: MA Experiment 20000492 PARAMETER Experiment Name: Zm_Hybrid_Seed_Dev_P Parameter: Tissue Value: Fert Kernel vs. Unfert Floret
  misc_feature: MA Experiment ID: 20000535 Result: Down-regulated in Transcription
  misc_feature: MA Experiment 20000535 PARAMETER Experiment Name: Zm_Hybrid_Seed_Dev_P Parameter: DAP Value: 30 vs. 12
  misc_feature: MA Experiment 20000535 PARAMETER Experiment Name: Zm_Hybrid_Seed_Dev_P Parameter: Organism Value: Zea mays
  misc_feature: MA Experiment 20000535 PARAMETER Experiment Name: Zm_Hybrid_Seed_Dev_P Parameter: Plant Line Value: 35A19
  misc_feature: MA Experiment 20000535 PARAMETER Experiment Name: Zm_Hybrid_Seed_Dev_P Parameter: Tissue Value: Embryo vs. Unfert Floret
agcaccagcaggagagtcccggagctggaagaagaagatacagagcgcatgctcctgtgaacatacaccactgaactcatagaaagcagcacacagtctgcataggtgcattgttgttccggcctctcctagaggaaaggaaggtcaggactcaggaggatgcctcgagccccgaccatgaccgctttccttgtcgccgtgcttgccgccctcgttctcacgtccgagggccgcgtttctcggaaggacctgtgcatcgacctcggcggtggcagcggggcaggcatcgggatcggtgctgggattagcattggcataggcggtggtggtggtgccggtggctctggctctggctcggcgtctggctccggctccggctccggctcggcctcaggttccgggtccagtgcgggctctggtgcaggatcgtatgctggatctggcgccggcgccggctctggctctggctctggtgcgggttcaggagctgggtccggagcgggttcgggttcagggtacgggcaagggcaagggtctggatatggcgaagggcatgggtcgggccagggacagggttctgggtctggctcgggatccggtcaggnaagtggatccggtcgaggatctggctacggcgaaggctccggttccggctctggccaaggatcaggatccggctacggcgaaggctccggttccggctctggccaaggatcaggatccggctacggtgaaggttacggctccggtcatggccaaggatctggatacggtgagggttcaggaagaggatacggagaaggttcaggctcaggctacggcgagggacacggctacggctacggctctggttctgggcatgtggcaaataaacatgactgaacaatgttctctgagctctgatgttctcttctctttctgtgtatccatccatatacataaataagtacacgttaccaactgtggacaaagaactgtactctctctctctcctcaaagcatttcctatatagctgttcaagatactgtttttcattatagactacacttttt

SEQ ID NO: 17478 - protein, 240 aa, Zea mays subsp. mays
  peptide (1)..(240): Ceres Seq. ID no. 12417421
  misc_feature (37)..(233): Pfam Name: Dehydrin Pfam Description: Dehydrin
  misc_feature (36)..(233): Homolog of NCBI NO: 10954048 NR Description: ovarian fibroin-like substance-1 [Cyprinus carpio]
  misc_feature (36)..(238): Homolog of NCBI NO: 10954048 NR Description: ovarian fibroin-like substance-1 [Cyprinus carpio]
  misc_feature (36)..(233): Homolog of NCBI NO: 10954048 NR Description: ovarian fibroin-like substance-1 [Cyprinus carpio]
  misc_feature (35)..(233): Homolog of NCBI NO: 765323 NR Description: silk fibroin heavy chain [Bombyx mori]
  misc_feature (36)..(233): Homolog of NCBI NO: 9087216 NR Description: Fibroin heavy chain precursor (Fib-H) (H-fibroin)
  misc_feature (27)..(233): Homolog of NCBI NO: 10954048 NR Description: ovarian fibroin-like substance-1 [Cyprinus carpio]
  misc_feature (36)..(233): Homolog of NCBI NO: 10954048 NR Description: ovarian fibroin-like substance-1 [Cyprinus carpio]
  misc_feature (35)..(236): Homolog of NCBI NO: 765323 NR Description: silk fibroin heavy chain [Bombyx mori]
  misc_feature (36)..(234): Homolog of NCBI NO: 10954048 NR Description: ovarian fibroin-like substance-1 [Cyprinus carpio]
  misc_feature (36)..(233): Homolog of NCBI NO: 10954048 NR Description: ovarian fibroin-like substance-1 [Cyprinus carpio]
  misc_feature (149)..(149): Xaa is any aa, unknown or other
MPRAPTMTAFLVAVLAALVLTSEGRVSRKDLCIDLGGGSGAGIGIGAGISIGIGGGGGAGGSGSGSASGSGSGSGSASGSGSSAGSGAGSYAGSGAGAGSGSGSGAGSGAGSGAGSGSGYGQGQGSGYGEGHGSGQGQGSGSGSGSGQXSGSGRGSGYGEGSGSGSGQGSGSGYGEGSGSGSGQGSGSGYGEGYGSGHGQGSGYGEGSGRGYGEGSGSGYGEGHGYGYGSGSGHVANKHD

SEQ ID NO: 17479 - protein, 234 aa, Zea mays subsp. mays
  peptide (1)..(234): Ceres Seq. ID no. 12417422
  misc_feature (31)..(227): Pfam Name: Dehydrin Pfam Description: Dehydrin
  misc_feature (30)..(227): Homolog of NCBI NO: 10954048 NR Description: ovarian fibroin-like substance-1 [Cyprinus carpio]
  misc_feature (30)..(232): Homolog of NCBI NO: 10954048 NR Description: ovarian fibroin-like substance-1 [Cyprinus carpio]
  misc_feature (30)..(227): Homolog of NCBI NO: 10954048 NR Description: ovarian fibroin-like substance-1 [Cyprinus carpio]
  misc_feature (29)..(227): Homolog of NCBI NO: 765323 NR Description: silk fibroin heavy chain [Bombyx mori]
  misc_feature (30)..(227): Homolog of NCBI NO: 9087216 NR Description: Fibroin heavy chain precursor (Fib-H) (H-fibroin)
  misc_feature (21)..(227): Homolog of NCBI NO: 10954048 NR Description: ovarian fibroin-like substance-1 [Cyprinus carpio]
  misc_feature (30)..(227): Homolog of NCBI NO: 10954048 NR Description: ovarian fibroin-like substance-1 [Cyprinus carpio]
  misc_feature (29)..(230): Homolog of NCBI NO: 765323 NR Description: silk fibroin heavy chain [Bombyx mori]
  misc_feature (30)..(228): Homolog of NCBI NO: 10954048 NR Description: ovarian fibroin-like substance-1 [Cyprinus carpio]
  misc_feature (30)..(227): Homolog of NCBI NO: 10954048 NR Description: ovarian fibroin-like substance-1 [Cyprinus carpio]
  misc_feature (143)..(143): Xaa is any aa, unknown or other
MTAFLVAVLAALVLTSEGRVSRKDLCIDLGGGSGAGIGIGAGISIGIGGGGGAGGSGSGSASGSGSGSGSASGSGSSAGSGAGSYAGSGAGAGSGSGSGAGSGAGSGAGSGSGYGQGQGSGYGEGHGSGQGQGSGSGSGSGQXSGSGRGSGYGEGSGSGSGQGSGSGYGEGSGSGSGQGSGSGYGEGYGSGHGQGSGYGEGSGRGYGEGSGSGYGEGHGYGYGSGSGHVANKHD

SEQ ID NO: 17480 - protein, 171 aa, Zea mays subsp. mays
  peptide (1)..(171): Ceres Seq. ID no. 12417423
  misc_feature (59)..(59): Xaa is any aa, unknown or other
MLDLAPAPALALALVRVQELGPERVRVQGTGKGKGLDMAKGMGRARDRVLGLARDPVRXVDPVEDLATAKAPVPALAKDQDPATAKAPVPALAKDQDPATVKVTAPVMAKDLDTVRVQEEDTEKVQAQATARDTATATALVLGMWQINMTEQCSLSSDVLFSFCVSIHIHK

SEQ ID NO: 17481 - DNA, 2759 bp, Zea mays subsp. mays
  misc_feature (1)..(2759): Ceres Seq. ID no. 12376316
  misc_feature: MA Experiment ID: 20000535 Result: Up-regulated in Transcription
  misc_feature: MA Experiment 20000535 PARAMETER Experiment Name: Zm_Hybrid_Seed_Dev_P Parameter: DAP Value: 30 vs. 12
  misc_feature: MA Experiment 20000535 PARAMETER Experiment Name: Zm_Hybrid_Seed_Dev_P Parameter: Organism Value: Zea mays
  misc_feature: MA Experiment 20000535 PARAMETER Experiment Name: Zm_Hybrid_Seed_Dev_P Parameter: Plant Line Value: 35A19
  misc_feature: MA Experiment 20000535 PARAMETER Experiment Name: Zm_Hybrid_Seed_Dev_P Parameter: Tissue Value: Embryo vs. Unfert Floret
gcacgagaccattacctagaacatcctaatcgaaaaatcttattttctctcgcgttccactcctctctgttggctagctaccaccaccgtttccacgatgacggcgctgcagttcctgttgctcgcgctcgtcgccgtcactcaggtcgcgagcgccaccacggtcacctacaacgaccgtgcactcgtcatcgatggtcagcgccgtattattctatcagggtctattcattaccccaggagcacgccacagatgtggcctgatctcatcaacaaagctaaagaaggcggcctcaacaccatcgaaacatacgtcttctggaatggccacgagccacgccgccgtcagtataatttcgagggaagctacgacatcatcaggttcttcaaggagatccagaacgctggaatgcatgctattcttcgcattggtccctacatctgtggggaatggaattacgggggccttcctgcatggctgcgcgacattcctggaatgcagttcaggttgcacaatgccccctttgagcgcgagatggagaccttcaccaccctcatcgtcaataagatgaaggacgtcaacatgttcgcaggacagggaggcccaatcatccttgctcagatcgagaacgagtatggaaacatcatgggacaactcaagaacaaccagtctgcctcgcaatacatccactggtgcgcggacatggcgaataagcaagaggtcggtgtcccgtggatcatgtgccagcaggataacgatgtgccacacaacgtcatcaacacctgcaatggtttctattgccacgattggttcccgaataggaccggcattcccaagatatggacagaaaactggactggctggttcaaagcctgggataagccggatttccatagatccgctgaggacattgctttcgcggttgccatgttcttccagaagcgtggatcggtccataactactacatgtaccatggaggaaccaatttcggacgcacttctggtggcccgtacatcacaaccagctatgattacgatgcacctttggatgagtatggtaacattaggcagcccaaatacgggcacctgaaagatctccacgacctgatcaggtccatggagaaaatccttgtccatgggaagtacaatgacacaagttatggcaagaatgtcactgtaaccaagtacatgtatggtggttcttcagtttgcttcatcaacaaccagttcgtcgacagggatatgaaggtgaccctcggcggccgaaactcacctcgttccggcatggtccgtcagcatccttgcccaactgcaagactgttgcctacaacactgcaaagatcaagacgcaaacatcggtaatggtgaagaaggccaactcggtggagaaggaaccggagaccatgcgatggtcgtggatgcccgagaacctcaagcccttcatgacagaccaccgtggcagcttcagacagtcacaactcttggagcagatcgcaacatccactgatcagagcgactacttgtggtataggacaagccttgagcataagggagagggaagttacacgctgtacgtgaacacaagtggccatgagatgtacgcttttgtaaacggaaggcttgttgggcaaaaccactcggccgatggagcgttcgtcttccagctccagtctccggtgaagctccactccggaaagaactacgtttctctcctcagcggcacagtcggactcaagaactatggaccttcgtttgagcttgtgccagcgggcatcgccggtgggccggttaagcttgtcgggacaaacggcaccgccgttgatcttaccaaaagctcttggtcttacaagtctgggttggccggtgagctcaggcaaatccacctcgacaagcccggctacaagtggcagagccacaacggtaccatccccgtcaaccggcccttcacgtggtacaagaccacctttgaagctcccgccggcgaggaggccgtcgtggtggacctgctgggcctgaacaagggcgtggcgtgggtgaacggcaacagccttggacgctactggccgtcctacaccgcggcggagatgcccggttgccacgtctgcgactaccggggaaagttcatagcggagggcgatggcatccgctgcctcacgggttgcggcgagccagcgcagcgcttctaccacgtgccgcgctccttcctccgcgccggcgagcccaacacgctcatcctcttcgaggaggccggcggcgacccgacacgcgccgcgttccacaccgtcgccgtgggccccgtgtgcgtggcggccgtcgagctcggcgacgacgtcacgctgtcatgcggcggccacggccgcgtcgtcgccagcgtcgacgtggccagcttcggcgtcgccaggggcagctgcggcgcctacaagggaggctgcgagtccaaggccgcgctcaaggcgttcacggacgcgtgcgtcggcagggagtcgtgcacggtcaagtacacggccgcgtttgccggcgcagggtgccaatccggcgcgctcaccgttcaggccacctgctcatagcgacccaggctagatcaaggagagttttatcttagctagatcaaggagagttttatcttagctagatcaggatagttttatcttagctagatcagatgatgcatggtttggtttggacacttaatgtagtcctcacatttcgttcctcaagattagttgaataaaaaaacctaagtacccttatgttttcc

SEQ ID NO: 17482 - protein, 421 aa, Zea mays subsp. mays
  peptide (1)..(421): Ceres Seq. ID no. 12376317
  misc_feature (1)..(389): Pfam Name: Glycosyl hydrolases family 35 Pfam Description: Glycosyl hydrolases family 35
  misc_feature (23)..(376): Homolog of NCBI NO: 6686900 NR Description: putative beta-galactosidase [Arabidopsis thaliana]
  misc_feature (1)..(395): Homolog of NCBI NO: 18418558 NR Description: glycosyl hydrolase family 35 (beta-galactosidase)
  misc_feature (1)..(392): Homolog of NCBI NO: 26451843 NR Description: unknown protein [Arabidopsis thaliana]
  misc_feature (1)..(385): Homolog of NCBI NO: 7939621 NR Description: beta-galactosidase [Lycopersicon esculentum]
  misc_feature (4)..(391): Homolog of NCBI NO: 7939623 NR Description: putative beta-galactosidase [Lycopersicon
  misc_feature (1)..(391): Homolog of NCBI NO: 14970841 NR Description: beta-galactosidase [Fragaria x ananassa]
  misc_feature (34)..(391): Homolog of NCBI NO: 6686886 NR Description: putative beta-galactosidase [Arabidopsis thaliana]
  misc_feature (1)..(389): Homolog of NCBI NO: 22329897 NR Description: similar to glycosyl hydrolase family 35
  misc_feature (1)..(391): Homolog of NCBI NO: 1352075 NR Description: Beta-galactosidase precursor (Lactase)
  misc_feature (1)..(389): Homolog of NCBI NO: 12597826 NR Description: hypothetical protein [Arabidopsis thaliana]
MTALQFLLLALVAVTQVASATTVTYNDRALVIDGQRRIILSGSIHYPRSTPQMWPDLINKAKEGGLNTIETYVFWNGHEPRRRQYNFEGSYDIIRFFKEIQNAGMHAILRIGPYICGEWNYGGLPAWLRDIPGMQFRLHNAPFEREMETFTTLIVNKMKDVNMFAGQGGPIILAQIENEYGNIMGQLKNNQSASQYIHWCADMANKQEVGVPWIMCQQDNDVPHNVINTCNGFYCHDWFPNRTGIPKIWTENWTGWFKAWDKPDFHRSAEDIAFAVAMFFQKRGSVHNYYMYHGGTNFGRTSGGPYITTSYDYDAPLDEYGNIRQPKYGHLKDLHDLIRSMEKILVHGKYNDTSYGKNVTVTKYMYGGSSVCFINNQFVDRDMKVTLGGRNSPRSGMVRQHPCPTARLLPTTLQRSRRKHR

SEQ ID NO: 17483 - protein, 401 aa, Zea mays subsp. mays
  peptide (1)..(401): Ceres Seq. ID no. 12376318
  misc_feature (1)..(259): Pfam Name: Glycosyl hydrolases family 35 Pfam Description: Glycosyl hydrolases family 35
  misc_feature (1)..(237): Homolog of NCBI NO: 26451843 NR Description: unknown protein [Arabidopsis thaliana]
  misc_feature (1)..(383): Homolog of NCBI NO: 7939621 NR Description: beta-galactosidase [Lycopersicon esculentum]
  misc_feature (1)..(401): Homolog of NCBI NO: 7939623 NR Description: putative beta-galactosidase [Lycopersicon
  misc_feature (1)..(400): Homolog of NCBI NO: 14970841 NR Description: beta-galactosidase [Fragaria x ananassa]
  misc_feature (1)..(400): Homolog of NCBI NO: 6686886 NR Description: putative beta-galactosidase [Arabidopsis thaliana]
  misc_feature (288)..(400): Homolog of NCBI NO: 22329897 NR Description: similar to glycosyl hydrolase family 35
  misc_feature (1)..(237): Homolog of NCBI NO: 22329897 NR Description: similar to glycosyl hydrolase family 35
  misc_feature (1)..(392): Homolog of NCBI NO: 1352075 NR Description: Beta-galactosidase precursor (Lactase)
  misc_feature (275)..(400): Homolog of NCBI NO: 12597826 NR Description: hypothetical protein [Arabidopsis thaliana]
  misc_feature (1)..(259): Homolog of NCBI NO: 12597826 NR Description: hypothetical protein [Arabidopsis thaliana]
MVKKANSVEKEPETMRWSWMPENLKPFMTDHRGSFRQSQLLEQIATSTDQSDYLWYRTSLEHKGEGSYTLYVNTSGHEMYAFVNGRLVGQNHSADGAFVFQLQSPVKLHSGKNYVSLLSGTVGLKNYGPSFELVPAGIAGGPVKLVGTNGTAVDLTKSSWSYKSGLAGELRQIHLDKPGYKWQSHNGTIPVNRPFTWYKTTFEAPAGEEAVVVDLLGLNKGVAWVNGNSLGRYWPSYTAAEMPGCHVCDYRGKFIAEGDGIRCLTGCGEPAQRFYHVPRSFLRAGEPNTLILFEEAGGDPTRAAFHTVAVGPVCVAAVELGDDVTLSCGGHGRVVASVDVASFGVARGSCGAYKGGCESKAALKAFTDACVGRESCTVKYTAAFAGAGCQSGALTVQATCS

SEQ ID NO: 17484 - protein, 387 aa, Zea mays subsp. mays
  peptide (1)..(387): Ceres Seq. ID no. 12376319
  misc_feature (1)..(245): Pfam Name: Glycosyl hydrolases family 35 Pfam Description: Glycosyl hydrolases family 35
  misc_feature (1)..(223): Homolog of NCBI NO: 26451843 NR Description: unknown protein [Arabidopsis thaliana]
  misc_feature (1)..(369): Homolog of NCBI NO: 7939621 NR Description: beta-galactosidase [Lycopersicon esculentum]
  misc_feature (1)..(387): Homolog of NCBI NO: 7939623 NR Description: putative beta-galactosidase [Lycopersicon
  misc_feature (1)..(386): Homolog of NCBI NO: 14970841 NR Description: beta-galactosidase [Fragaria x ananassa]
  misc_feature (1)..(386): Homolog of NCBI NO: 6686886 NR Description: putative beta-galactosidase [Arabidopsis thaliana]
  misc_feature (274)..(386): Homolog of NCBI NO: 22329897 NR Description: similar to glycosyl hydrolase family 35
  misc_feature (1)..(223): Homolog of NCBI NO: 22329897 NR Description: similar to glycosyl hydrolase family 35
  misc_feature (1)..(378): Homolog of NCBI NO: 1352075 NR Description: Beta-galactosidase precursor (Lactase)
  misc_feature (261)..(386): Homolog of NCBI NO: 12597826 NR Description: hypothetical protein [Arabidopsis thaliana]
  misc_feature (1)..(245): Homolog of NCBI NO: 12597826 NR Description: hypothetical protein [Arabidopsis thaliana]
MRWSWMPENLKPFMTDHRGSFRQSQLLEQIATSTDQSDYLWYRTSLEHKGEGSYTLYVNTSGHEMYAFVNGRLVGQNHSADGAFVFQLQSPVKLHSGKNYVSLLSGTVGLKNYGPSFELVPAGIAGGPVKLVGTNGTAVDLTKSSWSYKSGLAGELRQIHLDKPGYKWQSHNGTIPVNRPFTWYKTTFEAPAGEEAVVVDLLGLNKGVAWVNGNSLGRYWPSYTAAEMPGCHVCDYRGKFIAEGDGIRCLTGCGEPAQRFYHVPRSFLRAGEPNTLILFEEAGGDPTRAAFHTVAVGPVCVAAVELGDDVTLSCGGHGRVVASVDVASFGVARGSCGAYKGGCESKAALKAFTDACVGRESCTVKYTAAFAGAGCQSGALTVQATCS

SEQ ID NO: 17485 - DNA, 1742 bp, Zea mays subsp. mays
  misc_feature (1)..(1742): Ceres Seq. ID no. 12358954
  misc_feature: MA Experiment ID: 108527 Result: Down-regulated in Transcription
  misc_feature: MA Experiment 108527 PARAMETER Experiment Name: Zm_5mM_NO_P Parameter: Age (day) Value: 8
  misc_feature: MA Experiment 108527 PARAMETER Experiment Name: Zm_5mM_NO_P Parameter: Organism Value: Zea mays
  misc_feature: MA Experiment 108527 PARAMETER Experiment Name: Zm_5mM_NO_P Parameter: Plant Line Value: 35A19
  misc_feature: MA Experiment 108527 PARAMETER Experiment Name: Zm_5mM_NO_P Parameter: Timepoint (hr) Value: 6
  misc_feature: MA Experiment 108527 PARAMETER Experiment Name: Zm_5mM_NO_P Parameter: Tissue Value: Aerial
  misc_feature: MA Experiment 108527 PARAMETER Experiment Name: Zm_5mM_NO_P Parameter: Treatment Value: 5mM NO vs. No Treatment
  misc_feature: MA Experiment ID: 108536 Result: Up-regulated in Transcription
  misc_feature: MA Experiment 108536 PARAMETER Experiment Name: Zm_Meristem_P Parameter: Age (day) Value: 8
  misc_feature: MA Experiment 108536 PARAMETER Experiment Name: Zm_Meristem_P Parameter: Organism Value: Zea mays
  misc_feature: MA Experiment 108536 PARAMETER Experiment Name: Zm_Meristem_P Parameter: Plant Line Value: 35A19
  misc_feature: MA Experiment 108536 PARAMETER Experiment Name: Zm_Meristem_P Parameter: Tissue Value: Shoot Meristem vs. Above Shoot Meristem
  misc_feature: MA Experiment ID: 108544 Result: Down-regulated in Transcription
  misc_feature: MA Experiment ID: 20000487 Result: Up-regulated in Transcription
  misc_feature: MA Experiment 20000487 PARAMETER Experiment Name: Zm_50mM_NH4NO3_L_to_H_P Parameter: Organism Value: Zea mays
  misc_feature: MA Experiment 20000487 PARAMETER Experiment Name: Zm_50mM_NH4NO3_L_to_H_P Parameter: Timepoint (hr) Value: 4
  misc_feature: MA Experiment 20000487 PARAMETER Experiment Name: Zm_50mM_NH4NO3_L_to_H_P Parameter: Tissue Value: Leaves
  misc_feature: MA Experiment 20000487 PARAMETER Experiment Name: Zm_50mM_NH4NO3_L_to_H_P Parameter: Treatment Value: 50mM NH4NO3 vs. 100mM Mannitol
ctcctccattccccactgcatgcgcgctctgtcactgtcagtctcactctcgctcgctaccttggcgacgactggttgaccgccgctgccgctctagagcaggtgcccactgcccaggtcttcttctggtccttcgccggcgacaagcacaaccagggtgattcaagtactctgctttcaccaatatgtctgacggtcaggaaactgacaagaacattgagatttggaagatcaagaagttgatcaaggcattggaatctgctagaggcaatggcaccagcatgatctctctgattatgccaccacgtgaccaaatttcccgtgtgaccaagatgttgggtgatgaatatggtactgcttcaaatattaagagtagagtcaaccggcaatctgttttagcagccatcacctcagctcagcagaggctgaagctgtataacaaggttcccccaaatggacttgttctctacactggaacaattgttactgaagatggcaaggaaaagaaagtcactattgattttgagcccttcaagcctatcaatgcatccctgtacctttgtgacaataagttccacactgaagctttgaatgaactcttggaatctgatgacaagtttggtttcattgttatggatggtaatggaactctttttggtacactgagtggcaatactcgtgaagtgcttcacaaattcactgttgatctcccaaagaagcatggaagaggaggtcaatctgcccttcgctttgctcggcttcgaatggaaaaacgtcataattatgtccgaaagacagctgagcttgctacacaattttttatcaatccagctaccagtcagcctaatgttgctggacttatattggctggttctgctgattttaagacagaactgagccaatctgacatgtttgatcaacgtctccaggccaaaatacttaatgttgttgatgtttcatatggcggggagaacggttttaaccaagctattgagttgtcagctgaaattctagcaaatgtgaagttcatacaagagaaaaagctgattggaaagtattttgaagaaattagtcaagatacgggtaagtatgtgtttggtgttgatgacacactgaaagcccttgaaatgggcgctgtggaaacactgatagtgtgggaaaaccttgatgtcaacagatatgtgcttaagaatactgcaactggagaaactgttatcaaacatctgaataaagagcaagaagctgaccagagtcatttccgtgatccatctaccaatgctgagctggaggttcaggagaaaacttcgctcttggaatggtttgccaatgagtacaaaaaatttgggtgcacacttgagtttgttaccaacaaatctcaagaagggtctcagttttgcagaggatttggtggcattggtggcatgttgcgctatcaactggacatccgttctttcgacgagctttctgatgacgaaggtgtctatgaagattctgattaagcaaacgtcattcatatggctgtgctggaccctggattgatgcaattgctcgttttgttcttctattttttgcttgattagtcggtttttgaggagattaccacttgagacacttgctttgtttccttgccgcagcttacaattgcaatgtcaaccacatcattagaatctggttgatacctcatgtactgctgttatgttgacatcggctctgtccaatatttatcaagatttggtgtagcg

SEQ ID NO: 17486 - protein, 437 aa, Zea mays subsp. mays
  peptide (1)..(437): Ceres Seq. ID no. 12358955
  misc_feature (144)..(278): Pfam Name: eRF1 domain 2 Pfam Description: eRF1 domain 2
  misc_feature (1)..(437): Homolog of NCBI NO: 34878655 NR Description: similar to eukaryotic translation termination
  misc_feature (4)..(429): Homolog of NCBI NO: 21356433 NR Description: CG5605-PA [Drosophila melanogaster]
  misc_feature (1)..(435): Homolog of NCBI NO: 15213995 NR Description: Eukaryotic peptide chain release factor subunit 1
  misc_feature (1)..(437): Homolog of NCBI NO: 18250310 NR Description: eukaryotic release factor 1 [Chlamydomonas
  misc_feature (50)..(437): Homolog of NCBI NO: 22331351 NR Description: Eukaryotic peptide chain release factor subunit 1
  misc_feature (1)..(437): Homolog of NCBI NO: 15215863 NR Description: AT5g47880/MCA23_22 [Arabidopsis thaliana]
  misc_feature (1)..(437): Homolog of NCBI NO: 1155261 NR Description: eukaryotic release factor 1 homolog
  misc_feature (1)..(437): Homolog of NCBI NO: 15238829 NR Description: eukaryotic release factor 1 homolog
  misc_feature (5)..(437): Homolog of NCBI NO: 15222115 NR Description: eukaryotic peptide chain release factor subunit
  misc_feature (1)..(437): Homolog of NCBI NO: 549010 NR Description: Eukaryotic peptide chain release factor subunit (eRF1-3) (Eukaryotic release factor 1-3) (Omnipotent suppressor
MSDGQETDKNIEIWKIKKLIKALESARGNGTSMISLIMPPRDQISRVTKMLGDEYGTASNIKSRVNRQSVLAAITSAQQRLKLYNKVPPNGLVLYTGTIVTEDGKEKKVTIDFEPFKPINASLYLCDNKFHTEALNELLESDDKFGFIVMDGNGTLFGTLSGNTREVLHKFTVDLPKKHGRGGQSALRFARLRMEKRHNYVRKTAELATQFFINPATSQPNVAGLILAGSADFKTELSQSDMFDQRLQAKILNVVDVSYGGENGFNQAIELSAEILANVKFIQEKKLIGKYFEEISQDTGKYVFGVDDTLKALEMGAVETLIVWENLDVNRYVLKNTATGETVIKHLNKEQEADQSHFRDPSTNAELEVQEKTSLLEWFANEYKKFGCTLEFVTNKSQEGSQFCRGFGGIGGMLRYQLDIRSFDELSDDEGVYEDSD

SEQ ID NO: 17487 - protein, 405 aa, Zea mays subsp. mays
  peptide (1)..(405): Ceres Seq. ID no. 12358956
  misc_feature (112)..(246): Pfam Name: eRF1 domain 2 Pfam Description: eRF1 domain 2
  misc_feature (1)..(405): Homolog of NCBI NO: 34878655 NR Description: similar to eukaryotic translation termination
  misc_feature (1)..(397): Homolog of NCBI NO: 21356433 NR Description: CG5605-PA [Drosophila melanogaster]
  misc_feature (1)..(403): Homolog of NCBI NO: 15213995 NR Description: Eukaryotic peptide chain release factor subunit 1
  misc_feature (1)..(405): Homolog of NCBI NO: 18250310 NR Description: eukaryotic release factor 1 [Chlamydomonas
  misc_feature (18)..(405): Homolog of NCBI NO: 22331351 NR Description: Eukaryotic peptide chain release factor subunit 1
  misc_feature (1)..(405): Homolog of NCBI NO: 15215863 NR Description: AT5g47880/MCA23_22 [Arabidopsis thaliana]
  misc_feature (1)..(405): Homolog of NCBI NO: 1155261 NR Description: eukaryotic release factor 1 homolog
  misc_feature (1)..(405): Homolog of NCBI NO: 15238829 NR Description: eukaryotic release factor 1 homolog
  misc_feature (1)..(405): Homolog of NCBI NO: 15222115 NR Description: eukaryotic peptide chain release factor subunit
  misc_feature (1)..(405): Homolog of NCBI NO: 549010 NR Description: Eukaryotic peptide chain release factor subunit (eRF1-3) (Eukaryotic release factor 1-3) (Omnipotent suppressor
MISLIMPPRDQISRVTKMLGDEYGTASNIKSRVNRQSVLAAITSAQQRLKLYNKVPPNGLVLYTGTIVTEDGKEKKVTIDFEPFKPINASLYLCDNKFHTEALNELLESDDKFGFIVMDGNGTLFGTLSGNTREVLHKFTVDLPKKHGRGGQSALRFARLRMEKRHNYVRKTAELATQFFINPATSQPNVAGLILAGSADFKTELSQSDMFDQRLQAKILNVVDVSYGGENGFNQAIELSAEILANVKFIQEKKLIGKYFEEISQDTGKYVFGVDDTLKALEMGAVETLIVWENLDVNRYVLKNTATGETVIKHLNKEQEADQSHFRDPSTNAELEVQEKTSLLEWFANEYKKFGCTLEFVTNKSQEGSQFCRGFGGIGGMLRYQLDIRSFDELSDDEGVYEDSD

SEQ ID NO: 17488 - protein, 400 aa, Zea mays subsp. mays
  peptide (1)..(400): Ceres Seq. ID no. 12358957
  misc_feature (107)..(241): Pfam Name: eRF1 domain 2 Pfam Description: eRF1 domain 2
  misc_feature (1)..(400): Homolog of NCBI NO: 34878655 NR Description: similar to eukaryotic translation termination
  misc_feature (1)..(392): Homolog of NCBI NO: 21356433 NR Description: CG5605-PA [Drosophila melanogaster]
  misc_feature (1)..(398): Homolog of NCBI NO: 15213995 NR Description: Eukaryotic peptide chain release factor subunit 1
  misc_feature (1)..(400): Homolog of NCBI NO: 18250310 NR Description: eukaryotic release factor 1 [Chlamydomonas
  misc_feature (13)..(400): Homolog of NCBI NO: 22331351 NR Description: Eukaryotic peptide chain release factor subunit 1
  misc_feature (1)..(400): Homolog of NCBI NO: 15215863 NR Description: AT5g47880/MCA23_22 [Arabidopsis thaliana]
  misc_feature (1)..(400): Homolog of NCBI NO: 1155261 NR Description: eukaryotic release factor 1 homolog
  misc_feature (1)..(400): Homolog of NCBI NO: 15238829 NR Description: eukaryotic release factor 1 homolog
  misc_feature (1)..(400): Homolog of NCBI NO: 15222115 NR Description: eukaryotic peptide chain release factor subunit
  misc_feature (1)..(400): Homolog of NCBI NO: 549010 NR Description: Eukaryotic peptide chain release factor subunit (eRF1-3) (Eukaryotic release factor 1-3) (Omnipotent suppressor
MPPRDQISRVTKMLGDEYGTASNIKSRVNRQSVLAAITSAQQRLKLYNKVPPNGLVLYTGTIVTEDGKEKKVTIDFEPFKPINASLYLCDNKFHTEALNELLESDDKFGFIVMDGNGTLFGTLSGNTREVLHKFTVDLPKKHGRGGQSALRFARLRMEKRHNYVRKTAELATQFFINPATSQPNVAGLILAGSADFKTELSQSDMFDQRLQAKILNVVDVSYGGENGFNQAIELSAEILANVKFIQEKKLIGKYFEEISQDTGKYVFGVDDTLKALEMGAVETLIVWENLDVNRYVLKNTATGETVIKHLNKEQEADQSHFRDPSTNAELEVQEKTSLLEWFANEYKKFGCTLEFVTNKSQEGSQFCRGFGGIGGMLRYQLDIRSFDELSDDEGVYEDSD

SEQ ID NO: 17489 - DNA, 1392 bp, Zea mays subsp. mays; identical to SEQ ID NO: 15767
  misc_feature (1)..(1392): Ceres Seq. ID no. 12381052
  misc_feature: MA Experiment ID: 108503 Result: Up-regulated in Transcription
  misc_feature: MA Experiment 108503 PARAMETER Experiment Name: Zm_Drought_P Parameter: Age (day) Value: 8
  misc_feature: MA Experiment 108503 PARAMETER Experiment Name: Zm_Drought_P Parameter: Organism Value: Zea mays
  misc_feature: MA Experiment 108503 PARAMETER Experiment Name: Zm_Drought_P Parameter: Plant Line Value: 35A19
  misc_feature: MA Experiment 108503 PARAMETER Experiment Name: Zm_Drought_P Parameter: Timepoint (hr) Value: 6
  misc_feature: MA Experiment 108503 PARAMETER Experiment Name: Zm_Drought_P Parameter: Tissue Value: Aerial
  misc_feature: MA Experiment 108503 PARAMETER Experiment Name: Zm_Drought_P Parameter: Treatment Value: Drought vs. No Drought
  misc_feature: MA Experiment ID: 108504 Result: Up-regulated in Transcription
  misc_feature: MA Experiment 108504 PARAMETER Experiment Name: Zm_Drought_P Parameter: Age (day) Value: 8
  misc_feature: MA Experiment 108504 PARAMETER Experiment Name: Zm_Drought_P Parameter: Organism Value: Zea mays
  misc_feature: MA Experiment 108504 PARAMETER Experiment Name: Zm_Drought_P Parameter: Plant Line Value: 35A19
  misc_feature: MA Experiment 108504 PARAMETER Experiment Name: Zm_Drought_P Parameter: Timepoint (hr) Value: 12
  misc_feature: MA Experiment 108504 PARAMETER Experiment Name: Zm_Drought_P Parameter: Tissue Value: Aerial
  misc_feature: MA Experiment 108504 PARAMETER Experiment Name: Zm_Drought_P Parameter: Treatment Value: Drought vs. No Drought
  misc_feature: MA Experiment ID: 108528 Result: Up-regulated in Transcription
  misc_feature: MA Experiment 108528 PARAMETER Experiment Name: Zm_Imbibed_Seeds_P Parameter: Age (day) Value: 5 vs. 2
  misc_feature: MA Experiment 108528 PARAMETER Experiment Name: Zm_Imbibed_Seeds_P Parameter: Organism Value: Zea mays
  misc_feature: MA Experiment 108528 PARAMETER Experiment Name: Zm_Imbibed_Seeds_P Parameter: Plant Line Value: 35A19
  misc_feature: MA Experiment 108528 PARAMETER Experiment Name: Zm_Imbibed_Seeds_P Parameter: Tissue Value: Aerial vs. Embryo
  misc_feature: MA Experiment ID: 108530 Result: Up-regulated in Transcription
  misc_feature: MA Experiment 108530 PARAMETER Experiment Name: Zm_Imbibed_Seeds_P Parameter: Age (day) Value: 6 vs. 2
  misc_feature: MA Experiment 108530 PARAMETER Experiment Name: Zm_Imbibed_Seeds_P Parameter: Organism Value: Zea mays
  misc_feature: MA Experiment 108530 PARAMETER Experiment Name: Zm_Imbibed_Seeds_P Parameter: Plant Line Value: 35A19
  misc_feature: MA Experiment 108530 PARAMETER Experiment Name: Zm_Imbibed_Seeds_P Parameter: Tissue Value: Aerial vs. Embryo
  misc_feature: MA Experiment ID: 108533 Result: Down-regulated in Transcription
  misc_feature: MA Experiment 108533 PARAMETER Experiment Name: Zm_4deg_Cold_P Parameter: Age (hr) Value: 8
  misc_feature: MA Experiment 108533 PARAMETER Experiment Name: Zm_4deg_Cold_P Parameter: Organism Value: Zea mays
  misc_feature: MA Experiment 108533 PARAMETER Experiment Name: Zm_4deg_Cold_P Parameter: Plant Line Value: 35A19
  misc_feature: MA Experiment 108533 PARAMETER Experiment Name: Zm_4deg_Cold_P Parameter: Temperature (deg C) Value: 4 vs. 22
  misc_feature: MA Experiment 108533 PARAMETER Experiment Name: Zm_4deg_Cold_P Parameter: Timepoint (hr) Value: 1
  misc_feature: MA Experiment 108533 PARAMETER Experiment Name: Zm_4deg_Cold_P Parameter: Tissue Value: Aerial
  misc_feature: MA Experiment ID: 108534 Result: Down-regulated in Transcription
  misc_feature: MA Experiment 108534 PARAMETER Experiment Name: Zm_4deg_Cold_P Parameter: Age (hr) Value: 8
  misc_feature: MA Experiment 108534 PARAMETER Experiment Name: Zm_4deg_Cold_P Parameter: Organism Value: Zea mays
  misc_feature: MA Experiment 108534 PARAMETER Experiment Name: Zm_4deg_Cold_P Parameter: Plant Line Value: 35A19
  misc_feature: MA Experiment 108534 PARAMETER Experiment Name: Zm_4deg_Cold_P Parameter: Temperature (deg C) Value: 4 vs. 22
  misc_feature: MA Experiment 108534 PARAMETER Experiment Name: Zm_4deg_Cold_P Parameter: Timepoint (hr) Value: 6
  misc_feature: MA Experiment 108534 PARAMETER Experiment Name: Zm_4deg_Cold_P Parameter: Tissue Value: Aerial
  misc_feature: MA Experiment ID: 108539 Result: Up-regulated in Transcription
  misc_feature: MA Experiment 108539 PARAMETER Experiment Name: Zm_20percent_PEG_P Parameter: Age (day) Value: 8
  misc_feature: MA Experiment 108539 PARAMETER Experiment Name: Zm_20percent_PEG_P Parameter: Organism Value: Zea mays
  misc_feature: MA Experiment 108539 PARAMETER Experiment Name: Zm_20percent_PEG_P Parameter: Plant Line Value: 35A19
  misc_feature: MA Experiment 108539 PARAMETER Experiment Name: Zm_20percent_PEG_P Parameter: Timepoint (hr) Value: 1
  misc_feature: MA Experiment 108539 PARAMETER Experiment Name: Zm_20percent_PEG_P Parameter: Tissue Value: Aerial
  misc_feature: MA Experiment 108539 PARAMETER Experiment Name: Zm_20percent_PEG_P Parameter: Treatment Value: 20percent PEG vs. No Treatment
  misc_feature: MA Experiment ID: 108540 Result: Up-regulated in Transcription
  misc_feature: MA Experiment 108540 PARAMETER Experiment Name: Zm_20percent_PEG_P Parameter: Age (day) Value: 8
  misc_feature: MA Experiment 108540 PARAMETER Experiment Name: Zm_20percent_PEG_P Parameter: Organism Value: Zea mays
  misc_feature: MA Experiment 108540 PARAMETER Experiment Name: Zm_20percent_PEG_P Parameter: Plant Line Value: 35A19
  misc_feature: MA Experiment 108540 PARAMETER Experiment Name: Zm_20percent_PEG_P Parameter: Timepoint (hr) Value: 6
  misc_feature: MA Experiment 108540 PARAMETER Experiment Name: Zm_20percent_PEG_P Parameter: Tissue Value: Aerial
  misc_feature: MA Experiment 108540 PARAMETER Experiment Name: Zm_20percent_PEG_P Parameter: Treatment Value: 20percent PEG vs. No Treatment
  misc_feature: MA Experiment ID: 108542 Result: Up-regulated in Transcription
  misc_feature: MA Experiment 108542 PARAMETER Experiment Name: Zm_150mM_NaCl_P Parameter: Age (day) Value: 8
  misc_feature: MA Experiment 108542 PARAMETER Experiment Name: Zm_150mM_NaCl_P Parameter: Organism Value: Zea mays
  misc_feature: MA Experiment 108542 PARAMETER Experiment Name: Zm_150mM_NaCl_P Parameter: Plant Line Value: 35A19
  misc_feature: MA Experiment 108542 PARAMETER Experiment Name: Zm_150mM_NaCl_P Parameter: Timepoint (hr) Value: 6
  misc_feature: MA Experiment 108542 PARAMETER Experiment Name: Zm_150mM_NaCl_P Parameter: Tissue Value: Aerial
  misc_feature: MA Experiment 108542 PARAMETER Experiment Name: Zm_150mM_NaCl_P Parameter: Treatment Value: 150mM NaCl vs. No Treatment
  misc_feature: MA Experiment ID: 108543 Result: Down-regulated in Transcription
  misc_feature: MA Experiment ID: 108556 Result: Up-regulated in Transcription
  misc_feature: MA Experiment 108556 PARAMETER Experiment Name: Zm_Drought_P Parameter: Age (day) Value: 9
  misc_feature: MA Experiment 108556 PARAMETER Experiment Name: Zm_Drought_P Parameter: Organism Value: Zea mays
  misc_feature: MA Experiment 108556 PARAMETER Experiment Name: Zm_Drought_P Parameter: Plant Line Value: 35A19
  misc_feature: MA Experiment 108556 PARAMETER Experiment Name: Zm_Drought_P Parameter: Timepoint (hr) Value: 24
  misc_feature: MA Experiment 108556 PARAMETER Experiment Name: Zm_Drought_P Parameter: Tissue Value: Aerial
  misc_feature: MA Experiment 108556 PARAMETER Experiment Name: Zm_Drought_P Parameter: Treatment Value: Drought vs. No Drought
  misc_feature: MA Experiment ID: 108597 Result: Up-regulated in Transcription
  misc_feature: MA Experiment 108597 PARAMETER Experiment Name: Zm_100uM_ABA_P Parameter: Age (day) Value: 9
  misc_feature: MA Experiment 108597 PARAMETER Experiment Name: Zm_100uM_ABA_P Parameter: Organism Value: Zea mays
  misc_feature: MA Experiment 108597 PARAMETER Experiment Name: Zm_100uM_ABA_P Parameter: Plant Line Value: 35A19
  misc_feature: MA Experiment 108597 PARAMETER Experiment Name: Zm_100uM_ABA_P Parameter: Timepoint (hr) Value: 24
  misc_feature: MA Experiment 108597 PARAMETER Experiment Name: Zm_100uM_ABA_P Parameter: Tissue Value: Aerial
  misc_feature: MA Experiment 108597 PARAMETER Experiment Name: Zm_100uM_ABA_P Parameter: Treatment Value: 100uM ABA vs. No Treatment
  misc_feature: MA Experiment ID: 108689 Result: Up-regulated in Transcription
  misc_feature: MA Experiment 108689 PARAMETER Experiment Name: Zm_Drought_Roots_P Parameter: Age (day) Value: 9
  misc_feature: MA Experiment 108689 PARAMETER Experiment Name: Zm_Drought_Roots_P Parameter: Organism Value: Zea mays
  misc_feature: MA Experiment 108689 PARAMETER Experiment Name: Zm_Drought_Roots_P Parameter: Plant Line Value: 35A19
  misc_feature: MA Experiment 108689 PARAMETER Experiment Name: Zm_Drought_Roots_P Parameter: Timepoint (hr) Value: 24
  misc_feature: MA Experiment 108689 PARAMETER Experiment Name: Zm_Drought_Roots_P Parameter: Tissue Value: Roots
  misc_feature: MA Experiment 108689 PARAMETER Experiment Name: Zm_Drought_Roots_P Parameter: Treatment Value: Drought vs. No Drought
  misc_feature: MA Experiment ID: 20000477 Result: Up-regulated in Transcription
  misc_feature: MA Experiment 20000477 PARAMETER Experiment Name: Zm_5mM_SA_P Parameter: Age (day) Value: 10
  misc_feature: MA Experiment 20000477 PARAMETER Experiment Name: Zm_5mM_SA_P Parameter: Organism Value: Zea mays
  misc_feature: MA Experiment 20000477 PARAMETER Experiment Name: Zm_5mM_SA_P Parameter: Plant Line Value: 35A19
  misc_feature: MA Experiment 20000477 PARAMETER Experiment Name: Zm_5mM_SA_P Parameter: Timepoint (hr) Value: 48
  misc_feature: MA Experiment 20000477 PARAMETER Experiment Name: Zm_5mM_SA_P Parameter: Tissue Value: Aerial
  misc_feature: MA Experiment 20000477 PARAMETER Experiment Name: Zm_5mM_SA_P Parameter: Treatment Value: 5mM SA vs. No Treatment
  misc_feature: MA Experiment ID: 20000478 Result: Up-regulated in Transcription
  misc_feature: MA Experiment 20000478 PARAMETER Experiment Name: Zm_5mM_SA_P Parameter: Age (day) Value: 11
  misc_feature: MA Experiment 20000478 PARAMETER Experiment Name: Zm_5mM_SA_P Parameter: Organism Value: Zea mays
  misc_feature: MA Experiment 20000478 PARAMETER Experiment Name: Zm_5mM_SA_P Parameter: Plant Line Value: 35A19
  misc_feature: MA Experiment 20000478 PARAMETER Experiment Name: Zm_5mM_SA_P Parameter: Timepoint (hr) Value: 72
  misc_feature: MA Experiment 20000478 PARAMETER Experiment Name: Zm_5mM_SA_P Parameter: Tissue Value: Aerial
  misc_feature: MA Experiment 20000478 PARAMETER Experiment Name: Zm_5mM_SA_P Parameter: Treatment Value: 5mM SA vs. No Treatment
  misc_feature: MA Experiment ID: 20000479 Result: Up-regulated in Transcription
  misc_feature: MA Experiment 20000479 PARAMETER Experiment Name: Zm_Drought_P Parameter: Age (day) Value: 10
  misc_feature: MA Experiment 20000479 PARAMETER Experiment Name: Zm_Drought_P Parameter: Organism Value: Zea mays
  misc_feature: MA Experiment 20000479 PARAMETER Experiment Name: Zm_Drought_P Parameter: Plant Line Value: 35A19
  misc_feature: MA Experiment 20000479 PARAMETER Experiment Name: Zm_Drought_P Parameter: Timepoint (hr) Value: 48
  misc_feature: MA Experiment 20000479 PARAMETER Experiment Name: Zm_Drought_P Parameter: Tissue Value: Aerial
  misc_feature: MA Experiment 20000479 PARAMETER Experiment Name: Zm_Drought_P Parameter: Treatment Value: Drought vs. No Drought
  misc_feature: MA Experiment ID: 20000480 Result: Up-regulated in Transcription
  misc_feature: MA Experiment 20000480 PARAMETER Experiment Name: Zm_Drought_P Parameter: Age (day) Value: 11
  misc_feature: MA Experiment 20000480 PARAMETER Experiment Name: Zm_Drought_P Parameter: Organism Value: Zea mays
  misc_feature: MA Experiment 20000480 PARAMETER Experiment Name: Zm_Drought_P Parameter: Plant Line Value: 35A19
  misc_feature: MA Experiment 20000480 PARAMETER Experiment Name: Zm_Drought_P Parameter: Timepoint (hr) Value: 72
  misc_feature: MA Experiment 20000480 PARAMETER Experiment Name: Zm_Drought_P Parameter: Tissue Value: Aerial
  misc_feature: MA Experiment 20000480 PARAMETER Experiment Name: Zm_Drought_P Parameter: Treatment Value: Drought vs. No Drought
  misc_feature: MA Experiment ID: 20000488 Result: Down-regulated in Transcription
  misc_feature: MA Experiment 20000488 PARAMETER Experiment Name: Zm_50mM_NH4NO3_L_to_H_P Parameter: Organism Value: Zea mays
  misc_feature: MA Experiment 20000488 PARAMETER Experiment Name: Zm_50mM_NH4NO3_L_to_H_P Parameter: Timepoint (hr) Value: 8
  misc_feature: MA Experiment 20000488 PARAMETER Experiment Name: Zm_50mM_NH4NO3_L_to_H_P Parameter: Tissue Value: Leaves
  misc_feature: MA Experiment 20000488 PARAMETER Experiment Name: Zm_50mM_NH4NO3_L_to_H_P Parameter: Treatment Value: 50mM NH4NO3 vs. 100mM Mannitol
  misc_feature: MA Experiment ID: 20000534 Result: Down-regulated in Transcription
  misc_feature: MA Experiment 20000534 PARAMETER Experiment Name: Zm_Hybrid_Pollen_P Parameter: Age (day) Value: 8
  misc_feature: MA Experiment 20000534 PARAMETER Experiment Name: Zm_Hybrid_Pollen_P Parameter: Organism Value: Zea mays
  misc_feature: MA Experiment 20000534 PARAMETER Experiment Name: Zm_Hybrid_Pollen_P Parameter: Plant Line Value: 35A19
  misc_feature: MA Experiment 20000534 PARAMETER Experiment Name: Zm_Hybrid_Pollen_P Parameter: Tissue Value: Pollen vs. Aerial
  misc_feature: MA Experiment ID: 20000535 Result: Up-regulated in Transcription
  misc_feature: MA Experiment 20000535 PARAMETER Experiment Name: Zm_Hybrid_Seed_Dev_P Parameter: DAP Value: 30 vs. 12
  misc_feature: MA Experiment 20000535 PARAMETER Experiment Name: Zm_Hybrid_Seed_Dev_P Parameter: Organism Value: Zea mays
  misc_feature: MA Experiment 20000535 PARAMETER Experiment Name: Zm_Hybrid_Seed_Dev_P Parameter: Plant Line Value: 35A19
  misc_feature: MA Experiment 20000535 PARAMETER Experiment Name: Zm_Hybrid_Seed_Dev_P Parameter: Tissue Value: Embryo vs. Unfert Floret

SEQ ID NO: 17490 - protein, 401 aa, Zea mays subsp. mays; identical to SEQ ID NO: 15768
  peptide (1)..(401): Ceres Seq. ID no. 12381053
  misc_feature (141)..(382): Pfam Name: Protein phosphatase 2C Pfam Description: Protein phosphatase 2C
  misc_feature (141)..(382): Pfam Name: Protein phosphatase 2C Pfam Description: Protein phosphatase 2C
  misc_feature (356)..(392): Homolog of NCBI NO: 21537020 NR Description: protein phosphatase 2C, putative [Arabidopsis
  misc_feature (101)..(382): Homolog of NCBI NO: 21537020 NR Description: protein phosphatase 2C, putative [Arabidopsis
  misc_feature (356)..(392): Homolog of NCBI NO: 15222398 NR Description: protein phosphatase 2C (PP2C), putative
  misc_feature (101)..(382): Homolog of NCBI NO: 15222398 NR Description: protein phosphatase 2C (PP2C), putative
  misc_feature (105)..(392): Homolog of NCBI NO: 10432446 NR Description: protein phosphatase 2C [Nicotiana tabacum]
  misc_feature (356)..(392): Homolog of NCBI NO: 21537020 NR Description: protein phosphatase 2C, putative [Arabidopsis
  misc_feature (356)..(392): Homolog of NCBI NO: 15222398 NR Description: protein phosphatase 2C (PP2C), putative
  misc_feature (105)..(392): Homolog of NCBI NO: 10432446 NR Description: protein phosphatase 2C [Nicotiana tabacum]
  misc_feature (141)..(391): Homolog of NCBI NO: 4336434 NR Description: nodule-enhanced protein phosphatase type 2C
  misc_feature (39)..(372): Homolog of NCBI NO: 34908256 NR Description: putative protein phosphatase 2C
  misc_feature (361)..(392): Homolog of NCBI NO: 34908256 NR Description: putative protein phosphatase 2C
  misc_feature (44)..(349): Homolog of NCBI NO: 34902050 NR Description: putative Serine/threonine phosphatases
  misc_feature (335)..(392): Homolog of NCBI NO: 34902050 NR Description: putative Serine/threonine phosphatases
  misc_feature (101)..(382): Homolog of NCBI NO: 15222398 NR Description: protein phosphatase 2C (PP2C), putative
  misc_feature (101)..(382): Homolog of NCBI NO: 21537020 NR Description: protein phosphatase 2C, putative [Arabidopsis
  misc_feature (335)..(392): Homolog of NCBI NO: 34902050 NR Description: putative Serine/threonine phosphatases
  misc_feature (44)..(349): Homolog of NCBI NO: 34902050 NR Description: putative Serine/threonine phosphatases
  misc_feature (361)..(392): Homolog of NCBI NO: 34908256 NR Description: putative protein phosphatase 2C
  misc_feature (39)..(372): Homolog of NCBI NO: 34908256 NR Description: putative protein phosphatase 2C
  misc_feature (141)..(391): Homolog of NCBI NO: 4336434 NR Description: nodule-enhanced protein phosphatase type 2C

SEQ ID NO: 17491 - protein, 375 aa, Zea mays subsp. mays; identical to SEQ ID NO: 15769
  peptide (1)..(375): Ceres Seq. ID no. 12381054
  misc_feature (115)..(356): Pfam Name: Protein phosphatase 2C Pfam Description: Protein phosphatase 2C
  misc_feature (115)..(356): Pfam Name: Protein phosphatase 2C Pfam Description: Protein phosphatase 2C
  misc_feature (330)..(366): Homolog of NCBI NO: 21537020 NR Description: protein phosphatase 2C, putative [Arabidopsis
  misc_feature (75)..(356): Homolog of NCBI NO: 21537020 NR Description: protein phosphatase 2C, putative [Arabidopsis
  misc_feature (330)..(366): Homolog of NCBI NO: 15222398 NR Description: protein phosphatase 2C (PP2C), putative
  misc_feature (75)..(356): Homolog of NCBI NO: 15222398 NR Description: protein phosphatase 2C (PP2C), putative
  misc_feature (79)..(366): Homolog of NCBI NO: 10432446 NR Description: protein phosphatase 2C [Nicotiana tabacum]
  misc_feature (330)..(366): Homolog of NCBI NO: 21537020 NR Description: protein phosphatase 2C, putative [Arabidopsis
  misc_feature (330)..(366): Homolog of NCBI NO: 15222398 NR Description: protein phosphatase 2C (PP2C), putative
  misc_feature (79)..(366): Homolog of NCBI NO: 10432446 NR Description: protein phosphatase 2C [Nicotiana tabacum]
  misc_feature (115)..(365): Homolog of NCBI NO: 4336434 NR Description: nodule-enhanced protein phosphatase type 2C
  misc_feature (13)..(346): Homolog of NCBI NO: 34908256 NR Description: putative protein phosphatase 2C
  misc_feature (335)..(366): Homolog of NCBI NO: 34908256 NR Description: putative protein phosphatase 2C
  misc_feature (18)..(323): Homolog of NCBI NO: 34902050 NR Description: putative Serine/threonine phosphatases
  misc_feature (309)..(366): Homolog of NCBI NO: 34902050 NR Description: putative Serine/threonine phosphatases
  misc_feature (75)..(356): Homolog of NCBI NO: 15222398 NR Description: protein phosphatase 2C (PP2C), putative
  misc_feature (75)..(356): Homolog of NCBI NO: 21537020 NR Description: protein phosphatase 2C, putative [Arabidopsis
  misc_feature (309)..(366): Homolog of NCBI NO: 34902050 NR Description: putative Serine/threonine phosphatases
  misc_feature (18)..(323): Homolog of NCBI NO: 34902050 NR Description: putative Serine/threonine phosphatases
  misc_feature (335)..(366): Homolog of NCBI NO: 34908256 NR Description: putative protein phosphatase 2C
  misc_feature (13)..(346): Homolog of NCBI NO: 34908256 NR Description: putative protein phosphatase 2C
  misc_feature (115)..(365): Homolog of NCBI NO: 4336434 NR Description: nodule-enhanced protein phosphatase type 2C

SEQ ID NO: 17492 - protein, 286 aa, Zea mays subsp. mays; identical to SEQ ID NO: 15770
  peptide (1)..(286): Ceres Seq. ID no. 12381055
  misc_feature (26)..(267): Pfam Name: Protein phosphatase 2C Pfam Description: Protein phosphatase 2C
  misc_feature (26)..(267): Pfam Name: Protein phosphatase 2C Pfam Description: Protein phosphatase 2C
  misc_feature (241)..(277): Homolog of NCBI NO: 21537020 NR Description: protein phosphatase 2C, putative [Arabidopsis
  misc_feature (1)..(267): Homolog of NCBI NO: 21537020 NR Description: protein phosphatase 2C, putative [Arabidopsis
  misc_feature (241)..(277): Homolog of NCBI NO: 15222398 NR Description: protein phosphatase 2C (PP2C), putative
  misc_feature (1)..(267): Homolog of NCBI NO: 15222398 NR Description: protein phosphatase 2C (PP2C), putative
  misc_feature (1)..(277): Homolog of NCBI NO: 10432446 NR Description: protein phosphatase 2C [Nicotiana tabacum]
  misc_feature (241)..(277): Homolog of NCBI NO: 21537020 NR Description: protein phosphatase 2C, putative [Arabidopsis
  misc_feature (241)..(277): Homolog of NCBI NO: 15222398 NR Description: protein phosphatase 2C (PP2C), putative
  misc_feature (1)..(277): Homolog of NCBI NO: 10432446 NR Description: protein phosphatase 2C [Nicotiana tabacum]
  misc_feature (26)..(276): Homolog of NCBI NO: 4336434 NR Description: nodule-enhanced protein phosphatase type 2C
  misc_feature (1)..(257): Homolog of NCBI NO: 34908256 NR Description: putative protein phosphatase 2C
  misc_feature (246)..(277): Homolog of NCBI NO: 34908256 NR Description: putative protein phosphatase 2C
  misc_feature (1)..(234): Homolog of NCBI NO: 34902050 NR Description: putative Serine/threonine phosphatases
  misc_feature (220)..(277): Homolog of NCBI NO: 34902050 NR Description: putative Serine/threonine phosphatases
  misc_feature (1)..(267): Homolog of NCBI NO: 15222398 NR Description: protein phosphatase 2C (PP2C), putative
  misc_feature (1)..(267): Homolog of NCBI NO: 21537020 NR Description: protein phosphatase 2C, putative [Arabidopsis
  misc_feature (220)..(277): Homolog of NCBI NO: 34902050 NR Description: putative Serine/threonine phosphatases
  misc_feature (1)..(234): Homolog of NCBI NO: 34902050 NR Description: putative Serine/threonine phosphatases
  misc_feature (246)..(277): Homolog of NCBI NO: 34908256 NR Description: putative protein phosphatase 2C
  misc_feature (1)..(257): Homolog of NCBI NO: 34908256 NR Description: putative protein phosphatase 2C
  misc_feature (26)..(276): Homolog of NCBI NO: 4336434 NR Description: nodule-enhanced protein phosphatase type 2C

SEQ ID NO: 17493 - DNA, 1486 bp, Zea mays subsp. mays
  misc_feature (1)..(1486): Ceres Seq. ID no. 12366543
  misc_feature: MA Experiment ID: 108522 Result: Down-regulated in Transcription
  misc_feature: MA Experiment 108522 PARAMETER Experiment Name: Zm_42deg_Heat_P Parameter: Age (day) Value: 8
  misc_feature: MA Experiment 108522 PARAMETER Experiment Name: Zm_42deg_Heat_P Parameter: Organism Value: Zea mays
  misc_feature: MA Experiment 108522 PARAMETER Experiment Name: Zm_42deg_Heat_P Parameter: Plant Line Value: 35A19
  misc_feature: MA Experiment 108522 PARAMETER Experiment Name: Zm_42deg_Heat_P Parameter: Temperature (deg C) Value: 42 vs. 22
  misc_feature: MA Experiment 108522 PARAMETER Experiment Name: Zm_42deg_Heat_P Parameter: Timepoint (hr) Value: 1
  misc_feature: MA Experiment 108522 PARAMETER Experiment Name: Zm_42deg_Heat_P Parameter: Tissue Value: Aerial
  misc_feature: MA Experiment ID: 108527 Result: Down-regulated in Transcription
  misc_feature: MA Experiment 108527 PARAMETER Experiment Name: Zm_5mM_NO_P Parameter: Age (day) Value: 8
  misc_feature: MA Experiment 108527 PARAMETER Experiment Name: Zm_5mM_NO_P Parameter: Organism Value: Zea mays
  misc_feature: MA Experiment 108527 PARAMETER Experiment Name: Zm_5mM_NO_P Parameter: Plant Line Value: 35A19
  misc_feature: MA Experiment 108527 PARAMETER Experiment Name: Zm_5mM_NO_P Parameter: Timepoint (hr) Value: 6
  misc_feature: MA Experiment 108527 PARAMETER Experiment Name: Zm_5mM_NO_P Parameter: Tissue Value: Aerial
  misc_feature: MA Experiment 108527 PARAMETER Experiment Name: Zm_5mM_NO_P Parameter: Treatment Value: 5mM NO vs. No Treatment
aataataaaaagattctcgattcgatttactcgccaattttcagtgagcggcggcgatcggcttcggatcggcgcagcgcggcggagcggagatggttgccgtggcggtggatggcctgatccgcggtgcggacgccgtgccggcggcggagagggaagcggtgagggcggcagctgcggaggcggcggccaagggcggtgagggggaatcggggaaggaggaggtgagggagtatgagagcgacatgaggaagctggaggagctgctttctaagctgaacccctcggcggaggagttcgtgccgcagtcccgccgccgcgtggacggcggcgctccccgcctttcggccgacgcgcccgtgttcgtgtcgccggcgatcgactactacgcgcgccaccaccagctcccgccgccgccgcttctgcagcagcagcagccgatgcacgtgctgcagtttgtgggtggcgtcggcggggttggcatgggtggcggcggggggatggactccagcagcgacggatccgccaatggtcagccgaatcgacggagaaggaacggtttcatccaggggaggagaaggatgatgggtgcccggcctcgtcgagctgacagggaggatagtgtcggcggacagtctatgtctctgacgttgatcagcatgtaactgaacagaaacttgctgaagttttttcaacctgtggacaggtggtagattgccgtatctgtggtgatcctaactcagtgcttcgttttgcttttatcgagtttgctgatgacgttgctgcacaagcagcactagcacttggtggaaccgtgcttggcttttatcctgtcaaggttctgccatcaaagacagcaattttacctgtgaaccctaaatttcttcctcacactgatgatgagaaagaaatggtatccaggactgtgtattgtactaacattgacaagaagatcgcagaagatgaagtgaagcaattctttgagggaacatgtggtgaagtttctcgtctgaggctacttggtgattatgtgcactccacatgcatcgcttttgttgagtttgtccaagcagatagtgctattctcgctctgaactgcagtggcattgttcttggaacgcttcctgttagggtgagcccatcaaagacaccagtccgctcgcgatcgccccgtgtgacgtcatactgaattcggctcatctgaagccgtcgtccagggcagcaaatttctgggcaacaaagccctagtcgtgtggccttagagactgccgcatcgcggataagtaattgtcgttgagcagagttctcgttggttaaagtccagtctagtaggaggcgcagagacccgtctgtatggtcgctgggagatctatcttgacctcctttttctgttctttttggtcttagttatcgtggttggattctatagcagccttgacaggcattcgaacaacaatgtttatggttatcctatccgctttggact

SEQ ID NO: 17494 - protein, 190 aa, Zea mays subsp. mays
  peptide (1)..(190): Ceres Seq. ID no. 12366544
  misc_feature (12)..(91): Homolog of NCBI NO: 34903832 NR Description: ATT4F9_7(AL049523|pid:g4539439) Arabidopsis
  misc_feature (150)..(178): Homolog of NCBI NO: 8671859 NR Description: Contains similarity to RNA-binding protein from thaliana gi|2129727 and contains RNA recognition PF|00076 domain.
  misc_feature (38)..(83): Homolog of NCBI NO: 15229132 NR Description: RNA-binding protein, putative; protein id:
  misc_feature (1)..(73): Homolog of NCBI NO: 1174153 NR Description: RNA-binding protein
  misc_feature (1)..(73): Homolog of NCBI NO: 15235177 NR Description: RNA-binding protein RBP37
  misc_feature (150)..(178): Homolog of NCBI NO: 15220902 NR Description: RNA-binding protein, putative; protein id:
  misc_feature (37)..(79): Homolog of NCBI NO: 15223304 NR Description: RNA-binding protein, putative
MVAVAVDGLIRGADAVPAAEREAVRAAAAEAAAKGGEGESGKEEVREYESDMRKLEELLSKLNPSAEEFVPQSRRRVDGGAPRLSADAPVFVSPAIDYYARHHQLPPPPLLQQQQPMHVLQFVGGVGGVGMGGGGGMDSSSDGSANGQPNRRRRNGFIQGRRRMMGARPRRADREDSVGGQSMSLTLISM

SEQ ID NO: 17495 - protein, 139 aa, Zea mays subsp. mays
  peptide (1)..(139): Ceres Seq. ID no. 12366545
  misc_feature (1)..(40): Homolog of NCBI NO: 34903832 NR Description: ATT4F9_7(AL049523|pid:g4539439) Arabidopsis
  misc_feature (99)..(127): Homolog of NCBI NO: 8671859 NR Description: Contains similarity to RNA-binding protein from thaliana gi|2129727 and contains RNA recognition PF|00076 domain.
  misc_feature (1)..(32): Homolog of NCBI NO: 15229132 NR Description: RNA-binding protein, putative; protein id:
  misc_feature (1)..(22): Homolog of NCBI NO: 1174153 NR Description: RNA-binding protein
  misc_feature (1)..(22): Homolog of NCBI NO: 15235177 NR Description: RNA-binding protein RBP37
  misc_feature (99)..(127): Homolog of NCBI NO: 15220902 NR Description: RNA-binding protein, putative; protein id:
  misc_feature (1)..(28): Homolog of NCBI NO: 15223304 NR Description: RNA-binding protein, putative
MRKLEELLSKLNPSAEEFVPQSRRRVDGGAPRLSADAPVFVSPAIDYYARHHQLPPPPLLQQQQPMHVLQFVGGVGGVGMGGGGGMDSSSDGSANGQPNRRRRNGFIQGRRRMMGARPRRADREDSVGGQSMSLTLISM

SEQ ID NO: 17496 - DNA, 2138 bp, Zea mays subsp. mays
  misc_feature (1)..(2138): Ceres Seq. ID no. 12369733
  misc_feature: MA Experiment ID: 108529 Result: Up-regulated in Transcription
  misc_feature: MA Experiment 108529 PARAMETER Experiment Name: Zm_Imbibed_Seeds_P Parameter: Age (day) Value: 5 vs. 2
  misc_feature: MA Experiment 108529 PARAMETER Experiment Name: Zm_Imbibed_Seeds_P Parameter: Organism Value: Zea mays
  misc_feature: MA Experiment 108529 PARAMETER Experiment Name: Zm_Imbibed_Seeds_P Parameter: Plant Line Value: 35A19
  misc_feature: MA Experiment 108529 PARAMETER Experiment Name: Zm_Imbibed_Seeds_P Parameter: Tissue Value: Roots vs. Embryo
  misc_feature: MA Experiment ID: 108535 Result: Down-regulated in Transcription
  misc_feature: MA Experiment 108535 PARAMETER Experiment Name: Zm_Meristem_P Parameter: Age (day) Value: 8
  misc_feature: MA Experiment 108535 PARAMETER Experiment Name: Zm_Meristem_P Parameter: Organism Value: Zea mays
  misc_feature: MA Experiment 108535 PARAMETER Experiment Name: Zm_Meristem_P Parameter: Plant Line Value: 35A19
  misc_feature: MA Experiment 108535 PARAMETER Experiment Name: Zm_Meristem_P Parameter: Tissue Value: Root Meristem vs. Above Root Meristem
  misc_feature: MA Experiment ID: 20000488 Result: Down-regulated in Transcription
  misc_feature: MA Experiment 20000488 PARAMETER Experiment Name: Zm_50mM_NH4NO3_L_to_H_P Parameter: Organism Value: Zea mays
  misc_feature: MA Experiment 20000488 PARAMETER Experiment Name: Zm_50mM_NH4NO3_L_to_H_P Parameter: Timepoint (hr) Value: 8
  misc_feature: MA Experiment 20000488 PARAMETER Experiment Name: Zm_50mM_NH4NO3_L_to_H_P Parameter: Tissue Value: Leaves
  misc_feature: MA Experiment 20000488 PARAMETER Experiment Name: Zm_50mM_NH4NO3_L_to_H_P Parameter: Treatment Value: 50mM NH4NO3 vs. 100mM Mannitol
gcacgagaccattacctagaacatcctaatcgaaaaaagacgcatcgcttccttgtccatcctacctccccttccccccgcccaaatcccgtgacggtcgccgcccccgccgtgctctcgcccgcgcgggagacgacgcagcacccccccgcgtaggatccgcggcggtcggcaggatggtggtggccacggaggaaatggtggtctactgctttgacaccctcgtcgcctatttcaccggcgagcggccgccgcctcccgccttcgaggatggaaaccagtaagcctccccgcagcgatcgaaaccgggccgcgttgcccccatatcgaggaggtggttttggatccatttcgatatagggttaggccaattcgtgttagatttgggcaaaaggcggcgccttggtagttttggtttcggctcggctcctgttgcgactgattcgcgatccgatctgattgactgtttgttggtcctggcgattgcggaatcgtgtggtcttagttttcgttgcaaggcagaggcgaagtgaagtattcacacttcaatggccacgtacctcgcctttcggcagttgccagcttcctacctctagcgattgtctgacggagaggacaaggaatctcactgctacacatctgagattatgatttaagtaggacagtcagtttaatcctaaggcattcagattctttgggaagttgggaggttaaacaggatgagctttcgtgttctgactgtgacgcactgatgtttcttattcatactccaggattcagacttttaattgagatcctttcaaccgtgtagtccacattaatttgtatggcttgtaaggcatcattgttctagcatacatgtttttaactcattgggtcaatttttttgtaactttggcccattgtttgtgacctggaagaaggctgccaatggttcagaaccacgcctacggggatgcataggaactctggagtcccgtcagattgtcagcggctttagggactacgccctaactaggtgactattgtttcagtattgaaattatgtctgatccaatgctgaaatatctggtcggtactcaaaacgttgatgggcttatgctgtaataagtagaaaagcaatcgtgcactttgtattggataatgtttagatatacggtaatcttgatatcctcttgcagtgcgctgagggaccgacgctttcccccaatacaatcaaaggaactcccaaccttggagtgcacggtatctatactcactgattatgaaattgcagaggactacctcgactgggaggttggaaagcatggtttaattattgaatttacagctccagactccaacacaaaacacagtgcgacctatttgcctgaagttgcgggccatgaaggtgaaaatttcctttttcatcgatgcgatgtacacttatcgtttctacagagttctttagtttctagaattattgcaggggataataagaagaaatgagttaagaaaatatgtaatttcatctttctaaatcatcatggaccaaatgcattataatgagcaataacggtaaaataaagagtcaactgatcagtacattccaaatctgtattgaatagtttgtaacttaggcttaatcttttggcaggttggacacatgtagaaactattgattcactcgtgaggaaggcaggttaccagagaatcatcactgagtccttgaggaagaaaatcaaagtcactcgctaccagagcaccctgtacacgatgcactatggtgaatatgttgcgtacctcaagaagaacagaggtgcagccccgtcaattagtggggctcctcctgtagttaatggcttcaagccaagccattgatttatcagtataaaaaaaagctcaaagaacatattactataatttatctgcgagcaatttggggggtgtagtgtaaccaccccccacagttcattgatctagcatcattcccttcgaaggaaaaggccaaataggggcgtcatgacaagcgcccagaataataatgccttcctggatggatcatggatgatgcttatgtatcttgaaaacacatgtgcttcaagaagttcaaattgtgtggtgaagttaattgattcgagttggccattcctagttcc

SEQ ID NO: 17497 - protein, 114 aa, Zea mays subsp. mays
  peptide (1)..(114): Ceres Seq. ID no. 12369734
  misc_feature (13)..(83): Pfam Name: AMMECR1 Pfam Description: AMMECR1
  misc_feature (13)..(79): Homolog of NCBI NO: 34878672 NR Description: similar to hypothetical protein MGC32132 [Rattus
  misc_feature (13)..(79): Homolog of NCBI NO: 23943793 NR Description: hypothetical protein MGC32132 [Mus musculus]
  misc_feature (13)..(83): Homolog of NCBI NO: 7669554 NR Description: AMMECR1 protein [Homo sapiens]
  misc_feature (1)..(83): Homolog of NCBI NO: 38511526 NR Description: Unknown (protein for MGC:71655) [Homo sapiens]
  misc_feature (13)..(83): Homolog of NCBI NO: 24649478 NR Description: CG5902-PA [Drosophila melanogaster]
  misc_feature (13)..(83): Homolog of NCBI NO: 9506383 NR Description: AMMECR1 protein [Mus musculus]
  misc_feature (14)..(83): Homolog of NCBI NO: 17644262 NR Description: bB360B22.1 (Alport syndrome, mental retardation,
  misc_feature (13)..(83): Homolog of NCBI NO: 34784081 NR Description: Similar to AMMECR1 protein [Danio rerio]
  misc_feature (13)..(114): Homolog of NCBI NO: 37537060 NR Description: unknown protein [Oryza sativa (japonica
  misc_feature (13)..(83): Homolog of NCBI NO: 18404840 NR Description: expressed protein
MFRYTVILISSCSALRDRRFPPIQSKELPTLECTVSILTDYEIAEDYLDWEVGKHGLIIEFTAPDSNTKHSATYLPEVAGHEGENFLFHRCDVHLSFLQSSLVSRIIAGDNKKK

SEQ ID NO: 17498 - DNA, 981 bp, Zea mays subsp. mays
  misc_feature (1)..(981): Ceres Seq. ID no. 12375363
  misc_feature: MA Experiment ID: 108527 Result: Down-regulated in Transcription
  misc_feature: MA Experiment 108527 PARAMETER Experiment Name: Zm_5mM_NO_P Parameter: Age (day) Value: 8
  misc_feature: MA Experiment 108527 PARAMETER Experiment Name: Zm_5mM_NO_P Parameter: Organism Value: Zea mays
  misc_feature: MA Experiment 108527 PARAMETER Experiment Name: Zm_5mM_NO_P Parameter: Plant Line Value: 35A19
  misc_feature: MA Experiment 108527 PARAMETER Experiment Name: Zm_5mM_NO_P Parameter: Timepoint (hr) Value: 6
  misc_feature: MA Experiment 108527 PARAMETER Experiment Name: Zm_5mM_NO_P Parameter: Tissue Value: Aerial
  misc_feature: MA Experiment 108527 PARAMETER Experiment Name: Zm_5mM_NO_P Parameter: Treatment Value: 5mM NO vs. No Treatment
  misc_feature: MA Experiment ID: 108530 Result: Up-regulated in Transcription
  misc_feature: MA Experiment 108530 PARAMETER Experiment Name: Zm_Imbibed_Seeds_P Parameter: Age (day) Value: 6 vs. 2
  misc_feature: MA Experiment 108530 PARAMETER Experiment Name: Zm_Imbibed_Seeds_P Parameter: Organism Value: Zea mays
  misc_feature: MA Experiment 108530 PARAMETER Experiment Name: Zm_Imbibed_Seeds_P Parameter: Plant Line Value: 35A19
  misc_feature: MA Experiment 108530 PARAMETER Experiment Name: Zm_Imbibed_Seeds_P Parameter: Tissue Value: Aerial vs. Embryo
  misc_feature: MA Experiment ID: 108543 Result: Down-regulated in Transcription
  misc_feature: MA Experiment ID: 108545 Result: Up-regulated in Transcription
  misc_feature: MA Experiment 108545 PARAMETER Experiment Name: Zm_Imbibed_Seeds_P Parameter: Age (day) Value: 3 vs. 2
  misc_feature: MA Experiment 108545 PARAMETER Experiment Name: Zm_Imbibed_Seeds_P Parameter: Organism Value: Zea mays
  misc_feature: MA Experiment 108545 PARAMETER Experiment Name: Zm_Imbibed_Seeds_P Parameter: Plant Line Value: 35A19
  misc_feature: MA Experiment 108545 PARAMETER Experiment Name: Zm_Imbibed_Seeds_P Parameter: Tissue Value: Aerial vs. Embryo
  misc_feature: MA Experiment ID: 108556 Result: Down-regulated in Transcription
  misc_feature: MA Experiment 108556 PARAMETER Experiment Name: Zm_Drought_P Parameter: Age (day) Value: 9
  misc_feature: MA Experiment 108556 PARAMETER Experiment Name: Zm_Drought_P Parameter: Organism Value: Zea mays
  misc_feature: MA Experiment 108556 PARAMETER Experiment Name: Zm_Drought_P Parameter: Plant Line Value: 35A19
  misc_feature: MA Experiment 108556 PARAMETER Experiment Name: Zm_Drought_P Parameter: Timepoint (hr) Value: 24
  misc_feature: MA Experiment 108556 PARAMETER Experiment Name: Zm_Drought_P Parameter: Tissue Value: Aerial
  misc_feature: MA Experiment 108556 PARAMETER Experiment Name: Zm_Drought_P Parameter: Treatment Value: Drought vs. No Drought
  misc_feature: MA Experiment ID: 108559 Result: Down-regulated in Transcription
  misc_feature: MA Experiment 108559 PARAMETER Experiment Name: Zm_5mM_NO_P Parameter: Age (day) Value: 8
  misc_feature: MA Experiment 108559 PARAMETER Experiment Name: Zm_5mM_NO_P Parameter: Organism Value: Zea mays
  misc_feature: MA Experiment 108559 PARAMETER Experiment Name: Zm_5mM_NO_P Parameter: Plant Line Value: 35A19
  misc_feature: MA Experiment 108559 PARAMETER Experiment Name: Zm_5mM_NO_P Parameter: Timepoint (hr) Value: 12
  misc_feature: MA Experiment 108559 PARAMETER Experiment Name: Zm_5mM_NO_P Parameter: Tissue Value: Aerial
  misc_feature: MA Experiment 108559 PARAMETER Experiment Name: Zm_5mM_NO_P Parameter: Treatment Value: 5mM NO vs. No Treatment
  misc_feature: MA Experiment ID: 20000479 Result: Down-regulated in Transcription
  misc_feature: MA Experiment 20000479 PARAMETER Experiment Name: Zm_Drought_P Parameter: Age (day) Value: 10
  misc_feature: MA Experiment 20000479 PARAMETER Experiment Name: Zm_Drought_P Parameter: Organism Value: Zea mays
  misc_feature: MA Experiment 20000479 PARAMETER Experiment Name: Zm_Drought_P Parameter: Plant Line Value: 35A19
  misc_feature: MA Experiment 20000479 PARAMETER Experiment Name: Zm_Drought_P Parameter: Timepoint (hr) Value: 48
  misc_feature: MA Experiment 20000479 PARAMETER Experiment Name: Zm_Drought_P Parameter: Tissue Value: Aerial
  misc_feature: MA Experiment 20000479 PARAMETER Experiment Name: Zm_Drought_P Parameter: Treatment Value: Drought vs. No Drought
aaaagaaaaaaaattaacggctcgtcggacctccacgaaaaccaagtccagcagacggacgcgaactgagaaaaatctcacgtgacgacgacggacgcggcggcgatggcgtgccgcgcacttgccctccgcttcctgctcctcccggacccgctacaccgcctcccggccacgccgccatctgttgggagggcatccggctcccgcggtggtcgccgtccgcacctccgctgcagctccggcggcgggggtggggagcccgggcagccgccgcaagaagctgtgctcgaggccatatccaagatagcaaggtctaaaggaagggttgcactcacaacaaatgtggtcatgggtggtactgtgatggacgatgcaagtgatgaatggcttgctctggatcagaaggtaaattcctaccccacagatagaggttttacagcaattggcattggaggtgatgattttgtccagtcgatggtagttgctgttgaatctgttcttcaagaatccattcccaagggccgagtatctcagaaactatcttcaggaggaaaatatgtttctgtaaaaattgggccaattcgtgttgtttcaagtgagcaggtccaagctgtatatcgtgccatgagaagagataacagaatgaaatacttcttatgaagtgcaattgcatgtcctgcacgttccctggtccattccatcatgtaaacaaaaggagtccaacagtacattttcgccacattttgctggactggactggactggacccccgatgaattgcaaaaggaaaatgggaagacttttatgtgccattcatgccctgatggaagcttctcaaataaccctacaggcaatttggtgggatcggttatgttatgtagtgcttgtgtagtacagtgggcgtatatagctactatatatgctaaagttgtattttagtgtctcatattagatgcattttaatattttataaaccatatg

SEQ ID NO: 17499 - protein, 184 aa, Zea mays subsp. mays
  peptide (1)..(184): Ceres Seq. ID no. 12375364
  misc_feature (93)..(184): Pfam Name: Protein of unknown function (DUF493) Pfam Description: Protein of unknown function (DUF493)
  misc_feature (16)..(184): Homolog of NCBI NO: 18396311 NR Description: Expressed protein
  misc_feature (3)..(141): Homolog of NCBI NO: 38347226 NR Description: OSJNBa0044M19.8 [Oryza sativa (japonica
MACRALALRFLLLPDPLHRLPATPPSVGRASGSRGGRRPHLRCSSGGGGGEPGQPPQEAVLEAISKIARSKGRVALTTNVVMGGTVMDDASDEWLALDQKVNSYPTDRGFTAIGIGGDDFVQSMVVAVESVLQESIPKGRVSQKLSSGGKYVSVKIGPIRVVSSEQVQAVYRAMRRDNRMKYFL

SEQ ID NO: 17500 - protein, 103 aa, Zea mays subsp. mays
  peptide (1)..(103): Ceres Seq. ID no. 12375365
  misc_feature (12)..(103): Pfam Name: Protein of unknown function (DUF493) Pfam Description: Protein of unknown function (DUF493)
  misc_feature (1)..(103): Homolog of NCBI NO: 18396311 NR Description: Expressed protein
  misc_feature (1)..(60): Homolog of NCBI NO: 38347226 NR Description: OSJNBa0044M19.8 [Oryza sativa (japonica
MGGTVMDDASDEWLALDQKVNSYPTDRGFTAIGIGGDDFVQSMVVAVESVLQESIPKGRVSQKLSSGGKYVSVKIGPIRVVSSEQVQAVYRAMRRDNRMKYFL

SEQ ID NO: 17501 - protein, 98 aa, Zea mays subsp. mays
  peptide (1)..(98): Ceres Seq. ID no. 12375366
  misc_feature (7)..(98): Pfam Name: Protein of unknown function (DUF493) Pfam Description: Protein of unknown function (DUF493)
  misc_feature (1)..(98): Homolog of NCBI NO: 18396311 NR Description: Expressed protein
  misc_feature (1)..(55): Homolog of NCBI NO: 38347226 NR Description: OSJNBa0044M19.8 [Oryza sativa (japonica
MDDASDEWLALDQKVNSYPTDRGFTAIGIGGDDFVQSMVVAVESVLQESIPKGRVSQKLSSGGKYVSVKIGPIRVVSSEQVQAVYRAMRRDNRMKYFL

SEQ ID NO: 17502 - DNA, 357 bp, Zea mays subsp. mays
  misc_feature (1)..(357): Ceres Seq. ID no. 1981229
  misc_feature: MA Experiment ID: 20000108 Result: Up-regulated in Transcription
  misc_feature: MA Experiment 20000108 PARAMETER Experiment Name: Zm_Root-Tips_P Parameter: Age (day) Value: 12
  misc_feature: MA Experiment 20000108 PARAMETER Experiment Name: Zm_Root-Tips_P Parameter: Organism Value: Zea mays
  misc_feature: MA Experiment 20000108 PARAMETER Experiment Name: Zm_Root-Tips_P Parameter: Tissue Value: Root tips vs. Root mid region    35
  misc_feature: MA Experiment 20000108 PARAMETER Experiment Name: Zm_Root-Tips_P Parameter: Tissue Value: Root tips vs. Root mid region   Sequence Listing-Misc Features (4)
  misc_feature: MA Experiment ID: 20000479 Result: Down-regulated in Transcription
  misc_feature: MA Experiment 20000479 PARAMETER Experiment Name: Zm_Drought_P Parameter: Age (day) Value: 10
  misc_feature: MA Experiment 20000479 PARAMETER Experiment Name: Zm_Drought_P Parameter: Organism Value: Zea mays
  misc_feature: MA Experiment 20000479 PARAMETER Experiment Name: Zm_Drought_P Parameter: Plant Line Value: 35A19
  misc_feature: MA Experiment 20000479 PARAMETER Experiment Name: Zm_Drought_P Parameter: Timepoint (hr) Value: 48
  misc_feature: MA Experiment 20000479 PARAMETER Experiment Name: Zm_Drought_P Parameter: Tissue Value: Aerial
  misc_feature: MA Experiment 20000479 PARAMETER Experiment Name: Zm_Drought_P Parameter: Treatment Value: Drought vs. No Drought
  misc_feature: MA Experiment ID: 20000487 Result: Up-regulated in Transcription
  misc_feature: MA Experiment 20000487 PARAMETER Experiment Name: Zm_50mM_NH4NO3_L_to_H_P Parameter: Organism Value: Zea mays
  misc_feature: MA Experiment 20000487 PARAMETER Experiment Name: Zm_50mM_NH4NO3_L_to_H_P Parameter: Timepoint (hr) Value: 4
  misc_feature: MA Experiment 20000487 PARAMETER Experiment Name: Zm_50mM_NH4NO3_L_to_H_P Parameter: Tissue Value: Leaves
  misc_feature: MA Experiment 20000487 PARAMETER Experiment Name: Zm_50mM_NH4NO3_L_to_H_P Parameter: Treatment Value: 50mM NH4NO3 vs. 100mM Mannitol
  misc_feature: MA Experiment ID: 20000492 Result: Up-regulated in Transcription
  misc_feature: MA Experiment 20000492 PARAMETER Experiment Name: Zm_Hybrid_Seed_Dev_P Parameter: DAP Value: 12
  misc_feature: MA Experiment 20000492 PARAMETER Experiment Name: Zm_Hybrid_Seed_Dev_P Parameter: Organism Value: Zea mays
  misc_feature: MA Experiment 20000492 PARAMETER Experiment Name: Zm_Hybrid_Seed_Dev_P Parameter: Plant Line Value: 35A19
  misc_feature: MA Experiment 20000492 PARAMETER Experiment Name: Zm_Hybrid_Seed_Dev_P Parameter: Tissue Value: Fert Kernel vs. Unfert Floret
  misc_feature: MA Experiment ID: 20000633 Result: Down-regulated in Transcription
  misc_feature: MA Experiment 20000633 PARAMETER Experiment Name: Zm_Herbicide-Treatments_P Parameter: Timepoint (hr) Value: 4
  misc_feature: MA Experiment 20000633 PARAMETER Experiment Name: Zm_Herbicide-Treatments_P Parameter: Tissue Value: Aerial
  misc_feature: MA Experiment 20000633 PARAMETER Experiment Name: Zm_Herbicide-Treatments_P Parameter: Treatment Value: Trimec vs. No Treatment
  misc_feature: MA Experiment ID: 20001613 Result: Up-regulated in Transcription
  misc_feature: MA Experiment 20001613 PARAMETER Experiment Name: Zm_50ppm_KNO3_L-to-H_P Parameter: Age (day) Value: 20
  misc_feature: MA Experiment 20001613 PARAMETER Experiment Name: Zm_50ppm_KNO3_L-to-H_P Parameter: Organism Value: Zea mays
  misc_feature: MA Experiment 20001613 PARAMETER Experiment Name: Zm_50ppm_KNO3_L-to-H_P Parameter: Plant Line Value: 35A19
  misc_feature: MA Experiment 20001613 PARAMETER Experiment Name: Zm_50ppm_KNO3_L-to-H_P Parameter: Timepoint (hr) Value: 24
  misc_feature: MA Experiment 20001613 PARAMETER Experiment Name: Zm_50ppm_KNO3_L-to-H_P Parameter: Tissue Value: Roots
  misc_feature: MA Experiment 20001613 PARAMETER Experiment Name: Zm_50ppm_KNO3_L-to-H_P Parameter: Treatment Value: 50ppm KNO3 vs. 50ppm KCl
  misc_feature: Pfam Name: Peptidase_M24 Pfam Description: metallopeptidase family M24
aaacctaaacctttcacccgccgccgccgccaccaccagcattgccacttctcaccgcttgcaaccgatgatgccgttctggaagaaaatgacatggttaaaattgatatgggctgtcatattgatggctttattgctgtggtggcacatacacatgtaattacaaatgggcctgtcacaggaagggctggtgatgtgcttgctgctgccaacacagcagcagaagtcgcaatgcggcttgtgagacctgggaagaaaaataaggatgttactgaagcaattcagaaagttgctgctgcttatgattgcaaattgtggaaggtgttcttagccatcaactgaaacaatttgtgattg

SEQ ID NO: 17503 - protein, 113 aa, Zea mays subsp. mays
  peptide (1)..(113): Ceres Seq. ID no. 1981230
  misc_feature: Pfam Name: Peptidase_M24 Pfam Description: metallopeptidase family M24
  misc_feature (15)..(103): Homolog of NCBI NO: 34862215 NR Description: similar to proliferation-associated protein 1
  misc_feature (15)..(103): Homolog of NCBI NO: 33879698 NR Description: Unknown (protein for IMAGE:4661091) [Homo sapiens]
  misc_feature (15)..(103): Homolog of NCBI NO: 4099506 NR Description: erbB3 binding protein EBP1 [Homo sapiens]
  misc_feature (15)..(103): Homolog of NCBI NO: 6755100 NR Description: proliferation-associated 2G4
  misc_feature (15)..(103): Homolog of NCBI NO: 1083448 NR Description: p38-2G4 protein - mouse
  misc_feature (16)..(105): Homolog of NCBI NO: 30693537 NR Description: nuclear DNA-binding protein G2p -related
  misc_feature (16)..(105): Homolog of NCBI NO: 15231039 NR Description: putative nuclear DNA-binding protein G2p
  misc_feature (16)..(105): Homolog of NCBI NO: 13430628 NR Description: putative nuclear DNA-binding protein G2p
  misc_feature (15)..(102): Homolog of NCBI NO: 7447216 NR Description: probable DNA-binding protein GBP16 - rice
  misc_feature (15)..(105): Homolog of NCBI NO: 9652218 NR Description: putative DNA binding protein [Atriplex hortensis]
KPKPFTRRRRHHQHCHFSPLATDDAVLEENDMVKIDMGCHIDGFIAVVAHTHVITNGPVTGRAGDVLAAANTAAEVAMRLVRPGKKNKDVTEAIQKVAAAYDCKLWKVFLAIN

SEQ ID NO: 17504 - protein, 82 aa, Zea mays subsp. mays
  peptide (1)..(82): Ceres Seq. ID no. 1981231
  misc_feature: Pfam Name: Peptidase_M24 Pfam Description: metallopeptidase family M24
  misc_feature (1)..(72): Homolog of NCBI NO: 34862215 NR Description: similar to proliferation-associated protein 1
  misc_feature (1)..(72): Homolog of NCBI NO: 33879698 NR Description: Unknown (protein for IMAGE:4661091) [Homo sapiens]
  misc_feature (1)..(72): Homolog of NCBI NO: 4099506 NR Description: erbB3 binding protein EBP1 [Homo sapiens]
  misc_feature (1)..(72): Homolog of NCBI NO: 6755100 NR Description: proliferation-associated 2G4
  misc_feature (1)..(72): Homolog of NCBI NO: 1083448 NR Description: p38-2G4 protein - mouse
  misc_feature (1)..(74): Homolog of NCBI NO: 30693537 NR Description: nuclear DNA-binding protein G2p -related
  misc_feature (1)..(74): Homolog of NCBI NO: 15231039 NR Description: putative nuclear DNA-binding protein G2p
  misc_feature (1)..(74): Homolog of NCBI NO: 13430628 NR Description: putative nuclear DNA-binding protein G2p
  misc_feature (1)..(71): Homolog of NCBI NO: 7447216 NR Description: probable DNA-binding protein GBP16 - rice
  misc_feature (1)..(74): Homolog of NCBI NO: 9652218 NR Description: putative DNA binding protein [Atriplex hortensis]
MVKIDMGCHIDGFIAVVAHTHVITNGPVTGRAGDVLAAANTAAEVAMRLVRPGKKNKDVTEAIQKVAAAYDCKLWKVFLAIN

SEQ ID NO: 17505 - protein, 77 aa, Zea mays subsp. mays
  peptide (1)..(77): Ceres Seq. ID no. 1981232
  misc_feature: Pfam Name: Peptidase_M24 Pfam Description: metallopeptidase family M24
  misc_feature (1)..(67): Homolog of NCBI NO: 34862215 NR Description: similar to proliferation-associated protein 1
  misc_feature (1)..(67): Homolog of NCBI NO: 33879698 NR Description: Unknown (protein for IMAGE:4661091) [Homo sapiens]
  misc_feature (1)..(67): Homolog of NCBI NO: 4099506 NR Description: erbB3 binding protein EBP1 [Homo sapiens]
  misc_feature (1)..(67): Homolog of NCBI NO: 6755100 NR Description: proliferation-associated 2G4
  misc_feature (1)..(67): Homolog of NCBI NO: 1083448 NR Description: p38-2G4 protein - mouse
  misc_feature (1)..(69): Homolog of NCBI NO: 30693537 NR Description: nuclear DNA-binding protein G2p -related
  misc_feature (1)..(69): Homolog of NCBI NO: 15231039 NR Description: putative nuclear DNA-binding protein G2p
  misc_feature (1)..(69): Homolog of NCBI NO: 13430628 NR Description: putative nuclear DNA-binding protein G2p
  misc_feature (1)..(66): Homolog of NCBI NO: 7447216 NR Description: probable DNA-binding protein GBP16 - rice
  misc_feature (1)..(69): Homolog of NCBI NO: 9652218 NR Description: putative DNA binding protein [Atriplex hortensis]
MGCHIDGFIAVVAHTHVITNGPVTGRAGDVLAAANTAAEVAMRLVRPGKKNKDVTEAIQKVAAAYDCKLWKVFLAIN

SEQ ID NO: 17506 - DNA, 1865 bp, Zea mays subsp. mays
  misc_feature (1)..(1865): Ceres Seq. ID no. 13493199
  misc_feature: MA Experiment ID: 108504 Result: Down-regulated in Transcription
  misc_feature: MA Experiment 108504 PARAMETER Experiment Name: Zm_Drought_P Parameter: Age (day) Value: 8
  misc_feature: MA Experiment 108504 PARAMETER Experiment Name: Zm_Drought_P Parameter: Organism Value: Zea mays
  misc_feature: MA Experiment 108504 PARAMETER Experiment Name: Zm_Drought_P Parameter: Plant Line Value: 35A19
  misc_feature: MA Experiment 108504 PARAMETER Experiment Name: Zm_Drought_P Parameter: Timepoint (hr) Value: 12
  misc_feature: MA Experiment 108504 PARAMETER Experiment Name: Zm_Drought_P Parameter: Tissue Value: Aerial
  misc_feature: MA Experiment 108504 PARAMETER Experiment Name: Zm_Drought_P Parameter: Treatment Value: Drought vs. No Drought
  misc_feature: MA Experiment ID: 108515 Result: Up-regulated in Transcription
  misc_feature: MA Experiment 108515 PARAMETER Experiment Name: Zm_2mM_SA_P Parameter: Age (day) Value: 8
  misc_feature: MA Experiment 108515 PARAMETER Experiment Name: Zm_2mM_SA_P Parameter: Organism Value: Zea mays
  misc_feature: MA Experiment 108515 PARAMETER Experiment Name: Zm_2mM_SA_P Parameter: Plant Line Value: 35A19
  misc_feature: MA Experiment 108515 PARAMETER Experiment Name: Zm_2mM_SA_P Parameter: Timepoint (hr) Value: 12
  misc_feature: MA Experiment 108515 PARAMETER Experiment Name: Zm_2mM_SA_P Parameter: Tissue Value: Aerial
  misc_feature: MA Experiment 108515 PARAMETER Experiment Name: Zm_2mM_SA_P Parameter: Treatment Value: 2mM SA vs. No Treatment
  misc_feature: MA Experiment ID: 108528 Result: Up-regulated in Transcription
  misc_feature: MA Experiment 108528 PARAMETER Experiment Name: Zm_Imbibed_Seeds_P Parameter: Age (day) Value: 5 vs. 2
  misc_feature: MA Experiment 108528 PARAMETER Experiment Name: Zm_Imbibed_Seeds_P Parameter: Organism Value: Zea mays
  misc_feature: MA Experiment 108528 PARAMETER Experiment Name: Zm_Imbibed_Seeds_P Parameter: Plant Line Value: 35A19
  misc_feature: MA Experiment 108528 PARAMETER Experiment Name: Zm_Imbibed_Seeds_P Parameter: Tissue Value: Aerial vs. Embryo
  misc_feature: MA Experiment ID: 108529 Result: Down-regulated in Transcription
  misc_feature: MA Experiment 108529 PARAMETER Experiment Name: Zm_Imbibed_Seeds_P Parameter: Age (day) Value: 5 vs. 2
  misc_feature: MA Experiment 108529 PARAMETER Experiment Name: Zm_Imbibed_Seeds_P Parameter: Organism Value: Zea mays
  misc_feature: MA Experiment 108529 PARAMETER Experiment Name: Zm_Imbibed_Seeds_P Parameter: Plant Line Value: 35A19
  misc_feature: MA Experiment 108529 PARAMETER Experiment Name: Zm_Imbibed_Seeds_P Parameter: Tissue Value: Roots vs. Embryo
  misc_feature: MA Experiment ID: 108530 Result: Up-regulated in Transcription
  misc_feature: MA Experiment 108530 PARAMETER Experiment Name: Zm_Imbibed_Seeds_P Parameter: Age (day) Value: 6 vs. 2
  misc_feature: MA Experiment 108530 PARAMETER Experiment Name: Zm_Imbibed_Seeds_P Parameter: Organism Value: Zea mays
  misc_feature: MA Experiment 108530 PARAMETER Experiment Name: Zm_Imbibed_Seeds_P Parameter: Plant Line Value: 35A19
  misc_feature: MA Experiment 108530 PARAMETER Experiment Name: Zm_Imbibed_Seeds_P Parameter: Tissue Value: Aerial vs. Embryo
  misc_feature: MA Experiment ID: 108536 Result: Down-regulated in Transcription
  misc_feature: MA Experiment 108536 PARAMETER Experiment Name: Zm_Meristem_P Parameter: Age (day) Value: 8
  misc_feature: MA Experiment 108536 PARAMETER Experiment Name: Zm_Meristem_P Parameter: Organism Value: Zea mays
  misc_feature: MA Experiment 108536 PARAMETER Experiment Name: Zm_Meristem_P Parameter: Plant Line Value: 35A19
  misc_feature: MA Experiment 108536 PARAMETER Experiment Name: Zm_Meristem_P Parameter: Tissue Value: Shoot Meristem vs. Above Shoot Meristem
  misc_feature: MA Experiment ID: 108543 Result: Down-regulated in Transcription
  misc_feature: MA Experiment ID: 108556 Result: Down-regulated in Transcription
  misc_feature: MA Experiment 108556 PARAMETER Experiment Name: Zm_Drought_P Parameter: Age (day) Value: 9
  misc_feature: MA Experiment 108556 PARAMETER Experiment Name: Zm_Drought_P Parameter: Organism Value: Zea mays
  misc_feature: MA Experiment 108556 PARAMETER Experiment Name: Zm_Drought_P Parameter: Plant Line Value: 35A19
  misc_feature: MA Experiment 108556 PARAMETER Experiment Name: Zm_Drought_P Parameter: Timepoint (hr) Value: 24
  misc_feature: MA Experiment 108556 PARAMETER Experiment Name: Zm_Drought_P Parameter: Tissue Value: Aerial
  misc_feature: MA Experiment 108556 PARAMETER Experiment Name: Zm_Drought_P Parameter: Treatment Value: Drought vs. No Drought
  misc_feature: MA Experiment ID: 20000626 Result: Up-regulated in Transcription
  misc_feature: MA Experiment 20000626 PARAMETER Experiment Name: Zm_Herbicide-Treatments_P Parameter: Timepoint (hr) Value: 12
  misc_feature: MA Experiment 20000626 PARAMETER Experiment Name: Zm_Herbicide-Treatments_P Parameter: Tissue Value: Aerial
  misc_feature: MA Experiment 20000626 PARAMETER Experiment Name: Zm_Herbicide-Treatments_P Parameter: Treatment Value: Roundup vs. No Treatment
  misc_feature: MA Experiment ID: 20000627 Result: Up-regulated in Transcription
  misc_feature: MA Experiment 20000627 PARAMETER Experiment Name: Zm_Herbicide-Treatments_P Parameter: Timepoint (hr) Value: 12
  misc_feature: MA Experiment 20000627 PARAMETER Experiment Name: Zm_Herbicide-Treatments_P Parameter: Tissue Value: Aerial
  misc_feature: MA Experiment 20000627 PARAMETER Experiment Name: Zm_Herbicide-Treatments_P Parameter: Treatment Value: Finale vs. No Treatment
  misc_feature: MA Experiment ID: 20001608 Result: Down-regulated in Transcription
  misc_feature: MA Experiment 20001608 PARAMETER Experiment Name: Zm_50ppm_KNO3_L-to-H_P Parameter: Age (day) Value: 21
  misc_feature: MA Experiment 20001608 PARAMETER Experiment Name: Zm_50ppm_KNO3_L-to-H_P Parameter: Organism Value: Zea mays
  misc_feature: MA Experiment 20001608 PARAMETER Experiment Name: Zm_50ppm_KNO3_L-to-H_P Parameter: Plant Line Value: 35A19
  misc_feature: MA Experiment 20001608 PARAMETER Experiment Name: Zm_50ppm_KNO3_L-to-H_P Parameter: Timepoint (hr) Value: 48
  misc_feature: MA Experiment 20001608 PARAMETER Experiment Name: Zm_50ppm_KNO3_L-to-H_P Parameter: Tissue Value: Shoots
  misc_feature: MA Experiment 20001608 PARAMETER Experiment Name: Zm_50ppm_KNO3_L-to-H_P Parameter: Treatment Value: 50ppm KNO3 vs. 50ppm KCl
taatcgaaaaacacacgcgggcgcgctagctagtgagagtcggagatgtcgtcgccgcggccacacttcctcgtgctcaccttccctttccagggccacatcgccccggctctccgcctcgccaggcagctgctcgcggcggcgcccgacgcgctcgtgaccttctccaccaccgaggtcgcgcacaggcgcatgttcccggcaaagcccaacgacggcgccaaggactccgacgaagacggccgcctcgagttcctcccgttctccgacggcacggaggccgggtacgtccggagcgccgacctgggctcgttcaacgcctacatgacgtctttccacgccgcgggggcgcgcagcgccgcggagatcgtggacgcgctcgcggcgcggggccgccccgtgtcccgcgtcgtgtacacgctgctcctcccgtgggcggccgacgtcgcgcgggaccgcgggatcccgtccgcgctctactggatccagccggtctccgtgttcgccatctaccaccactacttccacggccacgccggcgtcgtcgccgaccaccttcacgacccgtcgttcgtcgtggagatgccgggcctggcgccacagccggtcggcgacctgccgtccttcctcaccgactccaccgacccttccaatatgttccacagcgtcttcaccacgatccgagacctgatcgaaacgcttgacaaggaaagccccaggtccactgtcctcgtcaacacgtgccgagagctcgaggtgggcgcgctcgccgccgtgggggcgcaccacgacgtgctccccgtcggcccggtgctcccatccggcggcgacgccggcatcttcaagcaggacgacgacgccaagtacatggagtggctcgacgccaaaccggcgaattccgtggtgtacgtctccttcggcagtctgaccacggtggcgagagaacatctcgaggagctgctccggggccttgaggagagcggcaggccgtacctctgcgtcatccggaaggacaacaaggctgcactcgcggatgccgagacgaaggtagacgaggagctcaagaacggcatcgtagtggagtggtgcgaccaggtgcgggtgctgtcgcacgcggcggtcgggtgcttcgtgacgcactgtggctggaactcggtgctggagagcctggcggcgggggtgcccatggtgtgcgtgccccggatgtcggaccagcgcaccaacgctcaacttgtcgtgcgcgagtggcgcgtcggcgtgcgcgcgcaggtggacgatggtggcgtgctgcgagcggcggaggtgcggcggtgcatcgacgaggcgatggggaatttggaggccgccgcggaggtgcgacgcatggcggcggagtggaagcaggtagtgacaaaggccatgggaaaaggagggtcgtcggatcgtaatctcatgacgttcgtggatggcgcgaggaacgccgtttgaagattggcatgtgtttctttctttcttcacgttcggttacaccaatccagaaaaagattagcttgttcggttacattaatccaaaagagaattgggggagaattggttacatcaatcaaccaatcctattatgaattggtgtaaccgaacaaaccataagtggtcaaaggcggatggcttccggccattgacgtacggggccagacaaccgctggctccacgcgttattgactggtccacaactacttttctagaagttacggtataggatccagttgtgttaactgtggacattatgttgtcagtagctgttaagcttttcaacgtctgcttgactggacgactgctcccgataaactaggttatcttatattcatacagaactaaatcttagacct

SEQ ID NO: 17507 - protein, 473 aa, Zea mays subsp. mays
  peptide (1)..(473): Ceres Seq. ID no. 13493200
  misc_feature (26)..(470): Pfam Name: UDP-glucoronosyl and UDP-glucosyl transferase Pfam Description: UDP-glucoronosyl and UDP-glucosyl transferase
  misc_feature (144)..(467): Homolog of NCBI NO: 7433892 NR Description: hypothetical protein - Arabidopsis thaliana
  misc_feature (6)..(467): Homolog of NCBI NO: 18390540 NR Description: UDP-glucose transferase(UGT1) [Arabidopsis
  misc_feature (5)..(466): Homolog of NCBI NO: 4115559 NR Description: UDP-glucose:anthocysnin 5-O-glucosyltransferase
  misc_feature (2)..(467): Homolog of NCBI NO: 2149127 NR Description: UDP-glucose:indole-3-acetate
  misc_feature (2)..(467): Homolog of NCBI NO: 18414478 NR Description: UDP-glucose:indole-3-acetate
  misc_feature (5)..(468): Homolog of NCBI NO: 40714353 NR Description: anthocyanin 5-O-glucosyltransferase [Iris
  misc_feature (5)..(466): Homolog of NCBI NO: 20146093 NR Description: glucosyltransferase NTGT2 [Nicotiana tabacum]
  misc_feature (5)..(467): Homolog of NCBI NO: 6683052 NR Description: anthocyanin 5-O-glucosyltransferase [Petunia x
  misc_feature (5)..(466): Homolog of NCBI NO: 14192682 NR Description: cold-induced glucosyl transferase [Solanum
  misc_feature (1)..(470): Homolog of NCBI NO: 34906162 NR Description: putative anthocyanin 5-O-glucosyltransferase
MSSPRPHFLVLTFPFQGHIAPALRLARQLLAAAPDALVTFSTTEVAHRRMFPAKPNDGAKDSDEDGRLEFLPFSDGTEAGYVRSADLGSFNAYMTSFHAAGARSAAEIVDALAARGRPVSRVVYTLLLPWAADVARDRGIPSALYWIQPVSVFAIYHHYFHGHAGVVADHLHDPSFVVEMPGLAPQPVGDLPSFLTDSTDPSNMFHSVFTTIRDLIETLDKESPRSTVLVNTCRELEVGALAAVGAHHDVLPVGPVLPSGGDAGIFKQDDDAKYMEWLDAKPANSVVYVSFGSLTTVAREHLEELLRGLEESGRPYLCVIRKDNKAALADAETKVDEELKNGIVVEWCDQVRVLSHAAVGCFVTHCGWNSVLESLAAGVPMVCVPRMSDQRTNAQLVVREWRVGVRAQVDDGGVLRAAEVRRCIDEAMGNLEAAAEVRRMAAEWKQVVTKAMGKGGSSDRNLMTFVDGARNAV

SEQ ID NO: 17508 - protein, 424 aa, Zea mays subsp. mays
  peptide (1)..(424): Ceres Seq. ID no. 13493201
  misc_feature (1)..(421): Pfam Name: UDP-glucoronosyl and UDP-glucosyl transferase Pfam Description: UDP-glucoronosyl and UDP-glucosyl transferase
  misc_feature (95)..(418): Homolog of NCBI NO: 7433892 NR Description: hypothetical protein - Arabidopsis thaliana
  misc_feature (1)..(418): Homolog of NCBI NO: 18390540 NR Description: UDP-glucose transferase(UGT1) [Arabidopsis
  misc_feature (1)..(417): Homolog of NCBI NO: 4115559 NR Description: UDP-glucose:anthocysnin 5-O-glucosyltransferase
  misc_feature (1)..(418): Homolog of NCBI NO: 2149127 NR Description: UDP-glucose:indole-3-acetate
  misc_feature (1)..(418): Homolog of NCBI NO: 18414478 NR Description: UDP-glucose:indole-3-acetate
  misc_feature (1)..(419): Homolog of NCBI NO: 40714353 NR Description: anthocyanin 5-O-glucosyltransferase [Iris
  misc_feature (1)..(417): Homolog of NCBI NO: 20146093 NR Description: glucosyltransferase NTGT2 [Nicotiana tabacum]
  misc_feature (1)..(418): Homolog of NCBI NO: 6683052 NR Description: anthocyanin 5-O-glucosyltransferase [Petunia x
  misc_feature (1)..(417): Homolog of NCBI NO: 14192682 NR Description: cold-induced glucosyl transferase [Solanum
  misc_feature (1)..(421): Homolog of NCBI NO: 34906162 NR Description: putative anthocyanin 5-O-glucosyltransferase
MFPAKPNDGAKDSDEDGRLEFLPFSDGTEAGYVRSADLGSFNAYMTSFHAAGARSAAEIVDALAARGRPVSRVVYTLLLPWAADVARDRGIPSALYWIQPVSVFAIYHHYFHGHAGVVADHLHDPSFVVEMPGLAPQPVGDLPSFLTDSTDPSNMFHSVFTTIRDLIETLDKESPRSTVLVNTCRELEVGALAAVGAHHDVLPVGPVLPSGGDAGIFKQDDDAKYMEWLDAKPANSVVYVSFGSLTTVAREHLEELLRGLEESGRPYLCVIRKDNKAALADAETKVDEELKNGIVVEWCDQVRVLSHAAVGCFVTHCGWNSVLESLAAGVPMVCVPRMSDQRTNAQLVVREWRVGVRAQVDDGGVLRAAEVRRCIDEAMGNLEAAAEVRRMAAEWKQVVTKAMGKGGSSDRNLMTFVDGARNAV

SEQ ID NO: 17509 - protein, 380 aa, Zea mays subsp. mays
  peptide (1)..(380): Ceres Seq. ID no. 13493202
  misc_feature (1)..(377): Pfam Name: UDP-glucoronosyl and UDP-glucosyl transferase Pfam Description: UDP-glucoronosyl and UDP-glucosyl transferase
  misc_feature (51)..(374): Homolog of NCBI NO: 7433892 NR Description: hypothetical protein - Arabidopsis thaliana
  misc_feature (1)..(374): Homolog of NCBI NO: 18390540 NR Description: UDP-glucose transferase(UGT1) [Arabidopsis
  misc_feature (1)..(373): Homolog of NCBI NO: 4115559 NR Description: UDP-glucose:anthocysnin 5-O-glucosyltransferase
  misc_feature (1)..(374): Homolog of NCBI NO: 2149127 NR Description: UDP-glucose:indole-3-acetate
  misc_feature (1)..(374): Homolog of NCBI NO: 18414478 NR Description: UDP-glucose:indole-3-acetate
  misc_feature (1)..(375): Homolog of NCBI NO: 40714353 NR Description: anthocyanin 5-O-glucosyltransferase [Iris
  misc_feature (1)..(373): Homolog of NCBI NO: 20146093 NR Description: glucosyltransferase NTGT2 [Nicotiana tabacum]
  misc_feature (1)..(374): Homolog of NCBI NO: 6683052 NR Description: anthocyanin 5-O-glucosyltransferase [Petunia x
  misc_feature (1)..(373): Homolog of NCBI NO: 14192682 NR Description: cold-induced glucosyl transferase [Solanum
  misc_feature (1)..(377): Homolog of NCBI NO: 34906162 NR Description: putative anthocyanin 5-O-glucosyltransferase
MTSFHAAGARSAAEIVDALAARGRPVSRVVYTLLLPWAADVARDRGIPSALYWIQPVSVFAIYHHYFHGHAGVVADHLHDPSFVVEMPGLAPQPVGDLPSFLTDSTDPSNMFHSVFTTIRDLIETLDKESPRSTVLVNTCRELEVGALAAVGAHHDVLPVGPVLPSGGDAGIFKQDDDAKYMEWLDAKPANSVVYVSFGSLTTVAREHLEELLRGLEESGRPYLCVIRKDNKAALADAETKVDEELKNGIVVEWCDQVRVLSHAAVGCFVTHCGWNSVLESLAAGVPMVCVPRMSDQRTNAQLVVREWRVGVRAQVDDGGVLRAAEVRRCIDEAMGNLEAAAEVRRMAAEWKQVVTKAMGKGGSSDRNLMTFVDGARNAV

SEQ ID NO: 17510 - DNA, 2759 bp, Zea mays subsp. mays
  misc_feature (1)..(2759): Ceres Seq. ID no. 12362557
  misc_feature: MA Experiment ID: 108522 Result: Down-regulated in Transcription
  misc_feature: MA Experiment 108522 PARAMETER Experiment Name: Zm_42deg_Heat_P Parameter: Age (day) Value: 8
  misc_feature: MA Experiment 108522 PARAMETER Experiment Name: Zm_42deg_Heat_P Parameter: Organism Value: Zea mays
  misc_feature: MA Experiment 108522 PARAMETER Experiment Name: Zm_42deg_Heat_P Parameter: Plant Line Value: 35A19
  misc_feature: MA Experiment 108522 PARAMETER Experiment Name: Zm_42deg_Heat_P Parameter: Temperature (deg C) Value: 42 vs. 22
  misc_feature: MA Experiment 108522 PARAMETER Experiment Name: Zm_42deg_Heat_P Parameter: Timepoint (hr) Value: 1
  misc_feature: MA Experiment 108522 PARAMETER Experiment Name: Zm_42deg_Heat_P Parameter: Tissue Value: Aerial
gcacgaaccattacctagaacatcctaatcgaaaagtcctctcccccacaggatctagggtttgctcgctcggccttcgtccttcttgggccgagccctaattcttctgcaccgccacccagcaggcttcggtttggttcgcatccgctgcgcccgcttcgtccccgtacgtattcttggattccattggcttctatcttcagcatggatgagccaaacaacaattttaatgcaacggtgcatgccaatgagatgtttgatagcaatggtgtgatccatgaagatgagatggcccatgacgatgagatgatccatggccatgcgatgttccttggcgatgagatgattcgtgggaccgagatggttgaaggaagtgagatgatccatggtcatgatatggttcaggttaatgatctcatccacggcaatgagatggttccagttcacgacatggtcaacggtgacaagatagcccatggtaatgaattggttaatgctcagatgaccccacgaatatcaagacgtcggaagaagaagtcgctagtttgggagcacttcactatagaactcatgccagggggaagttcaagagcatgctgcaagttatgcaagcaaacctttgcgtatagttctggctcaaaaattgcaggcactagccatctcaagcggcacatcacactaggctcctgtcctgttatgaaagaccaagacaggaagctagcattgccacttgcagggggccatgtcactgataatgatggcgagggtactgcagaacgtcctactaagaggcgttacagatacactggttatgcaaatgctacttttgatccacagcggagcacctcttatctgacaaagatgataattttgcatgactacccacttcacattgctcaacagtcatcctttattaattttattgagagtctgcagcctcgtttcagagttgtagatgtggagacaatggaaggagaggtgtatgctgttttccagaaagcaaaagaaaacctgttgcaagcattcagcactatgccaggaaggatcagcctcactataggactctggacaaccagtcagactcttggctatgtttctcttgctgggcagtttattgactccgattggaaagtgcaccgaagaatgctcaacttcatgatggtgtcttctccccattcagagaatgcacttagtgaagctattagctcaagcctttctgagtggaatatgaaggacaagctgttcactatcacattggataatgattgctcttcccatgatatttacagtgcaaatcttagggatcacctctccaataagaacaacgtcatgcttaagggacagctctttgttgtgaggtgctatgcacatatcctgaatgtagttgctcaagatgtaattgcttcgattcatggtgtgatttacagcatccgtgagagtatcaagttcataaaagcttctccaagtcgtgaggagaagtttgctgagattgctctgcagctggagattcccagtaccaagactctttgtttagatgttacaacccagtggaacacaacttatctgatgctactggctgccttggactataagcaggcttttgctacactggagacatgtgatgataattacaatgaatctccttcagcagaggactggaagaaagttgaggctagctgtaattacctgaaactgctatatgactctgcacatagtgtgatggcttcagcgaaccctactgcaaacatctttttccatgaagcttggaaaattcagcttgaactagccaatggcacagaacatggaagtccctttttcagctgtattgccaaggatatgcatgagagatttgacaaatactggaaagattgcagcctggtgttagccattgctgttgttatggatccacgtttcaagatgaagcttgtcgagttcagttactctaaaatttatggtgctgaggctgcaaaatatgttaaggttgtcaatgactctctgcatgagctgtataaggagtatgtggcacagacactccccttggctcctgcctatgttgaagctaataacgtggctgccaacacgaatgttaaccagggaaatcctcctccaactagtgatggtcttcttgactttgatatgtacctttctgagattcaaagtagccagcctgcaaaatgtgaactggagcagtatctggaggaatctctcactccacgcatccaggagtttgatattcttaactggtggaagcttaatacactcaagtttccaaccctgtcgaagatggcccgtgatatcttggcaatcccaatgtcgatggttagcagtggcagctccatattctctgctggaactgggaaccgcatgcttgatgattacagaagctctctccggccggagactgtggaggcacttgtatgcgcaaaagactggctccagtattcaccggccgcaactgaggcgccaggttctgagatgatgaaggcagaagcattgtagattgccgatactgcttccctgttgaagcacaaataaggttgcagtatctttgagcatagttaacagtaggtatattttagacagcagttgcagacatatatttcttctggcatttatctcatagtggtctaatttgtcatgtcgaacaaagtttaactcattgtagtgtgtgctgagtttatctgtggtctgacccggcacacatggtgtgggtgcaaactgcaaactgcgggattttttagggattcaggttgttgagc

SEQ ID NO: 17511 - protein, 764 aa, Zea mays subsp. mays
  peptide (1)..(764): Ceres Seq. ID no. 12362558
  misc_feature (659)..(744): Pfam Name: hAT family dimerisation domain Pfam Description: hAT family dimerisation domain
  misc_feature (104)..(744): Homolog of NCBI NO: 30683310 NR Description: expressed protein [Arabidopsis thaliana]
  misc_feature (104)..(751): Homolog of NCBI NO: 22331085 NR Description: hypothetical protein
  misc_feature (613)..(745): Homolog of NCBI NO: 15218119 NR Description: hypothetical protein
  misc_feature (135)..(618): Homolog of NCBI NO: 15218119 NR Description: hypothetical protein
  misc_feature (638)..(761): Homolog of NCBI NO: 15220044 NR Description: hypothetical protein; protein id: At1g80020.1
  misc_feature (105)..(630): Homolog of NCBI NO: 15220044 NR Description: hypothetical protein; protein id: At1g80020.1
  misc_feature (637)..(763): Homolog of NCBI NO: 15228474 NR Description: putative transposase; protein id: At3g42170.1
  misc_feature (72)..(649): Homolog of NCBI NO: 15228474 NR Description: putative transposase; protein id: At3g42170.1
  misc_feature (45)..(170): Homolog of NCBI NO: 20521440 NR Description: B1003B09.3 [Oryza sativa (japonica
  misc_feature (191)..(748): Homolog of NCBI NO: 20521440 NR Description: B1003B09.3 [Oryza sativa (japonica
MDEPNNNFNATVHANEMFDSNGVIHEDEMAHDDEMIHGHAMFLGDEMIRGTEMVEGSEMIHGHDMVQVNDLIHGNEMVPVHDMVNGDKIAHGNELVNAQMTPRISRRRKKKSLVWEHFTIELMPGGSSRACCKLCKQTFAYSSGSKIAGTSHLKRHITLGSCPVMKDQDRKLALPLAGGHVTDNDGEGTAERPTKRRYRYTGYANATFDPQRSTSYLTKMIILHDYPLHIAQQSSFINFIESLQPRFRVVDVETMEGEVYAVFQKAKENLLQAFSTMPGRISLTIGLWTTSQTLGYVSLAGQFIDSDWKVHRRMLNFMMVSSPHSENALSEAISSSLSEWNMKDKLFTITLDNDCSSHDIYSANLRDHLSNKNNVMLKGQLFVVRCYAHILNVVAQDVIASIHGVIYSIRESIKFIKASPSREEKFAEIALQLEIPSTKTLCLDVTTQWNTTYLMLLAALDYKQAFATLETCDDNYNESPSAEDWKKVEASCNYLKLLYDSAHSVMASANPTANIFFHEAWKIQLELANGTEHGSPFFSCIAKDMHERFDKYWKDCSLVLAIAVVMDPRFKMKLVEFSYSKIYGAEAAKYVKVVNDSLHELYKEYVAQTLPLAPAYVEANNVAANTNVNQGNPPPTSDGLLDFDMYLSEIQSSQPAKCELEQYLEESLTPRIQEFDILNWWKLNTLKFPTLSKMARDILAIPMSMVSSGSSIFSAGTGNRMLDDYRSSLRPETVEALVCAKDWLQYSPAATEAPGSEMMKAEAL

SEQ ID NO: 17512 - protein, 748 aa, Zea mays subsp. mays
  peptide (1)..(748): Ceres Seq. ID no. 12362559
  misc_feature (643)..(728): Pfam Name: hAT family dimerisation domain Pfam Description: hAT family dimerisation domain
  misc_feature (89)..(614): Homolog of NCBI NO: 15220044 NR Description: hypothetical protein; protein id: At1g80020.1
  misc_feature (621)..(747): Homolog of NCBI NO: 15228474 NR Description: putative transposase; protein id: At3g42170.1
  misc_feature (56)..(633): Homolog of NCBI NO: 15228474 NR Description: putative transposase; protein id: At3g42170.1
  misc_feature (88)..(735): Homolog of NCBI NO: 22331085 NR Description: hypothetical protein
  misc_feature (119)..(602): Homolog of NCBI NO: 15218119 NR Description: hypothetical protein
  misc_feature (622)..(745): Homolog of NCBI NO: 15220044 NR Description: hypothetical protein; protein id: At1g80020.1
  misc_feature (597)..(729): Homolog of NCBI NO: 15218119 NR Description: hypothetical protein
  misc_feature (88)..(728): Homolog of NCBI NO: 30683310 NR Description: expressed protein [Arabidopsis thaliana]
  misc_feature (29)..(154): Homolog of NCBI NO: 20521440 NR Description: B1003B09.3 [Oryza sativa (japonica
  misc_feature (175)..(732): Homolog of NCBI NO: 20521440 NR Description: B1003B09.3 [Oryza sativa (japonica
MFDSNGVIHEDEMAHDDEMIHGHAMFLGDEMIRGTEMVEGSEMIHGHDMVQVNDLIHGNEMVPVHDMVNGDKIAHGNELVNAQMTPRISRRRKKKSLVWEHFTIELMPGGSSRACCKLCKQTFAYSSGSKIAGTSHLKRHITLGSCPVMKDQDRKLALPLAGGHVTDNDGEGTAERPTKRRYRYTGYANATFDPQRSTSYLTKMIILHDYPLHIAQQSSFINFIESLQPRFRVVDVETMEGEVYAVFQKAKENLLQAFSTMPGRISLTIGLWTTSQTLGYVSLAGQFIDSDWKVHRRMLNFMMVSSPHSENALSEAISSSLSEWNMKDKLFTITLDNDCSSHDIYSANLRDHLSNKNNVMLKGQLFVVRCYAHILNVVAQDVIASIHGVIYSIRESIKFIKASPSREEKFAEIALQLEIPSTKTLCLDVTTQWNTTYLMLLAALDYKQAFATLETCDDNYNESPSAEDWKKVEASCNYLKLLYDSAHSVMASANPTANIFFHEAWKIQLELANGTEHGSPFFSCIAKDMHERFDKYWKDCSLVLAIAVVMDPRFKMKLVEFSYSKIYGAEAAKYVKVVNDSLHELYKEYVAQTLPLAPAYVEANNVAANTNVNQGNPPPTSDGLLDFDMYLSEIQSSQPAKCELEQYLEESLTPRIQEFDILNWWKLNTLKFPTLSKMARDILAIPMSMVSSGSSIFSAGTGNRMLDDYRSSLRPETVEALVCAKDWLQYSPAATEAPGSEMMKAEAL

SEQ ID NO: 17513 - protein, 736 aa, Zea mays subsp. mays
  peptide (1)..(736): Ceres Seq. ID no. 12362560
  misc_feature (631)..(716): Pfam Name: hAT family dimerisation domain Pfam Description: hAT family dimerisation domain
  misc_feature (76)..(716): Homolog of NCBI NO: 30683310 NR Description: expressed protein [Arabidopsis thaliana]
  misc_feature (76)..(723): Homolog of NCBI NO: 22331085 NR Description: hypothetical protein
  misc_feature (585)..(717): Homolog of NCBI NO: 15218119 NR Description: hypothetical protein
  misc_feature (107)..(590): Homolog of NCBI NO: 15218119 NR Description: hypothetical protein
  misc_feature (610)..(733): Homolog of NCBI NO: 15220044 NR Description: hypothetical protein; protein id: At1g80020.1
  misc_feature (77)..(602): Homolog of NCBI NO: 15220044 NR Description: hypothetical protein; protein id: At1g80020.1
  misc_feature (609)..(735): Homolog of NCBI NO: 15228474 NR Description: putative transposase; protein id: At3g42170.1
  misc_feature (44)..(621): Homolog of NCBI NO: 15228474 NR Description: putative transposase; protein id: At3g42170.1
  misc_feature (17)..(142): Homolog of NCBI NO: 20521440 NR Description: B1003B09.3 [Oryza sativa (japonica
  misc_feature (163)..(720): Homolog of NCBI NO: 20521440 NR Description: B1003B09.3 [Oryza sativa (japonica
MAHDDEMIHGHAMFLGDEMIRGTEMVEGSEMIHGHDMVQVNDLIHGNEMVPVHDMVNGDKIAHGNELVNAQMTPRISRRRKKKSLVWEHFTIELMPGGSSRACCKLCKQTFAYSSGSKIAGTSHLKRHITLGSCPVMKDQDRKLALPLAGGHVTDNDGEGTAERPTKRRYRYTGYANATFDPQRSTSYLTKMIILHDYPLHIAQQSSFINFIESLQPRFRVVDVETMEGEVYAVFQKAKENLLQAFSTMPGRISLTIGLWTTSQTLGYVSLAGQFIDSDWKVHRRMLNFMMVSSPHSENALSEAISSSLSEWNMKDKLFTITLDNDCSSHDIYSANLRDHLSNKNNVMLKGQLFVVRCYAHILNVVAQDVIASIHGVIYSIRESIKFIKASPSREEKFAEIALQLEIPSTKTLCLDVTTQWNTTYLMLLAALDYKQAFATLETCDDNYNESPSAEDWKKVEASCNYLKLLYDSAHSVMASANPTANIFFHEAWKIQLELANGTEHGSPFFSCIAKDMHERFDKYWKDCSLVLAIAVVMDPRFKMKLVEFSYSKIYGAEAAKYVKVVNDSLHELYKEYVAQTLPLAPAYVEANNVAANTNVNQGNPPPTSDGLLDFDMYLSEIQSSQPAKCELEQYLEESLTPRIQEFDILNWWKLNTLKFPTLSKMARDILAIPMSMVSSGSSIFSAGTGNRMLDDYRSSLRPETVEALVCAKDWLQYSPAATEAPGSEMMKAEAL

SEQ ID NO: 17514 - DNA, 1748 bp, Zea mays subsp. mays
  misc_feature (1)..(1748): Ceres Seq. ID no. 12391465
  misc_feature: MA Experiment ID: 108536 Result: Up-regulated in Transcription
  misc_feature: MA Experiment 108536 PARAMETER Experiment Name: Zm_Meristem_P Parameter: Age (day) Value: 8
  misc_feature: MA Experiment 108536 PARAMETER Experiment Name: Zm_Meristem_P Parameter: Organism Value: Zea mays
  misc_feature: MA Experiment 108536 PARAMETER Experiment Name: Zm_Meristem_P Parameter: Plant Line Value: 35A19
  misc_feature: MA Experiment 108536 PARAMETER Experiment Name: Zm_Meristem_P Parameter: Tissue Value: Shoot Meristem vs. Above Shoot Meristem
gactagaagaaagctgaaattacctcatgatcagctctggtggaaatacgccaccttgattgcccactctccgcccgtcgtcgccacaactcgcccgcggtacaacggcccggctaaaacgaggcagggcgcgcacttaaaatagcccggcacggcgcgtacccaccaccacccgcccgccccgcgccgcgcaggcaccacccgctctcctgcggcctcctcctgtttgtgttttcaccgtggtgccgccgccgctgtcccctctctccagctgcggcgaccgcgaccgacaggcggtagagggcaaaggctagcgagatgacgaagctgccgtggtggcgcgccgacgcgtcggagctggtggccgtgacggcgatgggagtgtgggaggccgtgctcgccggcggcggcaggagattcatcaagcggaaggacagcgacgccggcgagaccggttcgcatccccaccaccctgtgttgatcctgaacatttttttcaaaaaaaaggatctttccgccggctctgttggggttgatggcgaaagaagagctcttcctttggctttgcgcggtcgggcactggaggagttgcgaagctccttgtacaatgaaatgcatagcgcagaaggtgctaagcgccagcagcagcgattctgtggaccaagtgttgcattgacattcaattttgctgttgctgttgggattatcatggcaaacaaaatggtgatggggagtgttggatttaaatttccaattgcactctcattaattcattatgcagttgcatttgttctaatggccacccttaagacattatccttgttaccagttgccccaccatcgaaatccactcctttctcatctatatttgctttgggtgctgtaatgtccctgtccactgggctagccaacgtgagtttgaaacataacagtgtaggtttctatcaaatggctaagattgctgtaaccccaacaattgtcgtagcagaattcatgcttttccagaagaaagtttcctctaaaaaggctgtcacactggcagttgtgtcatttggagtcgctgtagcgactgttaccgatctggagttcaacttttttggtgcttgtgttgcattagcatggattgttcctagtgccgtgaacaaaatcctttggtcaagtttgcaacagagtggaaactggaccgcccttgcgctgatgtggaagacaactccgattacgatatttttcttgttgacattgatgcctttgctggacccccctggcctcttgttgttcaattggaacttcagaaacagctgcgctgttatcatctctgcattgttcggtttccttcttcagtggtctggtgctttggcactcggcgcgacgtcagctttgtctcatgttgtgctgggccaattcaaaacgatcgtcatcatgctctccggctacctgatcttcggctccgaccctgggatcaccagcgtctgcggtgccgtgctcgcactcggcggcatgtccttctacacctacctgggtctgaagaaagaccccgcgaccagcggcaagaaagcaccatcgagacagaactccttcatggagagacctaaggtcgctgctgacgacagtgacgacgcggattcagagcaagatgatactgtataggttggggaaactgtcgtctaggccacttaatgcaaagatcaatccgagctcagttaattttcggttggttgtaatctgtcggtgaccgagtccatttttgt

SEQ ID NO: 17515 - protein, 442 aa, Zea mays subsp. mays
  peptide (1)..(442): Ceres Seq. ID no. 12391466
  misc_feature (129)..(252): Pfam Name: Integral membrane protein DUF6 Pfam Description: Integral membrane protein DUF6
  misc_feature (110)..(442): Homolog of NCBI NO: 22329373 NR Description: unknown protein
  misc_feature (118)..(413): Homolog of NCBI NO: 13699188 NR Description: putative glucose-6-phosphate/phosphate-tranlocat
  misc_feature (118)..(436): Homolog of NCBI NO: 34896140 NR Description: P0701D05.25 [Oryza sativa (japonica
  misc_feature (118)..(422): Homolog of NCBI NO: 15238957 NR Description: putative protein; protein id: At5g42420.1
  misc_feature (84)..(433): Homolog of NCBI NO: 27808610 NR Description: At5g57100 [Arabidopsis thaliana]
  misc_feature (84)..(433): Homolog of NCBI NO: 21553668 NR Description: unknown [Arabidopsis thaliana]
  misc_feature (84)..(433): Homolog of NCBI NO: 15242035 NR Description: putative protein
  misc_feature (76)..(430): Homolog of NCBI NO: 21593061 NR Description: unknown [Arabidopsis thaliana]
  misc_feature (20)..(46): Homolog of NCBI NO: 15241097 NR Description: putative protein
  misc_feature (75)..(430): Homolog of NCBI NO: 15241097 NR Description: putative protein
MTKLPWWRADASELVAVTAMGVWEAVLAGGGRRFIKRKDSDAGETGSHPHHPVLILNIFFKKKDLSAGSVGVDGERRALPLALRGRALEELRSSLYNEMHSAEGAKRQQQRFCGPSVALTFNFAVAVGIIMANKMVMGSVGFKFPIALSLIHYAVAFVLMATLKTLSLLPVAPPSKSTPFSSIFALGAVMSLSTGLANVSLKHNSVGFYQMAKIAVTPTIVVAEFMLFQKKVSSKKAVTLAVVSFGVAVATVTDLEFNFFGACVALAWIVPSAVNKILWSSLQQSGNWTALALMWKTTPITIFFLLTLMPLLDPPGLLLFNWNFRNSCAVIISALFGFLLQWSGALALGATSALSHVVLGQFKTIVIMLSGYLIFGSDPGITSVCGAVLALGGMSFYTYLGLKKDPATSGKKAPSRQNSFMERPKVAADDSDDADSEQDDTV

SEQ ID NO: 17516 - protein, 423 aa, Zea mays subsp. mays
  peptide (1)..(423): Ceres Seq. ID no. 12391467
  misc_feature (110)..(233): Pfam Name: Integral membrane protein DUF6 Pfam Description: Integral membrane protein DUF6
  misc_feature (91)..(423): Homolog of NCBI NO: 22329373 NR Description: unknown protein
  misc_feature (99)..(394): Homolog of NCBI NO: 13699188 NR Description: putative glucose-6-phosphate/phosphate-tranlocat
  misc_feature (99)..(417): Homolog of NCBI NO: 34896140 NR Description: P0701D05.25 [Oryza sativa (japonica
  misc_feature (99)..(403): Homolog of NCBI NO: 15238957 NR Description: putative protein; protein id: At5g42420.1
  misc_feature (65)..(414): Homolog of NCBI NO: 27808610 NR Description: At5g57100 [Arabidopsis thaliana]
  misc_feature (65)..(414): Homolog of NCBI NO: 21553668 NR Description: unknown [Arabidopsis thaliana]
  misc_feature (65)..(414): Homolog of NCBI NO: 15242035 NR Description: putative protein
  misc_feature (57)..(411): Homolog of NCBI NO: 21593061 NR Description: unknown [Arabidopsis thaliana]
  misc_feature (1)..(27): Homolog of NCBI NO: 15241097 NR Description: putative protein
  misc_feature (56)..(411): Homolog of NCBI NO: 15241097 NR Description: putative protein
MGVWEAVLAGGGRRFIKRKDSDAGETGSHPHHPVLILNIFFKKKDLSAGSVGVDGERRALPLALRGRALEELRSSLYNEMHSAEGAKRQQQRFCGPSVALTFNFAVAVGIIMANKMVMGSVGFKFPIALSLIHYAVAFVLMATLKTLSLLPVAPPSKSTPFSSIFALGAVMSLSTGLANVSLKHNSVGFYQMAKIAVTPTIVVAEFMLFQKKVSSKKAVTLAVVSFGVAVATVTDLEFNFFGACVALAWIVPSAVNKILWSSLQQSGNWTALALMWKTTPITIFFLLTLMPLLDPPGLLLFNWNFRNSCAVIISALFGFLLQWSGALALGATSALSHVVLGQFKTIVIMLSGYLIFGSDPGITSVCGAVLALGGMSFYTYLGLKKDPATSGKKAPSRQNSFMERPKVAADDSDDADSEQDDTV

SEQ ID NO: 17517 - protein, 344 aa, Zea mays subsp. mays
  peptide (1)..(344): Ceres Seq. ID no. 12391468
  misc_feature (31)..(154): Pfam Name: Integral membrane protein DUF6 Pfam Description: Integral membrane protein DUF6
  misc_feature (12)..(341): Homolog of NCBI NO: 27311731 NR Description: putative integral membrane protein [Arabidopsis
  misc_feature (12)..(344): Homolog of NCBI NO: 22329373 NR Description: unknown protein
  misc_feature (20)..(315): Homolog of NCBI NO: 13699188 NR Description: putative glucose-6-phosphate/phosphate-tranlocat
  misc_feature (20)..(338): Homolog of NCBI NO: 34896140 NR Description: P0701D05.25 [Oryza sativa (japonica
  misc_feature (20)..(324): Homolog of NCBI NO: 15238957 NR Description: putative protein; protein id: At5g42420.1
  misc_feature (1)..(335): Homolog of NCBI NO: 27808610 NR Description: At5g57100 [Arabidopsis thaliana]
  misc_feature (1)..(335): Homolog of NCBI NO: 21553668 NR Description: unknown [Arabidopsis thaliana]
  misc_feature (1)..(335): Homolog of NCBI NO: 15242035 NR Description: putative protein
  misc_feature (1)..(332): Homolog of NCBI NO: 21593061 NR Description: unknown [Arabidopsis thaliana]
  misc_feature (1)..(332): Homolog of NCBI NO: 15241097 NR Description: putative protein
MHSAEGAKRQQQRFCGPSVALTFNFAVAVGIIMANKMVMGSVGFKFPIALSLIHYAVAFVLMATLKTLSLLPVAPPSKSTPFSSIFALGAVMSLSTGLANVSLKHNSVGFYQMAKIAVTPTIVVAEFMLFQKKVSSKKAVTLAVVSFGVAVATVTDLEFNFFGACVALAWIVPSAVNKILWSSLQQSGNWTALALMWKTTPITIFFLLTLMPLLDPPGLLLFNWNFRNSCAVIISALFGFLLQWSGALALGATSALSHVVLGQFKTIVIMLSGYLIFGSDPGITSVCGAVLALGGMSFYTYLGLKKDPATSGKKAPSRQNSFMERPKVAADDSDDADSEQDDTV

SEQ ID NO: 17518 - DNA, 847 bp, Zea mays subsp. mays
  misc_feature (1)..(847): Ceres Seq. ID no. 12390186
  misc_feature: MA Experiment ID: 108543 Result: Down-regulated in Transcription
  misc_feature: MA Experiment ID: 20000535 Result: Up-regulated in Transcription
  misc_feature: MA Experiment 20000535 PARAMETER Experiment Name: Zm_Hybrid_Seed_Dev_P Parameter: DAP Value: 30 vs. 12
  misc_feature: MA Experiment 20000535 PARAMETER Experiment Name: Zm_Hybrid_Seed_Dev_P Parameter: Organism Value: Zea mays
  misc_feature: MA Experiment 20000535 PARAMETER Experiment Name: Zm_Hybrid_Seed_Dev_P Parameter: Plant Line Value: 35A19
  misc_feature: MA Experiment 20000535 PARAMETER Experiment Name: Zm_Hybrid_Seed_Dev_P Parameter: Tissue Value: Embryo vs. Unfert Floret
gcacgagaccattacctagaacatcctaatcgaaaaagtggcgcttggggctgttcgttgtggtggtgcggcaggaagagacgatggcgcgaggtggcgcgtgggccgcggtggcggcggcggccgtgtggtggatggcggcgggggccggggcggtatggctggagattgcgccgtcagggactaagtgtgtgtcggaggagatccaatccaacgttgttgtcatcggcgactactccgtcctctatgatcaccaccacgcccagcctaccatctccgtcaaggttacgtccccttttggagacattgttcataagaaagagaaggtttcgatggggcaatttgcatttaccacagcagaagcagggaactaccttgcctgcttctcaattgatggtgaggacagagggttagtggtgaagctaaaccttgactggaaaattgggctggctagtagagactgggattctgttgccaaaaaggaaaagatcgagggagttgaactggagttgctcaagctcgaagttgctgtccaatcaatccatgacaacctgctgctactaaaatccaaagaagctaacatgagggacgtcagtgagcagacgaattctagggtcacgtggctgagcatgctgtctcttgttgtttgcattgcagtctctgttttacagctgtggcatctacaacagtacttccgaaagatgaagctcatctgacctgatgtctgaaatatagtgctctgcaataagcttatcttcatctttttttttttttgcatatgagatctggtagttccaccgtcgagcctagcaattgtaaataaaatggtataacaaactgaaatccc

SEQ ID NO: 17519 - protein, 210 aa, Zea mays subsp. mays
  peptide (1)..(210): Ceres Seq. ID no. 12390187
  misc_feature (12)..(210): Pfam Name: emp24/gp25L/p24 family Pfam Description: emp24/gp25L/p24 family
  misc_feature (28)..(210): Homolog of NCBI NO: 18396016 NR Description: expressed protein
  misc_feature (28)..(210): Homolog of NCBI NO: 8778403 NR Description: F16A14.23 [Arabidopsis thaliana]
  misc_feature (28)..(210): Homolog of NCBI NO: 21618241 NR Description: unknown [Arabidopsis thaliana]
  misc_feature (28)..(210): Homolog of NCBI NO: 15223027 NR Description: unknown protein; protein id: At1g14010.1
  misc_feature (21)..(210): Homolog of NCBI NO: 15228372 NR Description: putative membrane protein; protein id:
  misc_feature (3)..(210): Homolog of NCBI NO: 33146897 NR Description: putative transmembrane protein
  misc_feature (60)..(186): Homolog of NCBI NO: 40641597 NR Description: putative transmembrane protein-like protein
  misc_feature (1)..(210): Homolog of NCBI NO: 15219136 NR Description: transmembrane protein, putative
  misc_feature (12)..(210): Homolog of NCBI NO: 15223626 NR Description: integral membrane protein, putative
  misc_feature (24)..(210): Homolog of NCBI NO: 15217563 NR Description: unknown protein; protein id: At1g09580.1
MARGGAWAAVAAAAVWWMAAGAGAVWLEIAPSGTKCVSEEIQSNVVVIGDYSVLYDHHHAQPTISVKVTSPFGDIVHKKEKVSMGQFAFTTAEAGNYLACFSIDGEDRGLVVKLNLDWKIGLASRDWDSVAKKEKIEGVELELLKLEVAVQSIHDNLLLLKSKEANMRDVSEQTNSRVTWLSMLSLVVCIAVSVLQLWHLQQYFRKMKLI

SEQ ID NO: 17520 - protein, 193 aa, Zea mays subsp. mays
  peptide (1)..(193): Ceres Seq. ID no. 12390188
  misc_feature (1)..(193): Pfam Name: emp24/gp25L/p24 family Pfam Description: emp24/gp25L/p24 family
  misc_feature (11)..(193): Homolog of NCBI NO: 18396016 NR Description: expressed protein
  misc_feature (11)..(193): Homolog of NCBI NO: 8778403 NR Description: F16A14.23 [Arabidopsis thaliana]
  misc_feature (11)..(193): Homolog of NCBI NO: 21618241 NR Description: unknown [Arabidopsis thaliana]
  misc_feature (11)..(193): Homolog of NCBI NO: 15223027 NR Description: unknown protein; protein id: At1g14010.1
  misc_feature (4)..(193): Homolog of NCBI NO: 15228372 NR Description: putative membrane protein; protein id:
  misc_feature (1)..(193): Homolog of NCBI NO: 33146897 NR Description: putative transmembrane protein
  misc_feature (43)..(169): Homolog of NCBI NO: 40641597 NR Description: putative transmembrane protein-like protein
  misc_feature (1)..(193): Homolog of NCBI NO: 15219136 NR Description: transmembrane protein, putative
  misc_feature (1)..(193): Homolog of NCBI NO: 15223626 NR Description: integral membrane protein, putative
  misc_feature (7)..(193): Homolog of NCBI NO: 15217563 NR Description: unknown protein; protein id: At1g09580.1
MAAGAGAVWLEIAPSGTKCVSEEIQSNVVVIGDYSVLYDHHHAQPTISVKVTSPFGDIVHKKEKVSMGQFAFTTAEAGNYLACFSIDGEDRGLVVKLNLDWKIGLASRDWDSVAKKEKIEGVELELLKLEVAVQSIHDNLLLLKSKEANMRDVSEQTNSRVTWLSMLSLVVCIAVSVLQLWHLQQYFRKMKLI

SEQ ID NO: 17521 - protein, 137 aa, Zea mays subsp. mays
  peptide (1)..(137): Ceres Seq. ID no. 12390189
ARDHYLEHPNRKSGAWGCSLWWCGRKRRWREVARGPRWRRRPCGGWRRGPGRYGWRLRRQGLSVCRRRSNPTLLSSATTPSSMITTTPSLPSPSRLRPLLETLFIRKRRFRWGNLHLPQQKQGTTLPASQLMVRTEG

SEQ ID NO: 17522 - DNA, 2068 bp, Zea mays subsp. mays
  misc_feature (1)..(2068): Ceres Seq. ID no. 12362514
  misc_feature: MA Experiment ID: 108529 Result: Up-regulated in Transcription
  misc_feature: MA Experiment 108529 PARAMETER Experiment Name: Zm_Imbibed_Seeds_P Parameter: Age (day) Value: 5 vs. 2
  misc_feature: MA Experiment 108529 PARAMETER Experiment Name: Zm_Imbibed_Seeds_P Parameter: Organism Value: Zea mays
  misc_feature: MA Experiment 108529 PARAMETER Experiment Name: Zm_Imbibed_Seeds_P Parameter: Plant Line Value: 35A19
  misc_feature: MA Experiment 108529 PARAMETER Experiment Name: Zm_Imbibed_Seeds_P Parameter: Tissue Value: Roots vs. Embryo
gcacgagaccattacctagaacatcctaatcgaaaaattcccttccttccttgctcctcccctgcctcgcctctctctctcccctctcctcgcctccagctcctgctcggcccgctcgcgtcgagctgcgcgcgcgcctgcggtggccgtgaaggacagcccgagggacgcgccgggtgcactgatctgggggccgcgtgtccccggtggtggggcgaggcggcgccggcttccaggaatgggcaacttgtagcgtcggtttcttttgcatatgcactttctattgttgttgtcatttcaaaggaggccatagtctcctggattttgtatgccttgttatctggaattggtgaccatagatgtcattccgtagcatagtccgtgatgttagggatggctttggcagcttgtcgaggagaagctttgaggtgaccctcgcaagcatttatggccttactgggcatcacaaagggaagacccagagctcatcacatgttctcgacgactcaccttccataattcgtgaaagtcgatgggcgaatctacctcctgaactcatccgtgatatcatacggagactggaggctgatgagagcacctggccagcgcggaagcacgtcgtttgcttcgcagctgtttgtaggacatggagagaaatgtgtaaagagattgtgttgagcccagagttctgtggcaagctcaccttccctgtgtctctaaaacagcctggtcctcgagatggaaatacaatggtccagtgttttataaagaggaataagtcaaaatccacttaccatctctacctgtgccttagcaatgttgttacttcagaaagtgggaaattcctcttatcagctaaacgacaccgcaaaaccacatgcaccgagtacactatatcaatggattctggcaacatctcaagatcaaaaagaacctacattggaaaaataaggtctaacttcctaggcacaagatttttaatttatgatacacaagccccctataatggggctgtagttcctcctgccggaaggaccagcaggaggttcaactccacaaaagtctctccaaagctgccttcagtcagttacaacatcgcacaggtatcgtatgagctaaatgtccttggcacaagaggtcctaggcggatgcgttgcatcatgcactccatacctgcatcatcagtggagccaggtggcacagtgcctggacagccagagcagattgtacctcgagccctggaggattcattccgcagcacggcttccttctcgcagtcgttccgtagcactgcctcattctccaagtccatcatggactcgtccatggatttcaatagcgctcgcttctctgacatagctggcagcagcgctcgcttcacgggcgttcctggtagcagtgctcgctttgcgggcgttcctggcagcagcgctcgcttctcgggcattgctggcgccagattggacaacgacgaggagagtgaaaccaaggagaggccactggtgcttcgtaataagccgcctaggtggcacgaacagctgcagtgttggtgcctcaacttccggggccgtgtgacaattgcctcggtgaagaacttccagctgatcgccgcggctaccccgccacccgcaggtgcgccaaccccctcgcagcntgctccgtcagatcctgacaaggtgattctccagtttggcaaagtggcaagggatatgttcacgatggactatcgctaccctctctcggctttccaggcctttgccatttgtctgagtagctttgatacaaaattagcctgtgaataaatggagaagaacaaaggtaaaggagaacagcaggttgcttgcattaggccatcagtgtacctctttccatctggctctcgtgttgccttggttgtatttgtgcttaatgtagccatgaagttggtggccatatatggacgcatgtgttgttgttggccctctcccttagaagtgattaaaagttgcatttggaccacatgttacccgatctgtaatatacttgcagtggcattgcatgccgcgtgataacaaagttcccgttcgtg

SEQ ID NO: 17523 - protein, 480 aa, Zea mays subsp. mays
  peptide (1)..(480): Ceres Seq. ID no. 12362515
  misc_feature (123)..(336): Pfam Name: Tub family Pfam Description: Tub family
  misc_feature (356)..(431): Homolog of NCBI NO: 32480039 NR Description: OSJNBa0039K24.2 [Oryza sativa (japonica
  misc_feature (1)..(337): Homolog of NCBI NO: 32480039 NR Description: OSJNBa0039K24.2 [Oryza sativa (japonica
  misc_feature (356)..(431): Homolog of NCBI NO: 5777631 NR Description: CAA303719.1 protein [Oryza sativa]
  misc_feature (1)..(337): Homolog of NCBI NO: 5777631 NR Description: CAA303719.1 protein [Oryza sativa]
  misc_feature (356)..(480): Homolog of NCBI NO: 15223772 NR Description: Tub family protein, putative; protein id:
  misc_feature (1)..(335): Homolog of NCBI NO: 15223772 NR Description: Tub family protein, putative; protein id:
  misc_feature (356)..(480): Homolog of NCBI NO: 15222543 NR Description: F-box containing tubby family protein; protein
  misc_feature (1)..(333): Homolog of NCBI NO: 15222543 NR Description: F-box containing tubby family protein; protein
  misc_feature (356)..(480): Homolog of NCBI NO: 34908598 NR Description: putative tubby protein [Oryza sativa (japonica
  misc_feature (1)..(336): Homolog of NCBI NO: 34908598 NR Description: putative tubby protein [Oryza sativa (japonica
  misc_feature (432)..(432): Xaa is any aa, unknown or other
MSFRSIVRDVRDGFGSLSRRSFEVTLASIYGLTGHHKGKTQSSSHVLDDSPSIIRESRWANLPPELIRDIIRRLEADESTWPARKHVVCFAAVCRTWREMCKEIVLSPEFCGKLTFPVSLKQPGPRDGNTMVQCFIKRNKSKSTYHLYLCLSNVVTSESGKFLLSAKRHRKTTCTEYTISMDSGNISRSKRTYIGKIRSNFLGTRFLIYDTQAPYNGAVVPPAGRTSRRFNSTKVSPKLPSVSYNIAQVSYELNVLGTRGPRRMRCIMHSIPASSVEPGGTVPGQPEQIVPRALEDSFRSTASFSQSFRSTASFSKSIMDSSMDFNSARFSDIAGSSARFTGVPGSSARFAGVPGSSARFSGIAGARLDNDEESETKERPLVLRNKPPRWHEQLQCWCLNFRGRVTIASVKNFQLIAAATPPPAGAPTPSQXAPSDPDKVILQFGKVARDMFTMDYRYPLSAFQAFAICLSSFDTKLACE

SEQ ID NO: 17524 - protein, 381 aa, Zea mays subsp. mays
  peptide (1)..(381): Ceres Seq. ID no. 12362516
  misc_feature (24)..(237): Pfam Name: Tub family Pfam Description: Tub family
  misc_feature (257)..(381): Homolog of NCBI NO: 34908598 NR Description: putative tubby protein [Oryza sativa (japonica
  misc_feature (257)..(332): Homolog of NCBI NO: 32480039 NR Description: OSJNBa0039K24.2 [Oryza sativa (japonica
  misc_feature (257)..(332): Homolog of NCBI NO: 5777631 NR Description: CAA303719.1 protein [Oryza sativa]
  misc_feature (257)..(381): Homolog of NCBI NO: 15223772 NR Description: Tub family protein, putative; protein id:
  misc_feature (257)..(381): Homolog of NCBI NO: 15222543 NR Description: F-box containing tubby family protein; protein
  misc_feature (1)..(234): Homolog of NCBI NO: 15222543 NR Description: F-box containing tubby family protein; protein
  misc_feature (1)..(236): Homolog of NCBI NO: 15223772 NR Description: Tub family protein, putative; protein id:
  misc_feature (1)..(238): Homolog of NCBI NO: 5777631 NR Description: CAA303719.1 protein [Oryza sativa]
  misc_feature (1)..(238): Homolog of NCBI NO: 32480039 NR Description: OSJNBa0039K24.2 [Oryza sativa (japonica
  misc_feature (1)..(237): Homolog of NCBI NO: 34908598 NR Description: putative tubby protein [Oryza sativa (japonica
  misc_feature (333)..(333): Xaa is any aa, unknown or other
MCKEIVLSPEFCGKLTFPVSLKQPGPRDGNTMVQCFIKRNKSKSTYHLYLCLSNVVTSESGKFLLSAKRHRKTTCTEYTISMDSGNISRSKRTYIGKIRSNFLGTRFLIYDTQAPYNGAVVPPAGRTSRRFNSTKVSPKLPSVSYNIAQVSYELNVLGTRGPRRMRCIMHSIPASSVEPGGTVPGQPEQIVPRALEDSFRSTASFSQSFRSTASFSKSIMDSSMDFNSARFSDIAGSSARFTGVPGSSARFAGVPGSSARFSGIAGARLDNDEESETKERPLVLRNKPPRWHEQLQCWCLNFRGRVTIASVKNFQLIAAATPPPAGAPTPSQXAPSDPDKVILQFGKVARDMFTMDYRYPLSAFQAFAICLSSFDTKLACE

SEQ ID NO: 17525 - protein, 350 aa, Zea mays subsp. mays
  peptide (1)..(350): Ceres Seq. ID no. 12362517
  misc_feature (1)..(206): Pfam Name: Tub family Pfam Description: Tub family
  misc_feature (226)..(301): Homolog of NCBI NO: 32480039 NR Description: OSJNBa0039K24.2 [Oryza sativa (japonica
  misc_feature (1)..(207): Homolog of NCBI NO: 32480039 NR Description: OSJNBa0039K24.2 [Oryza sativa (japonica
  misc_feature (226)..(301): Homolog of NCBI NO: 5777631 NR Description: CAA303719.1 protein [Oryza sativa]
  misc_feature (1)..(207): Homolog of NCBI NO: 5777631 NR Description: CAA303719.1 protein [Oryza sativa]
  misc_feature (226)..(350): Homolog of NCBI NO: 15223772 NR Description: Tub family protein, putative; protein id:
  misc_feature (1)..(205): Homolog of NCBI NO: 15223772 NR Description: Tub family protein, putative; protein id:
  misc_feature (226)..(350): Homolog of NCBI NO: 15222543 NR Description: F-box containing tubby family protein; protein
  misc_feature (1)..(203): Homolog of NCBI NO: 15222543 NR Description: F-box containing tubby family protein; protein
  misc_feature (226)..(350): Homolog of NCBI NO: 34908598 NR Description: putative tubby protein [Oryza sativa (japonica
  misc_feature (1)..(206): Homolog of NCBI NO: 34908598 NR Description: putative tubby protein [Oryza sativa (japonica
  misc_feature (302)..(302): Xaa is any aa, unknown or other
MVQCFIKRNKSKSTYHLYLCLSNVVTSESGKFLLSAKRHRKTTCTEYTISMDSGNISRSKRTYIGKIRSNFLGTRFLIYDTQAPYNGAVVPPAGRTSRRFNSTKVSPKLPSVSYNIAQVSYELNVLGTRGPRRMRCIMHSIPASSVEPGGTVPGQPEQIVPRALEDSFRSTASFSQSFRSTASFSKSIMDSSMDFNSARFSDIAGSSARFTGVPGSSARFAGVPGSSARFSGIAGARLDNDEESETKERPLVLRNKPPRWHEQLQCWCLNFRGRVTIASVKNFQLIAAATPPPAGAPTPSQXAPSDPDKVILQFGKVARDMFTMDYRYPLSAFQAFAICLSSFDTKLACE

SEQ ID NO: 17526 - DNA, 1478 bp, Zea mays subsp. mays
  misc_feature (1)..(1478): Ceres Seq. ID no. 12366212
  misc_feature: MA Experiment ID: 108529 Result: Up-regulated in Transcription
  misc_feature: MA Experiment 108529 PARAMETER Experiment Name: Zm_Imbibed_Seeds_P Parameter: Age (day) Value: 5 vs. 2
  misc_feature: MA Experiment 108529 PARAMETER Experiment Name: Zm_Imbibed_Seeds_P Parameter: Organism Value: Zea mays
  misc_feature: MA Experiment 108529 PARAMETER Experiment Name: Zm_Imbibed_Seeds_P Parameter: Plant Line Value: 35A19
  misc_feature: MA Experiment 108529 PARAMETER Experiment Name: Zm_Imbibed_Seeds_P Parameter: Tissue Value: Roots vs. Embryo
  misc_feature: MA Experiment ID: 108535 Result: Down-regulated in Transcription
  misc_feature: MA Experiment 108535 PARAMETER Experiment Name: Zm_Meristem_P Parameter: Age (day) Value: 8
  misc_feature: MA Experiment 108535 PARAMETER Experiment Name: Zm_Meristem_P Parameter: Organism Value: Zea mays
  misc_feature: MA Experiment 108535 PARAMETER Experiment Name: Zm_Meristem_P Parameter: Plant Line Value: 35A19
  misc_feature: MA Experiment 108535 PARAMETER Experiment Name: Zm_Meristem_P Parameter: Tissue Value: Root Meristem vs. Above Root Meristem
  misc_feature: MA Experiment ID: 108543 Result: Up-regulated in Transcription
  misc_feature: MA Experiment ID: 108546 Result: Up-regulated in Transcription
  misc_feature: MA Experiment 108546 PARAMETER Experiment Name: Zm_Imbibed_Seeds_P Parameter: Age (day) Value: 3 vs. 2
  misc_feature: MA Experiment 108546 PARAMETER Experiment Name: Zm_Imbibed_Seeds_P Parameter: Organism Value: Zea mays
  misc_feature: MA Experiment 108546 PARAMETER Experiment Name: Zm_Imbibed_Seeds_P Parameter: Plant Line Value: 35A19
  misc_feature: MA Experiment 108546 PARAMETER Experiment Name: Zm_Imbibed_Seeds_P Parameter: Tissue Value: Roots vs. Embryo
  misc_feature: MA Experiment ID: 108689 Result: Up-regulated in Transcription
  misc_feature: MA Experiment 108689 PARAMETER Experiment Name: Zm_Drought_Roots_P Parameter: Age (day) Value: 9
  misc_feature: MA Experiment 108689 PARAMETER Experiment Name: Zm_Drought_Roots_P Parameter: Organism Value: Zea mays
  misc_feature: MA Experiment 108689 PARAMETER Experiment Name: Zm_Drought_Roots_P Parameter: Plant Line Value: 35A19
  misc_feature: MA Experiment 108689 PARAMETER Experiment Name: Zm_Drought_Roots_P Parameter: Timepoint (hr) Value: 24
  misc_feature: MA Experiment 108689 PARAMETER Experiment Name: Zm_Drought_Roots_P Parameter: Tissue Value: Roots
  misc_feature: MA Experiment 108689 PARAMETER Experiment Name: Zm_Drought_Roots_P Parameter: Treatment Value: Drought vs. No Drought
cgcgcctccccccaactcgtccagagttagttgtagctatagacctggttgttgtagcgcacgcagtagccataggaaatgcggctgcttgctgccaagatgagtggcggcgccaaggcctacgccgccgtcgtcctgatcaggatcatgtactccggcatgcacgtcatgagcaaggtggccctggatcagggcatgaacccgctggtgttcctgttctaccggcataccactgccgcgctcgttctcatccctgtcacctttgttgtcgagaggcggaaagctaagccggttacgttcaagattggatggaagatgttcatacatgccctctatggggtgacagcatgcggtgacttgtttaaccttggactcaactacacttctgctacgtcatcttcagcgttgtacaacgttcaaccggtggtcacattcatcctagccgtcatatttgggatggagactctgaaactgactcggttccatggcaaagtgaaattcgcgggcatcctgttctgcgtcgccggcgtcaccatcctggccttctacgaggggccgatgttcaggtccttcaaccaccaccatctgtttcagaacggcggcggcggcggcggtagctctgcagcaggagcaggagacacgcactccaagaagcagtgggtgctggggatcttcctcatgacactatccaacgttctagcaggcctgtggacagtgctccaggggcccctgatagaggacacgtcgaagctgatgaacacgacgctgcagatctcgtgggcgtcgctccaggccttcctggtggccgttgcggtggagagggacttctccaagtggaggctgggctggaacgtcggcctcgccgccataatctacagcggcgtgatcgtgacggcgctttcctactacatgcaaatgtggacgatcgccaagaggggcccggtgttcctggccatgtccatgccgctcaccttcgtcttcaccatcgtcatatcctccttcgtcataggggacgcagtcagcctaggaagcatctttgccggggcgttgctggttggaggcctgtacaatgtgttctgggggcaagagcatcgaggagcgagacgacgacgacctgatgaacaagatcagcggcccgggaaaagccgggcagcaggacaaggcggcggacaataatccggcgtcgtcccaagtgccggatgacggtgcggaggcaaaggtgtaatacagcctctctcatcagtcagccagacacgggaacgatcgatctgcgtcaaaagctaggcggccagcaggccaaagccaagccactggttaatttatttcaggggtgctgggaaacaaaacaacgaagaacgaagcaggaattagcacacgtattgtgatttgtgaatgtgacgtgatcgatatgcaggtctactcaccggccggccggactcgtgtggcacacgcacgctgtaaatttggtctcggatttt

SEQ ID NO: 17527 - protein, 365 aa, Zea mays subsp. mays
  peptide (1)..(365): Ceres Seq. ID no. 12366213
  misc_feature (210)..(334): Pfam Name: Integral membrane protein DUF6 Pfam Description: Integral membrane protein DUF6
  misc_feature (13)..(338): Homolog of NCBI NO: 34903800 NR Description: OSJNBa0016I09.13 [Oryza sativa (japonica
  misc_feature (13)..(79): Homolog of NCBI NO: 34903796 NR Description: OSJNBa0016I09.11 [Oryza sativa (japonica
  misc_feature (93)..(338): Homolog of NCBI NO: 34903796 NR Description: OSJNBa0016I09.11 [Oryza sativa (japonica
  misc_feature (13)..(350): Homolog of NCBI NO: 15238227 NR Description: nodulin-like protein; protein id: At5g64700.1
  misc_feature (11)..(336): Homolog of NCBI NO: 34903802 NR Description: OSJNBa0016I09.14 [Oryza sativa (japonica
  misc_feature (40)..(337): Homolog of NCBI NO: 34913772 NR Description: nodulin-like protein [Oryza sativa (japonica
  misc_feature (30)..(336): Homolog of NCBI NO: 34913778 NR Description: nodulin-like protein [Oryza sativa (japonica
  misc_feature (10)..(341): Homolog of NCBI NO: 34913776 NR Description: nodulin-like protein [Oryza sativa (japonica
  misc_feature (9)..(117): Homolog of NCBI NO: 34393900 NR Description: nodulin-like protein [Oryza sativa (japonica
  misc_feature (210)..(338): Homolog of NCBI NO: 34393900 NR Description: nodulin-like protein [Oryza sativa (japonica
MRLLAAKMSGGAKAYAAVVLIRIMYSGMHVMSKVALDQGMNPLVFLFYRHTTAALVLIPVTFVVERRKAKPVTFKIGWKMFIHALYGVTACGDLFNLGLNYTSATSSSALYNVQPVVTFILAVIFGMETLKLTRFHGKVKFAGILFCVAGVTILAFYEGPMFRSFNHHHLFQNGGGGGGSSAAGAGDTHSKKQWVLGIFLMTLSNVLAGLWTVLQGPLIEDTSKLMNTTLQISWASLQAFLVAVAVERDFSKWRLGWNVGLAAIIYSGVIVTALSYYMQMWTIAKRGPVFLAMSMPLTFVFTIVISSFVIGDAVSLGSIFAGALLVGGLYNVFWGQEHRGARRRRPDEQDQRPGKSRAAGQGGGQ

SEQ ID NO: 17528 - protein, 358 aa, Zea mays subsp. mays
  peptide (1)..(358): Ceres Seq. ID no. 12366214
  misc_feature (203)..(327): Pfam Name: Integral membrane protein DUF6 Pfam Description: Integral membrane protein DUF6
  misc_feature (6)..(331): Homolog of NCBI NO: 34903800 NR Description: OSJNBa0016I09.13 [Oryza sativa (japonica
  misc_feature (6)..(72): Homolog of NCBI NO: 34903796 NR Description: OSJNBa0016I09.11 [Oryza sativa (japonica
  misc_feature (86)..(331): Homolog of NCBI NO: 34903796 NR Description: OSJNBa0016I09.11 [Oryza sativa (japonica
  misc_feature (6)..(343): Homolog of NCBI NO: 15238227 NR Description: nodulin-like protein; protein id: At5g64700.1
  misc_feature (4)..(329): Homolog of NCBI NO: 34903802 NR Description: OSJNBa0016I09.14 [Oryza sativa (japonica
  misc_feature (33)..(330): Homolog of NCBI NO: 34913772 NR Description: nodulin-like protein [Oryza sativa (japonica
  misc_feature (23)..(329): Homolog of NCBI NO: 34913778 NR Description: nodulin-like protein [Oryza sativa (japonica
  misc_feature (3)..(334): Homolog of NCBI NO: 34913776 NR Description: nodulin-like protein [Oryza sativa (japonica
  misc_feature (2)..(110): Homolog of NCBI NO: 34393900 NR Description: nodulin-like protein [Oryza sativa (japonica
  misc_feature (203)..(331): Homolog of NCBI NO: 34393900 NR Description: nodulin-like protein [Oryza sativa (japonica
MSGGAKAYAAVVLIRIMYSGMHVMSKVALDQGMNPLVFLFYRHTTAALVLIPVTFVVERRKAKPVTFKIGWKMFIHALYGVTACGDLFNLGLNYTSATSSSALYNVQPVVTFILAVIFGMETLKLTRFHGKVKFAGILFCVAGVTILAFYEGPMFRSFNHHHLFQNGGGGGGSSAAGAGDTHSKKQWVLGIFLMTLSNVLAGLWTVLQGPLIEDTSKLMNTTLQISWASLQAFLVAVAVERDFSKWRLGWNVGLAAIIYSGVIVTALSYYMQMWTIAKRGPVFLAMSMPLTFVFTIVISSFVIGDAVSLGSIFAGALLVGGLYNVFWGQEHRGARRRRPDEQDQRPGKSRAAGQGGGQ

SEQ ID NO: 17529 - protein, 342 aa, Zea mays subsp. mays
  peptide (1)..(342): Ceres Seq. ID no. 12366215
  misc_feature (187)..(311): Pfam Name: Integral membrane protein DUF6 Pfam Description: Integral membrane protein DUF6
  misc_feature (1)..(315): Homolog of NCBI NO: 34903800 NR Description: OSJNBa0016I09.13 [Oryza sativa (japonica
  misc_feature (1)..(56): Homolog of NCBI NO: 34903796 NR Description: OSJNBa0016I09.11 [Oryza sativa (japonica
  misc_feature (70)..(315): Homolog of NCBI NO: 34903796 NR Description: OSJNBa0016I09.11 [Oryza sativa (japonica
  misc_feature (1)..(327): Homolog of NCBI NO: 15238227 NR Description: nodulin-like protein; protein id: At5g64700.1
  misc_feature (1)..(313): Homolog of NCBI NO: 34903802 NR Description: OSJNBa0016I09.14 [Oryza sativa (japonica
  misc_feature (17)..(314): Homolog of NCBI NO: 34913772 NR Description: nodulin-like protein [Oryza sativa (japonica
  misc_feature (7)..(313): Homolog of NCBI NO: 34913778 NR Description: nodulin-like protein [Oryza sativa (japonica
  misc_feature (1)..(318): Homolog of NCBI NO: 34913776 NR Description: nodulin-like protein [Oryza sativa (japonica
  misc_feature (1)..(94): Homolog of NCBI NO: 34393900 NR Description: nodulin-like protein [Oryza sativa (japonica
  misc_feature (187)..(315): Homolog of NCBI NO: 34393900 NR Description: nodulin-like protein [Oryza sativa (japonica
MYSGMHVMSKVALDQGMNPLVFLFYRHTTAALVLIPVTFVVERRKAKPVTFKIGWKMFIHALYGVTACGDLFNLGLNYTSATSSSALYNVQPVVTFILAVIFGMETLKLTRFHGKVKFAGILFCVAGVTILAFYEGPMFRSFNHHHLFQNGGGGGGSSAAGAGDTHSKKQWVLGIFLMTLSNVLAGLWTVLQGPLIEDTSKLMNTTLQISWASLQAFLVAVAVERDFSKWRLGWNVGLAAIIYSGVIVTALSYYMQMWTIAKRGPVFLAMSMPLTFVFTIVISSFVIGDAVSLGSIFAGALLVGGLYNVFWGQEHRGARRRRPDEQDQRPGKSRAAGQGGGQ

SEQ ID NO: 17530 - DNA, 761 bp, Zea mays subsp. mays
  misc_feature (1)..(761): Ceres Seq. ID no. 12633730
  misc_feature: MA Experiment ID: 20000534 Result: Down-regulated in Transcription
  misc_feature: MA Experiment 20000534 PARAMETER Experiment Name: Zm_Hybrid_Pollen_P Parameter: Age (day) Value: 8
  misc_feature: MA Experiment 20000534 PARAMETER Experiment Name: Zm_Hybrid_Pollen_P Parameter: Organism Value: Zea mays
  misc_feature: MA Experiment 20000534 PARAMETER Experiment Name: Zm_Hybrid_Pollen_P Parameter: Plant Line Value: 35A19
  misc_feature: MA Experiment 20000534 PARAMETER Experiment Name: Zm_Hybrid_Pollen_P Parameter: Tissue Value: Pollen vs. Aerial
gacattcaagggccacgatgtttctcatatgtaataatgcagcacaaggcattctatcttcattcttcttcaagtatgcagacacaattttgaagaagtattcgtcaactgttgccacgatatttactggcctagcttctgctgcatttttggggcataccttgaccattaattttctcctgggcatatcagtggtgtttatttcaatgcaccagttcttctctccacttgctaaagtcaaagatgacaaaccagctgacttaatagagttggaagacacacaaaatcaccggtcatccgaatcttcttttgtaaatatgactgctggtgctgctgttgatgcgagccatcggattggaactgatgagaggcaacccctgttgcctacatgaactagtttcttgaggtagggatagatgactctttttttgcggtgtgagcagcaggtttggtgtagcattgtaagttgaataaactattgtacactgtaaaggcaaaggaaagaaagaactaccaacatcttctccattttctttcatttttgggacgaggccggccggtggcctgccatctgtggccgtgggagtgacagagcagcaaacattttgataggcgtataattcaatagggattttccagatacggcacttgtaacagaattttcttggaggtgtatatgaacaacggcgatgtgacaatcttttctgtacggaacatttatactattgagtgattgatttactattactatgttgttactc

SEQ ID NO: 17531 - protein, 129 aa, Zea mays subsp. mays
  peptide (1)..(129): Ceres Seq. ID no. 12633731
  misc_feature (1)..(65): Pfam Name: Nucleotide-sugar transporter Pfam Description: Nucleotide-sugar transporter
  misc_feature (1)..(70): Homolog of NCBI NO: 7488414 NR Description: UDP-galactose transport protein homolog
  misc_feature (1)..(113): Homolog of NCBI NO: 34907666 NR Description: putative transporter-like protein
  misc_feature (1)..(115): Homolog of NCBI NO: 25408848 NR Description: hypothetical protein At2g43240 [imported] -
  misc_feature (1)..(115): Homolog of NCBI NO: 30689311 NR Description: expressed protein [Arabidopsis thaliana]
  misc_feature (1)..(128): Homolog of NCBI NO: 18411150 NR Description: transporter-like protein
  misc_feature (1)..(128): Homolog of NCBI NO: 11358902 NR Description: transporter-like protein - Arabidopsis thaliana
  misc_feature (1)..(128): Homolog of NCBI NO: 26450627 NR Description: unknown protein [Arabidopsis thaliana]
  misc_feature (1)..(128): Homolog of NCBI NO: 38345234 NR Description: OSJNBa0084K20.12 [Oryza sativa (japonica
HSRATMFLICNNAAQGILSSFFFKYADTILKKYSSTVATIFTGLASAAFLGHTLTINFLLGISVVFISMHQFFSPLAKVKDDKPADLIELEDTQNHRSSESSFVNMTAGAAVDASHRIGTDERQPLLPT

SEQ ID NO: 17532 - protein, 124 aa, Zea mays subsp. mays
  peptide (1)..(124): Ceres Seq. ID no. 12633732
  misc_feature (1)..(60): Pfam Name: Nucleotide-sugar transporter Pfam Description: Nucleotide-sugar transporter
  misc_feature (1)..(65): Homolog of NCBI NO: 7488414 NR Description: UDP-galactose transport protein homolog
  misc_feature (1)..(108): Homolog of NCBI NO: 34907666 NR Description: putative transporter-like protein
  misc_feature (1)..(110): Homolog of NCBI NO: 25408848 NR Description: hypothetical protein At2g43240 [imported] -
  misc_feature (1)..(110): Homolog of NCBI NO: 30689311 NR Description: expressed protein [Arabidopsis thaliana]
  misc_feature (1)..(123): Homolog of NCBI NO: 18411150 NR Description: transporter-like protein
  misc_feature (1)..(123): Homolog of NCBI NO: 11358902 NR Description: transporter-like protein - Arabidopsis thaliana
  misc_feature (1)..(123): Homolog of NCBI NO: 26450627 NR Description: unknown protein [Arabidopsis thaliana]
  misc_feature (1)..(123): Homolog of NCBI NO: 38345234 NR Description: OSJNBa0084K20.12 [Oryza sativa (japonica
MFLICNNAAQGILSSFFFKYADTILKKYSSTVATIFTGLASAAFLGHTLTINFLLGISVVFISMHQFFSPLAKVKDDKPADLIELEDTQNHRSSESSFVNMTAGAAVDASHRIGTDERQPLLPT

SEQ ID NO: 17533 - DNA, 1944 bp, Zea mays subsp. mays
  misc_feature (1)..(1944): Ceres Seq. ID no. 12375162
  misc_feature: MA Experiment ID: 108523 Result: Up-regulated in Transcription
  misc_feature: MA Experiment 108523 PARAMETER Experiment Name: Zm_42deg_Heat_P Parameter: Age (day) Value: 8
  misc_feature: MA Experiment 108523 PARAMETER Experiment Name: Zm_42deg_Heat_P Parameter: Organism Value: Zea mays
  misc_feature: MA Experiment 108523 PARAMETER Experiment Name: Zm_42deg_Heat_P Parameter: Plant Line Value: 35A19
  misc_feature: MA Experiment 108523 PARAMETER Experiment Name: Zm_42deg_Heat_P Parameter: Temperature (deg C) Value: 42 vs. 22
  misc_feature: MA Experiment 108523 PARAMETER Experiment Name: Zm_42deg_Heat_P Parameter: Timepoint (hr) Value: 6
  misc_feature: MA Experiment 108523 PARAMETER Experiment Name: Zm_42deg_Heat_P Parameter: Tissue Value: Aerial
  misc_feature: MA Experiment ID: 108527 Result: Up-regulated in Transcription
  misc_feature: MA Experiment 108527 PARAMETER Experiment Name: Zm_5mM_NO_P Parameter: Age (day) Value: 8
  misc_feature: MA Experiment 108527 PARAMETER Experiment Name: Zm_5mM_NO_P Parameter: Organism Value: Zea mays
  misc_feature: MA Experiment 108527 PARAMETER Experiment Name: Zm_5mM_NO_P Parameter: Plant Line Value: 35A19
  misc_feature: MA Experiment 108527 PARAMETER Experiment Name: Zm_5mM_NO_P Parameter: Timepoint (hr) Value: 6
  misc_feature: MA Experiment 108527 PARAMETER Experiment Name: Zm_5mM_NO_P Parameter: Tissue Value: Aerial
  misc_feature: MA Experiment 108527 PARAMETER Experiment Name: Zm_5mM_NO_P Parameter: Treatment Value: 5mM NO vs. No Treatment
  misc_feature: MA Experiment ID: 108529 Result: Down-regulated in Transcription
  misc_feature: MA Experiment 108529 PARAMETER Experiment Name: Zm_Imbibed_Seeds_P Parameter: Age (day) Value: 5 vs. 2
  misc_feature: MA Experiment 108529 PARAMETER Experiment Name: Zm_Imbibed_Seeds_P Parameter: Organism Value: Zea mays
  misc_feature: MA Experiment 108529 PARAMETER Experiment Name: Zm_Imbibed_Seeds_P Parameter: Plant Line Value: 35A19
  misc_feature: MA Experiment 108529 PARAMETER Experiment Name: Zm_Imbibed_Seeds_P Parameter: Tissue Value: Roots vs. Embryo
  misc_feature: MA Experiment ID: 108534 Result: Up-regulated in Transcription
  misc_feature: MA Experiment 108534 PARAMETER Experiment Name: Zm_4deg_Cold_P Parameter: Age (hr) Value: 8
  misc_feature: MA Experiment 108534 PARAMETER Experiment Name: Zm_4deg_Cold_P Parameter: Organism Value: Zea mays
  misc_feature: MA Experiment 108534 PARAMETER Experiment Name: Zm_4deg_Cold_P Parameter: Plant Line Value: 35A19
  misc_feature: MA Experiment 108534 PARAMETER Experiment Name: Zm_4deg_Cold_P Parameter: Temperature (deg C) Value: 4 vs. 22
  misc_feature: MA Experiment 108534 PARAMETER Experiment Name: Zm_4deg_Cold_P Parameter: Timepoint (hr) Value: 6
  misc_feature: MA Experiment 108534 PARAMETER Experiment Name: Zm_4deg_Cold_P Parameter: Tissue Value: Aerial
  misc_feature: MA Experiment ID: 108536 Result: Up-regulated in Transcription
  misc_feature: MA Experiment 108536 PARAMETER Experiment Name: Zm_Meristem_P Parameter: Age (day) Value: 8
  misc_feature: MA Experiment 108536 PARAMETER Experiment Name: Zm_Meristem_P Parameter: Organism Value: Zea mays
  misc_feature: MA Experiment 108536 PARAMETER Experiment Name: Zm_Meristem_P Parameter: Plant Line Value: 35A19
  misc_feature: MA Experiment 108536 PARAMETER Experiment Name: Zm_Meristem_P Parameter: Tissue Value: Shoot Meristem vs. Above Shoot Meristem
  misc_feature: MA Experiment ID: 108546 Result: Down-regulated in Transcription
  misc_feature: MA Experiment 108546 PARAMETER Experiment Name: Zm_Imbibed_Seeds_P Parameter: Age (day) Value: 3 vs. 2
  misc_feature: MA Experiment 108546 PARAMETER Experiment Name: Zm_Imbibed_Seeds_P Parameter: Organism Value: Zea mays
  misc_feature: MA Experiment 108546 PARAMETER Experiment Name: Zm_Imbibed_Seeds_P Parameter: Plant Line Value: 35A19
  misc_feature: MA Experiment 108546 PARAMETER Experiment Name: Zm_Imbibed_Seeds_P Parameter: Tissue Value: Roots vs. Embryo
  misc_feature: MA Experiment ID: 20000477 Result: Up-regulated in Transcription
  misc_feature: MA Experiment 20000477 PARAMETER Experiment Name: Zm_5mM_SA_P Parameter: Age (day) Value: 10
  misc_feature: MA Experiment 20000477 PARAMETER Experiment Name: Zm_5mM_SA_P Parameter: Organism Value: Zea mays
  misc_feature: MA Experiment 20000477 PARAMETER Experiment Name: Zm_5mM_SA_P Parameter: Plant Line Value: 35A19
  misc_feature: MA Experiment 20000477 PARAMETER Experiment Name: Zm_5mM_SA_P Parameter: Timepoint (hr) Value: 48
  misc_feature: MA Experiment 20000477 PARAMETER Experiment Name: Zm_5mM_SA_P Parameter: Tissue Value: Aerial
  misc_feature: MA Experiment 20000477 PARAMETER Experiment Name: Zm_5mM_SA_P Parameter: Treatment Value: 5mM SA vs. No Treatment
  misc_feature: MA Experiment ID: 20000478 Result: Up-regulated in Transcription
  misc_feature: MA Experiment 20000478 PARAMETER Experiment Name: Zm_5mM_SA_P Parameter: Age (day) Value: 11
  misc_feature: MA Experiment 20000478 PARAMETER Experiment Name: Zm_5mM_SA_P Parameter: Organism Value: Zea mays
  misc_feature: MA Experiment 20000478 PARAMETER Experiment Name: Zm_5mM_SA_P Parameter: Plant Line Value: 35A19
  misc_feature: MA Experiment 20000478 PARAMETER Experiment Name: Zm_5mM_SA_P Parameter: Timepoint (hr) Value: 72
  misc_feature: MA Experiment 20000478 PARAMETER Experiment Name: Zm_5mM_SA_P Parameter: Tissue Value: Aerial
  misc_feature: MA Experiment 20000478 PARAMETER Experiment Name: Zm_5mM_SA_P Parameter: Treatment Value: 5mM SA vs. No Treatment
  misc_feature: MA Experiment ID: 20000532 Result: Up-regulated in Transcription
  misc_feature: MA Experiment 20000532 PARAMETER Experiment Name: Zm_0.001percent_MeJA_P Parameter: Age (day) Value: 10
  misc_feature: MA Experiment 20000532 PARAMETER Experiment Name: Zm_0.001percent_MeJA_P Parameter: Organism Value: Zea mays
  misc_feature: MA Experiment 20000532 PARAMETER Experiment Name: Zm_0.001percent_MeJA_P Parameter: Plant Line Value: 35A19
  misc_feature: MA Experiment 20000532 PARAMETER Experiment Name: Zm_0.001percent_MeJA_P Parameter: Timepoint (hr) Value: 48
  misc_feature: MA Experiment 20000532 PARAMETER Experiment Name: Zm_0.001percent_MeJA_P Parameter: Tissue Value: Aerial
  misc_feature: MA Experiment 20000532 PARAMETER Experiment Name: Zm_0.001percent_MeJA_P Parameter: Treatment Value: 0.001percent MeJA vs. No Treatment
  misc_feature: MA Experiment ID: 20000533 Result: Up-regulated in Transcription
  misc_feature: MA Experiment 20000533 PARAMETER Experiment Name: Zm_0.001percent_MeJA_P Parameter: Age (day) Value: 11
  misc_feature: MA Experiment 20000533 PARAMETER Experiment Name: Zm_0.001percent_MeJA_P Parameter: Organism Value: Zea mays
  misc_feature: MA Experiment 20000533 PARAMETER Experiment Name: Zm_0.001percent_MeJA_P Parameter: Plant Line Value: 35A19
  misc_feature: MA Experiment 20000533 PARAMETER Experiment Name: Zm_0.001percent_MeJA_P Parameter: Timepoint (hr) Value: 72
  misc_feature: MA Experiment 20000533 PARAMETER Experiment Name: Zm_0.001percent_MeJA_P Parameter: Tissue Value: Aerial
  misc_feature: MA Experiment 20000533 PARAMETER Experiment Name: Zm_0.001percent_MeJA_P Parameter: Treatment Value: 0.001percent MeJA vs. No Treatment
  misc_feature: MA Experiment ID: 20000535 Result: Up-regulated in Transcription
  misc_feature: MA Experiment 20000535 PARAMETER Experiment Name: Zm_Hybrid_Seed_Dev_P Parameter: DAP Value: 30 vs. 12
  misc_feature: MA Experiment 20000535 PARAMETER Experiment Name: Zm_Hybrid_Seed_Dev_P Parameter: Organism Value: Zea mays
  misc_feature: MA Experiment 20000535 PARAMETER Experiment Name: Zm_Hybrid_Seed_Dev_P Parameter: Plant Line Value: 35A19
  misc_feature: MA Experiment 20000535 PARAMETER Experiment Name: Zm_Hybrid_Seed_Dev_P Parameter: Tissue Value: Embryo vs. Unfert Floret
  misc_feature: MA Experiment ID: 20000626 Result: Down-regulated in Transcription
  misc_feature: MA Experiment 20000626 PARAMETER Experiment Name: Zm_Herbicide-Treatments_P Parameter: Timepoint (hr) Value: 12
  misc_feature: MA Experiment 20000626 PARAMETER Experiment Name: Zm_Herbicide-Treatments_P Parameter: Tissue Value: Aerial
  misc_feature: MA Experiment 20000626 PARAMETER Experiment Name: Zm_Herbicide-Treatments_P Parameter: Treatment Value: Roundup vs. No Treatment
atatccattcccgctcgtccccctcaacaaccctcctcacggcgcactcgtgttcgtgtcatcccgcccgcaggccgcagtccatggccaccgccagcctcgcgctctcgctgcgcctcgcgccgtcctcgcgcccgctgagcctccgccgccggggggccaccggcgtcacctgccgcgccaccaccgccacgttccaccagctcgacgccgtcgcggtgagggaggaggagtccaggttccggacggcggcggcggagggccgcaacctgctgccgctcacgaggtgcatcttctccgatcacctcacgccagtgctcgcgtaccgctgcctcgtcaaggaggacgaacgcgaggcgcccagctttctattcgagtctgtcgagcaggggtccgagggcaccaatgtggggaggtacagcgtggtcggggcgcagccttctatggaggtcgtggccaaggctaaccatgtgacggtcatggaccatgagatgaagtcgaggagggagcacttcgtgcctgatcccatgaggatccccaggacaatcatggagcagtggaacccgcagattgctgacagcctccctgatgcattttgtggaggatgggttggattcttctcatatgatacagtgcgttatgttgaaacaaagaagcttcctttcagtaaggcaccacatgacgataggaaccttcctgacattcatttaggcctctatagtgacgtcattgtgtttgatcatgttgaaaagaaaacacatgttattcattgggtgaggacagactgctatcgttctgttgatgaagcatatgaagatggaagaaatcggcttgaagctttgttatcaagattacattgcctcaatgtcccaacactttcttctggttctataaaactcaatgttgaaaactttggcccagtatgcaaaaatcaacgatgtcaagcgaagaatataaaaatatcgttgtccaagctaaagaacacatcttggccggtgacattttccaagttgttttaagccagcgttttgagagacggacattcgccgacccctttgaaatctatcgtgcattgcgcatcgtaaatcctagtccatatatggcctatctacaggcacgaggttgtattctcgtggcatcgagtcctgaaattcttacccgggtacaaaagaggacaataatcaatcgtccgcttgctggaaccataagaagaggcaaaacaaaagcagaagacaaaactttagaacaattgcttttgagtgatgaaaagcagtgtgctgaacatattatgctagtagatcttggccgaaatgatgttgggaaggtgtccaaaccaggttcagtaaaggtagagaaattgatgaatatcgaacgatattctcatgtcatgcacatcagctcaacagtaactggagagctacgcgatgatcttacgtgttgggatgcgctacgagccgcattgccagttggaaccgttagtggcgctccaaaggtgagagcaatggagttgattgatcagctagaagtgagtatgcgtgggccgtatagtggtggttttggagggatttccttccgcggcgacatggacattgcactcgctcttcgcactattgtcttccccaccgcatctaggtttgataccatgtactcgtacacagacagtaagtcccggcaggagtgggtggctcacctccaggccggagctggcatagttgctgatagcaaaccggatgacgagcaccaagagtgtataaacaaggctgcaggtgttgctcgtgccattgaccttgctgaatcgacatttcttgaagagtagtctagtctaatgaaggaaatgtatgtttaagttctctgtataattatggattgtcctagaaaacaggctttcttaggccgaataaaaactcaactgtaataaagttaataaatggacaactttagctc

SEQ ID NO: 17534 - protein, 338 aa, Zea mays subsp. mays
  peptide (1)..(338): Ceres Seq. ID no. 12375163
  misc_feature (93)..(254): Pfam Name: Anthranilate synthase component I, N terminal region Pfam Description: Anthranilate synthase component I, N terminal
  misc_feature (22)..(310): Homolog of NCBI NO: 5360659 NR Description: anthranilate synthase alpha 2 subunit
  misc_feature (32)..(306): Homolog of NCBI NO: 7436743 NR Description: anthranilate synthase (EC 4.1.3.27) alpha-2 chain
  misc_feature (27)..(326): Homolog of NCBI NO: 320552 NR Description: anthranilate synthase (EC 4.1.3.27) alpha-1 chain
  misc_feature (75)..(326): Homolog of NCBI NO: 12830362 NR Description: anthranilate synthase alpha subunit [Catharanthus
  misc_feature (27)..(326): Homolog of NCBI NO: 15239225 NR Description: anthranilate synthase component I-1 precursor
  misc_feature (11)..(326): Homolog of NCBI NO: 320553 NR Description: anthranilate synthase (EC 4.1.3.27) alpha-2 chain
  misc_feature (11)..(326): Homolog of NCBI NO: 15227604 NR Description: anthranilate synthase, alpha subunit; protein id:
  misc_feature (36)..(326): Homolog of NCBI NO: 960289 NR Description: anthranilate synthase alpha subunit
  misc_feature (31)..(326): Homolog of NCBI NO: 5360657 NR Description: anthranilate synthase alpha 1 subunit
  misc_feature (31)..(326): Homolog of NCBI NO: 34897346 NR Description: anthranilate synthase alpha 1 subunit [Oryza
IHSRSSPSTTLLTAHSCSCHPARRPQSMATASLALSLRLAPSSRPLSLRRRGATGVTCRATTATFHQLDAVAVREEESRFRTAAAEGRNLLPLTRCIFSDHLTPVLAYRCLVKEDEREAPSFLFESVEQGSEGTNVGRYSVVGAQPSMEVVAKANHVTVMDHEMKSRREHFVPDPMRIPRTIMEQWNPQIADSLPDAFCGGWVGFFSYDTVRYVETKKLPFSKAPHDDRNLPDIHLGLYSDVIVFDHVEKKTHVIHWVRTDCYRSVDEAYEDGRNRLEALLSRLHCLNVPTLSSGSIKLNVENFGPVCKNQRCQAKNIKISLSKLKNTSWPVTFSKLF

SEQ ID NO: 17535 - protein, 311 aa, Zea mays subsp. mays
  peptide (1)..(311): Ceres Seq. ID no. 12375164
  misc_feature (66)..(227): Pfam Name: Anthranilate synthase component I, N terminal region Pfam Description: Anthranilate synthase component I, N terminal
  misc_feature (48)..(299): Homolog of NCBI NO: 12830362 NR Description: anthranilate synthase alpha subunit [Catharanthus
  misc_feature (1)..(299): Homolog of NCBI NO: 15239225 NR Description: anthranilate synthase component I-1 precursor
  misc_feature (1)..(299): Homolog of NCBI NO: 320553 NR Description: anthranilate synthase (EC 4.1.3.27) alpha-2 chain
  misc_feature (1)..(299): Homolog of NCBI NO: 15227604 NR Description: anthranilate synthase, alpha subunit; protein id:
  misc_feature (5)..(279): Homolog of NCBI NO: 7436743 NR Description: anthranilate synthase (EC 4.1.3.27) alpha-2 chain
  misc_feature (1)..(299): Homolog of NCBI NO: 320552 NR Description: anthranilate synthase (EC 4.1.3.27) alpha-1 chain
  misc_feature (1)..(283): Homolog of NCBI NO: 5360659 NR Description: anthranilate synthase alpha 2 subunit
  misc_feature (9)..(299): Homolog of NCBI NO: 960289 NR Description: anthranilate synthase alpha subunit
  misc_feature (4)..(299): Homolog of NCBI NO: 5360657 NR Description: anthranilate synthase alpha 1 subunit
  misc_feature (4)..(299): Homolog of NCBI NO: 34897346 NR Description: anthranilate synthase alpha 1 subunit [Oryza
MATASLALSLRLAPSSRPLSLRRRGATGVTCRATTATFHQLDAVAVREEESRFRTAAAEGRNLLPLTRCIFSDHLTPVLAYRCLVKEDEREAPSFLFESVEQGSEGTNVGRYSVVGAQPSMEVVAKANHVTVMDHEMKSRREHFVPDPMRIPRTIMEQWNPQIADSLPDAFCGGWVGFFSYDTVRYVETKKLPFSKAPHDDRNLPDIHLGLYSDVIVFDHVEKKTHVIHWVRTDCYRSVDEAYEDGRNRLEALLSRLHCLNVPTLSSGSIKLNVENFGPVCKNQRCQAKNIKISLSKLKNTSWPVTFSKLF

SEQ ID NO: 17536 - protein, 297 aa, Zea mays subsp. mays
  peptide (1)..(297): Ceres Seq. ID no. 12375165
  misc_feature (7)..(287): Pfam Name: chorismate binding enzyme Pfam Description: chorismate binding enzyme
  misc_feature (1)..(297): Homolog of NCBI NO: 5360659 NR Description: anthranilate synthase alpha 2 subunit
  misc_feature (1)..(296): Homolog of NCBI NO: 7436743 NR Description: anthranilate synthase (EC 4.1.3.27) alpha-2 chain
  misc_feature (1)..(297): Homolog of NCBI NO: 320552 NR Description: anthranilate synthase (EC 4.1.3.27) alpha-1 chain
  misc_feature (1)..(297): Homolog of NCBI NO: 15239225 NR Description: anthranilate synthase component I-1 precursor
  misc_feature (1)..(297): Homolog of NCBI NO: 12830362 NR Description: anthranilate synthase alpha subunit [Catharanthus
  misc_feature (1)..(296): Homolog of NCBI NO: 320553 NR Description: anthranilate synthase (EC 4.1.3.27) alpha-2 chain
  misc_feature (1)..(296): Homolog of NCBI NO: 15227604 NR Description: anthranilate synthase, alpha subunit; protein id:
  misc_feature (1)..(297): Homolog of NCBI NO: 960289 NR Description: anthranilate synthase alpha subunit
  misc_feature (1)..(297): Homolog of NCBI NO: 5360657 NR Description: anthranilate synthase alpha 1 subunit
  misc_feature (1)..(297): Homolog of NCBI NO: 34897346 NR Description: anthranilate synthase alpha 1 subunit [Oryza
MQKSTMSSEEYKNIVVQAKEHILAGDIFQVVLSQRFERRTFADPFEIYRALRIVNPSPYMAYLQARGCILVASSPEILTRVQKRTIINRPLAGTIRRGKTKAEDKTLEQLLLSDEKQCAEHIMLVDLGRNDVGKVSKPGSVKVEKLMNIERYSHVMHISSTVTGELRDDLTCWDALRAALPVGTVSGAPKVRAMELIDQLEVSMRGPYSGGFGGISFRGDMDIALALRTIVFPTASRFDTMYSYTDSKSRQEWVAHLQAGAGIVADSKPDDEHQECINKAAGVARAIDLAESTFLEE

SEQ ID NO: 17537 - DNA, 1209 bp, Zea mays subsp. mays
  misc_feature (1)..(1209): Ceres Seq. ID no. 12417301
  misc_feature: MA Experiment ID: 108522 Result: Down-regulated in Transcription
  misc_feature: MA Experiment 108522 PARAMETER Experiment Name: Zm_42deg_Heat_P Parameter: Age (day) Value: 8
  misc_feature: MA Experiment 108522 PARAMETER Experiment Name: Zm_42deg_Heat_P Parameter: Organism Value: Zea mays
  misc_feature: MA Experiment 108522 PARAMETER Experiment Name: Zm_42deg_Heat_P Parameter: Plant Line Value: 35A19
  misc_feature: MA Experiment 108522 PARAMETER Experiment Name: Zm_42deg_Heat_P Parameter: Temperature (deg C) Value: 42 vs. 22
  misc_feature: MA Experiment 108522 PARAMETER Experiment Name: Zm_42deg_Heat_P Parameter: Timepoint (hr) Value: 1
  misc_feature: MA Experiment 108522 PARAMETER Experiment Name: Zm_42deg_Heat_P Parameter: Tissue Value: Aerial
  misc_feature: MA Experiment ID: 108535 Result: Up-regulated in Transcription
  misc_feature: MA Experiment 108535 PARAMETER Experiment Name: Zm_Meristem_P Parameter: Age (day) Value: 8
  misc_feature: MA Experiment 108535 PARAMETER Experiment Name: Zm_Meristem_P Parameter: Organism Value: Zea mays
  misc_feature: MA Experiment 108535 PARAMETER Experiment Name: Zm_Meristem_P Parameter: Plant Line Value: 35A19
  misc_feature: MA Experiment 108535 PARAMETER Experiment Name: Zm_Meristem_P Parameter: Tissue Value: Root Meristem vs. Above Root Meristem
  misc_feature: MA Experiment ID: 108543 Result: Up-regulated in Transcription
  misc_feature: MA Experiment ID: 108556 Result: Down-regulated in Transcription
  misc_feature: MA Experiment 108556 PARAMETER Experiment Name: Zm_Drought_P Parameter: Age (day) Value: 9
  misc_feature: MA Experiment 108556 PARAMETER Experiment Name: Zm_Drought_P Parameter: Organism Value: Zea mays
  misc_feature: MA Experiment 108556 PARAMETER Experiment Name: Zm_Drought_P Parameter: Plant Line Value: 35A19
  misc_feature: MA Experiment 108556 PARAMETER Experiment Name: Zm_Drought_P Parameter: Timepoint (hr) Value: 24
  misc_feature: MA Experiment 108556 PARAMETER Experiment Name: Zm_Drought_P Parameter: Tissue Value: Aerial
  misc_feature: MA Experiment 108556 PARAMETER Experiment Name: Zm_Drought_P Parameter: Treatment Value: Drought vs. No Drought
  misc_feature: MA Experiment ID: 108687 Result: Down-regulated in Transcription
  misc_feature: MA Experiment 108687 PARAMETER Experiment Name: Zm_Embryos-Flowers__P Parameter: Tissue Value: Embryo vs. Aerial+
  misc_feature: MA Experiment ID: 20000478 Result: Down-regulated in Transcription
  misc_feature: MA Experiment 20000478 PARAMETER Experiment Name: Zm_5mM_SA_P Parameter: Age (day) Value: 11
  misc_feature: MA Experiment 20000478 PARAMETER Experiment Name: Zm_5mM_SA_P Parameter: Organism Value: Zea mays
  misc_feature: MA Experiment 20000478 PARAMETER Experiment Name: Zm_5mM_SA_P Parameter: Plant Line Value: 35A19
  misc_feature: MA Experiment 20000478 PARAMETER Experiment Name: Zm_5mM_SA_P Parameter: Timepoint (hr) Value: 72
  misc_feature: MA Experiment 20000478 PARAMETER Experiment Name: Zm_5mM_SA_P Parameter: Tissue Value: Aerial
  misc_feature: MA Experiment 20000478 PARAMETER Experiment Name: Zm_5mM_SA_P Parameter: Treatment Value: 5mM SA vs. No Treatment
  misc_feature: MA Experiment ID: 20000479 Result: Down-regulated in Transcription
  misc_feature: MA Experiment 20000479 PARAMETER Experiment Name: Zm_Drought_P Parameter: Age (day) Value: 10
  misc_feature: MA Experiment 20000479 PARAMETER Experiment Name: Zm_Drought_P Parameter: Organism Value: Zea mays
  misc_feature: MA Experiment 20000479 PARAMETER Experiment Name: Zm_Drought_P Parameter: Plant Line Value: 35A19
  misc_feature: MA Experiment 20000479 PARAMETER Experiment Name: Zm_Drought_P Parameter: Timepoint (hr) Value: 48
  misc_feature: MA Experiment 20000479 PARAMETER Experiment Name: Zm_Drought_P Parameter: Tissue Value: Aerial
  misc_feature: MA Experiment 20000479 PARAMETER Experiment Name: Zm_Drought_P Parameter: Treatment Value: Drought vs. No Drought
  misc_feature: MA Experiment ID: 20000487 Result: Down-regulated in Transcription
  misc_feature: MA Experiment 20000487 PARAMETER Experiment Name: Zm_50mM_NH4NO3_L_to_H_P Parameter: Organism Value: Zea mays
  misc_feature: MA Experiment 20000487 PARAMETER Experiment Name: Zm_50mM_NH4NO3_L_to_H_P Parameter: Timepoint (hr) Value: 4
  misc_feature: MA Experiment 20000487 PARAMETER Experiment Name: Zm_50mM_NH4NO3_L_to_H_P Parameter: Tissue Value: Leaves
  misc_feature: MA Experiment 20000487 PARAMETER Experiment Name: Zm_50mM_NH4NO3_L_to_H_P Parameter: Treatment Value: 50mM NH4NO3 vs. 100mM Mannitol
  misc_feature: MA Experiment ID: 20000632 Result: Down-regulated in Transcription
  misc_feature: MA Experiment 20000632 PARAMETER Experiment Name: Zm_Herbicide-Treatments_P Parameter: Timepoint (hr) Value: 4
  misc_feature: MA Experiment 20000632 PARAMETER Experiment Name: Zm_Herbicide-Treatments_P Parameter: Tissue Value: Aerial
  misc_feature: MA Experiment 20000632 PARAMETER Experiment Name: Zm_Herbicide-Treatments_P Parameter: Treatment Value: Glean vs. No Treatment
agatcatcgtgcttccactctcgcctttccatctgcgagtccccttcccggctccaatctcacatcaactcgggtctttccctgagagatcgtcgttttccctgtttctttcctcccccagcccggttccgattccgacaaagatccgttcttcctagtaagacaaggaaagaaagaaaccaagaaccaacctttggcacatggcggagccggccaagaacgaggcccacgtcgtggagatcccggtcgctgtcgacggcggcgaagcctccggaggcgaggaggcctttcttgacaaggcggcggcggcgggcgagggtcacccgctcggggagatcgcggctagcgagggacacctgctgctgctgaagctgtggcagcgggaggaggaccgcctgggccgccgcgcgtgcgcgctggaggcgcgcatggacgcggcgcgccgggacgccttctacctctgcgcggccttcctcgcctttcacggcctttccctcgcgctcctcttcgccgcgtccgtggtcgccgcggccgccacctccccctccgccgcgtgcaggaggtggtgggcgccgtcgtctctgtccctggcggcgtccctcgcgctcgccgcggccgtgcagctccgggtgggcgcctactggcgcgccgcggcgcggctgcgccgggaccgcggcgacgcgcgcgcactcgcgcgggccgtgcaggagctgcgcttgaagggcgccgcgttcgacctgtccaaggagccgcagtacggggtgacgagggccaagtgcgccagcgtggagggcgcgggcctgtgggcgccgctccggtggttccggcagaacgtcgtcacagcctgcctgctcgccgtcgccgccgcggccttgccctccggcaagttcatcctctgcgcatagnatgcatggatgcggggtcgccagcttctttaaggctcgttcggttcctccggaatgagcgcctggaataattcacggttggatctttataagctggaatgactctggtgctcaatcctgatgaaccgaacagaccgctgatcttcagaaccaaaaatggggactgctcgccgcacagggaacagagacaccacttgtgctccctaggcaagatccccatgaaatggcagaaatgcgcattctttcttgtaattttttctagctggaccttcagttgacattctataatggaaatgctttaggc

SEQ ID NO: 17538 - protein, 234 aa, Zea mays subsp. mays
  peptide (1)..(234): Ceres Seq. ID no. 12417302
  misc_feature (41)..(233): Homolog of NCBI NO: 15230623 NR Description: hypothetical protein; protein id: At3g12870.1
  misc_feature (32)..(225): Homolog of NCBI NO: 34897044 NR Description: hypothetical protein [Oryza sativa (japonica
  misc_feature (8)..(207): Homolog of NCBI NO: 9758632 NR Description: dbj|BAA81760.1~gene_id:MDA7.18~similar to unknown
  misc_feature (8)..(233): Homolog of NCBI NO: 30696692 NR Description: expressed protein [Arabidopsis thaliana]
  misc_feature (3)..(187): Homolog of NCBI NO: 5257257 NR Description: hypothetical protein [Oryza sativa (japonica
  misc_feature (3)..(234): Homolog of NCBI NO: 5257261 NR Description: hypothetical protein [Oryza sativa (japonica
MAEPAKNEAHVVEIPVAVDGGEASGGEEAFLDKAAAAGEGHPLGEIAASEGHLLLLKLWQREEDRLGRRACALEARMDAARRDAFYLCAAFLAFHGLSLALLFAASVVAAAATSPSAACRRWWAPSSLSLAASLALAAAVQLRVGAYWRAAARLRRDRGDARALARAVQELRLKGAAFDLSKEPQYGVTRAKCASVEGAGLWAPLRWFRQNVVTACLLAVAAAALPSGKFILCA

SEQ ID NO: 17539 - protein, 158 aa, Zea mays subsp. mays
  peptide (1)..(158): Ceres Seq. ID no. 12417303
  misc_feature (1)..(157): Homolog of NCBI NO: 15230623 NR Description: hypothetical protein; protein id: At3g12870.1
  misc_feature (1)..(149): Homolog of NCBI NO: 34897044 NR Description: hypothetical protein [Oryza sativa (japonica
  misc_feature (1)..(131): Homolog of NCBI NO: 9758632 NR Description: dbj|BAA81760.1~gene_id:MDA7.18~similar to unknown
  misc_feature (1)..(157): Homolog of NCBI NO: 30696692 NR Description: expressed protein [Arabidopsis thaliana]
  misc_feature (1)..(111): Homolog of NCBI NO: 5257257 NR Description: hypothetical protein [Oryza sativa (japonica
  misc_feature (1)..(158): Homolog of NCBI NO: 5257261 NR Description: hypothetical protein [Oryza sativa (japonica
MDAARRDAFYLCAAFLAFHGLSLALLFAASVVAAAATSPSAACRRWWAPSSLSLAASLALAAAVQLRVGAYWRAAARLRRDRGDARALARAVQELRLKGAAFDLSKEPQYGVTRAKCASVEGAGLWAPLRWFRQNVVTACLLAVAAAALPSGKFILCA

SEQ ID NO: 17540 - protein, 122 aa, Zea mays subsp. mays
  peptide (1)..(122): Ceres Seq. ID no. 12417304
  misc_feature (40)..(122): Homolog of NCBI NO: 19923466 NR Description: splicing coactivator subunit SRm300
  misc_feature (47)..(122): Homolog of NCBI NO: 39592411 NR Description: Hypothetical protein CBG07956 [Caenorhabditis
  misc_feature (40)..(122): Homolog of NCBI NO: 7512967 NR Description: hypothetical protein KIAA0324 - human (fragment)
  misc_feature (40)..(122): Homolog of NCBI NO: 6634015 NR Description: KIAA0324 protein [Homo sapiens]
  misc_feature (7)..(122): Homolog of NCBI NO: 7949115 NR Description: Ser/Arg-related nuclear matrix protein
  misc_feature (40)..(122): Homolog of NCBI NO: 5821151 NR Description: RNA binding protein [Homo sapiens]
RSSCFHSRLSICESPSRLQSHINSGLSLRDRRFPCFFPPPARFRFRQRSVLPSKTRKERNQEPTFGTWRSRPRTRPTSWRSRSLSTAAKPPEARRPFLTRRRRRARVTRSGRSRLARDTCCC

SEQ ID NO: 17541 - DNA, 835 bp, Zea mays subsp. mays
  misc_feature (1)..(835): Ceres Seq. ID no. 12455206
  misc_feature: MA Experiment ID: 108522 Result: Down-regulated in Transcription
  misc_feature: MA Experiment 108522 PARAMETER Experiment Name: Zm_42deg_Heat_P Parameter: Age (day) Value: 8
  misc_feature: MA Experiment 108522 PARAMETER Experiment Name: Zm_42deg_Heat_P Parameter: Organism Value: Zea mays
  misc_feature: MA Experiment 108522 PARAMETER Experiment Name: Zm_42deg_Heat_P Parameter: Plant Line Value: 35A19
  misc_feature: MA Experiment 108522 PARAMETER Experiment Name: Zm_42deg_Heat_P Parameter: Temperature (deg C) Value: 42 vs. 22
  misc_feature: MA Experiment 108522 PARAMETER Experiment Name: Zm_42deg_Heat_P Parameter: Timepoint (hr) Value: 1
  misc_feature: MA Experiment 108522 PARAMETER Experiment Name: Zm_42deg_Heat_P Parameter: Tissue Value: Aerial
  misc_feature: MA Experiment ID: 108543 Result: Down-regulated in Transcription
gcacgagaccattacctagaacatcctaatcgaaaactttcggaggaggcggaccaggtaagcagcagcaggaaccctagcaccgccgcatccgcagccatgggtatcgacctcgttgccggtgggaggaacaagaagaccaagcgcacagcgccgaagtccgacgatgtttatctcaagctccttgtcaagctctaccgtttcttggtcaggaggaccaagagcaacttcaatgctgtcattctcaagaggctcttcatgagcaaaaccaatcgcccaccaatctccatgcgccgccttgtcaagttcatggaaggaaaggaccttaccctagctgccgagctcgtgagcgagctgtggaatgctgggataaaggcagagttcaagctcactaccagggtggcgaaccacatcaagtatgccttgcaatcaagcattccgtggatggtgctagtcggcgagtctgagctgcagaaaggaactgtaaagttgaaggacgttgaagccaaccaggaagaagaggttgataggaaggattttgttcgagagttgaagaagagattgagtaaatcctaagaggaaaattttaggcgttgatatcatcttttgacacccatttgacgcaaactcaattagggggagaatgacattacatcattataatttaaactgacgtgaatgtttcagtccggttggcatagggccacttgttatgttcataaggtcattcgaatcccctgagtcccaatgcattatgctgatgaatcaggctgcagacatattgtgaattatattctttttgtactaccttgaggaatgaaaagtttttgtcctc

SEQ ID NO: 17542 - protein, 191 aa, Zea mays subsp. mays
  peptide (1)..(191): Ceres Seq. ID no. 12455207
  misc_feature (34)..(112): Homolog of NCBI NO: 28798549 NR Description: 60S ribosomal protein [Medicago sativa]
  misc_feature (34)..(172): Homolog of NCBI NO: 15230011 NR Description: putative 60S ribosomal protein L18
  misc_feature (37)..(108): Homolog of NCBI NO: 6094021 NR Description: 60S RIBOSOMAL PROTEIN L18
  misc_feature (34)..(172): Homolog of NCBI NO: 606970 NR Description: cytoplasmic ribosomal protein L18
  misc_feature (81)..(188): Homolog of NCBI NO: 3915070 NR Description: HISTIDYL-TRNA SYNTHETASE (HISTIDINE--TRNA LIGASE)
  misc_feature (34)..(172): Homolog of NCBI NO: 15241061 NR Description: 60S ribosomal protein - like
  misc_feature (100)..(189): Homolog of NCBI NO: 4103154 NR Description: histidyl-tRNA synthetase [Triticum aestivum]
  misc_feature (100)..(189): Homolog of NCBI NO: 4103152 NR Description: histidyl-tRNA synthetase [Triticum aestivum]
  misc_feature (34)..(107): Homolog of NCBI NO: 34393858 NR Description: putative cytoplasmic ribosomal protein L18
  misc_feature (34)..(116): Homolog of NCBI NO: 34897628 NR Description: cytoplasmic ribosomal protein L18 [Oryza sativa]
ARDHYLEHPNRKLSEEADQVSSSRNPSTAASAAMGIDLVAGGRNKKTKRTAPKSDDVYLKLLVKLYRFLVRRTKSNFNAVILKRLFMSKTNRPPISMRRLVKFMEGKDLTLAAELVSELWNAGIKAEFKLTTRVANHIKYALQSSIPWMVLVGESELQKGTVKLKDVEANQEEEVDRKDFVRELKKRLSKS

SEQ ID NO: 17543 - protein, 158 aa, Zea mays subsp. mays
  peptide (1)..(158): Ceres Seq. ID no. 12455208
  misc_feature (1)..(79): Homolog of NCBI NO: 28798549 NR Description: 60S ribosomal protein [Medicago sativa]
  misc_feature (1)..(139): Homolog of NCBI NO: 15230011 NR Description: putative 60S ribosomal protein L18
  misc_feature (4)..(75): Homolog of NCBI NO: 6094021 NR Description: 60S RIBOSOMAL PROTEIN L18
  misc_feature (1)..(139): Homolog of NCBI NO: 606970 NR Description: cytoplasmic ribosomal protein L18
  misc_feature (48)..(155): Homolog of NCBI NO: 3915070 NR Description: HISTIDYL-TRNA SYNTHETASE (HISTIDINE--TRNA LIGASE)
  misc_feature (1)..(139): Homolog of NCBI NO: 15241061 NR Description: 60S ribosomal protein - like
  misc_feature (67)..(156): Homolog of NCBI NO: 4103154 NR Description: histidyl-tRNA synthetase [Triticum aestivum]
  misc_feature (67)..(156): Homolog of NCBI NO: 4103152 NR Description: histidyl-tRNA synthetase [Triticum aestivum]
  misc_feature (1)..(74): Homolog of NCBI NO: 34393858 NR Description: putative cytoplasmic ribosomal protein L18
  misc_feature (1)..(83): Homolog of NCBI NO: 34897628 NR Description: cytoplasmic ribosomal protein L18 [Oryza sativa]
MGIDLVAGGRNKKTKRTAPKSDDVYLKLLVKLYRFLVRRTKSNFNAVILKRLFMSKTNRPPISMRRLVKFMEGKDLTLAAELVSELWNAGIKAEFKLTTRVANHIKYALQSSIPWMVLVGESELQKGTVKLKDVEANQEEEVDRKDFVRELKKRLSKS

SEQ ID NO: 17544 - protein, 105 aa, Zea mays subsp. mays
  peptide (1)..(105): Ceres Seq. ID no. 12455209
  misc_feature (1)..(26): Homolog of NCBI NO: 28798549 NR Description: 60S ribosomal protein [Medicago sativa]
  misc_feature (1)..(86): Homolog of NCBI NO: 15230011 NR Description: putative 60S ribosomal protein L18
  misc_feature (1)..(22): Homolog of NCBI NO: 6094021 NR Description: 60S RIBOSOMAL PROTEIN L18
  misc_feature (1)..(86): Homolog of NCBI NO: 606970 NR Description: cytoplasmic ribosomal protein L18
  misc_feature (1)..(102): Homolog of NCBI NO: 3915070 NR Description: HISTIDYL-TRNA SYNTHETASE (HISTIDINE--TRNA LIGASE)
  misc_feature (1)..(86): Homolog of NCBI NO: 15241061 NR Description: 60S ribosomal protein - like
  misc_feature (14)..(103): Homolog of NCBI NO: 4103154 NR Description: histidyl-tRNA synthetase [Triticum aestivum]
  misc_feature (14)..(103): Homolog of NCBI NO: 4103152 NR Description: histidyl-tRNA synthetase [Triticum aestivum]
  misc_feature (1)..(21): Homolog of NCBI NO: 34393858 NR Description: putative cytoplasmic ribosomal protein L18
  misc_feature (1)..(30): Homolog of NCBI NO: 34897628 NR Description: cytoplasmic ribosomal protein L18 [Oryza sativa]
MSKTNRPPISMRRLVKFMEGKDLTLAAELVSELWNAGIKAEFKLTTRVANHIKYALQSSIPWMVLVGESELQKGTVKLKDVEANQEEEVDRKDFVRELKKRLSKS

SEQ ID NO: 17545 - DNA, 2740 bp, Zea mays subsp. mays
  misc_feature (1)..(2740): Ceres Seq. ID no. 12417747
  misc_feature: MA Experiment ID: 108544 Result: Down-regulated in Transcription
  misc_feature: MA Experiment ID: 108556 Result: Down-regulated in Transcription
  misc_feature: MA Experiment 108556 PARAMETER Experiment Name: Zm_Drought_P Parameter: Age (day) Value: 9
  misc_feature: MA Experiment 108556 PARAMETER Experiment Name: Zm_Drought_P Parameter: Organism Value: Zea mays
  misc_feature: MA Experiment 108556 PARAMETER Experiment Name: Zm_Drought_P Parameter: Plant Line Value: 35A19
  misc_feature: MA Experiment 108556 PARAMETER Experiment Name: Zm_Drought_P Parameter: Timepoint (hr) Value: 24
  misc_feature: MA Experiment 108556 PARAMETER Experiment Name: Zm_Drought_P Parameter: Tissue Value: Aerial
  misc_feature: MA Experiment 108556 PARAMETER Experiment Name: Zm_Drought_P Parameter: Treatment Value: Drought vs. No Drought
  misc_feature: MA Experiment ID: 108689 Result: Down-regulated in Transcription
  misc_feature: MA Experiment 108689 PARAMETER Experiment Name: Zm_Drought_Roots_P Parameter: Age (day) Value: 9
  misc_feature: MA Experiment 108689 PARAMETER Experiment Name: Zm_Drought_Roots_P Parameter: Organism Value: Zea mays
  misc_feature: MA Experiment 108689 PARAMETER Experiment Name: Zm_Drought_Roots_P Parameter: Plant Line Value: 35A19
  misc_feature: MA Experiment 108689 PARAMETER Experiment Name: Zm_Drought_Roots_P Parameter: Timepoint (hr) Value: 24
  misc_feature: MA Experiment 108689 PARAMETER Experiment Name: Zm_Drought_Roots_P Parameter: Tissue Value: Roots
  misc_feature: MA Experiment 108689 PARAMETER Experiment Name: Zm_Drought_Roots_P Parameter: Treatment Value: Drought vs. No Drought
  misc_feature: MA Experiment ID: 20000477 Result: Down-regulated in Transcription
  misc_feature: MA Experiment 20000477 PARAMETER Experiment Name: Zm_5mM_SA_P Parameter: Age (day) Value: 10
  misc_feature: MA Experiment 20000477 PARAMETER Experiment Name: Zm_5mM_SA_P Parameter: Organism Value: Zea mays
  misc_feature: MA Experiment 20000477 PARAMETER Experiment Name: Zm_5mM_SA_P Parameter: Plant Line Value: 35A19
  misc_feature: MA Experiment 20000477 PARAMETER Experiment Name: Zm_5mM_SA_P Parameter: Timepoint (hr) Value: 48
  misc_feature: MA Experiment 20000477 PARAMETER Experiment Name: Zm_5mM_SA_P Parameter: Tissue Value: Aerial
  misc_feature: MA Experiment 20000477 PARAMETER Experiment Name: Zm_5mM_SA_P Parameter: Treatment Value: 5mM SA vs. No Treatment
  misc_feature: MA Experiment ID: 20000479 Result: Down-regulated in Transcription
  misc_feature: MA Experiment 20000479 PARAMETER Experiment Name: Zm_Drought_P Parameter: Age (day) Value: 10
  misc_feature: MA Experiment 20000479 PARAMETER Experiment Name: Zm_Drought_P Parameter: Organism Value: Zea mays
  misc_feature: MA Experiment 20000479 PARAMETER Experiment Name: Zm_Drought_P Parameter: Plant Line Value: 35A19
  misc_feature: MA Experiment 20000479 PARAMETER Experiment Name: Zm_Drought_P Parameter: Timepoint (hr) Value: 48
  misc_feature: MA Experiment 20000479 PARAMETER Experiment Name: Zm_Drought_P Parameter: Tissue Value: Aerial
  misc_feature: MA Experiment 20000479 PARAMETER Experiment Name: Zm_Drought_P Parameter: Treatment Value: Drought vs. No Drought
gcacgagaccattacctagaacatcctaatcgaaaaagccccatcatactcattcatattataaggcgcgaatctatccatctatctaatctacttacgcacgaacatgcgtaacatcggcatgctgcgggcgctggtcctggcgctcgcggtggccgccgccgccgccgccgagaagaggaggacgtacatcgtccacatggccaagtcggcgatgccggccgagtacgcggaccacgccgagtggtacggcgcatcgctgcgctccgtgtccgcctcagcctccgccgccaagatgctctacgcgtacgacaccgtcctgcacggtttctccgcgcgcctcacgccgcangaggccagcgacctggcgtccgccgagggggtgctcgccgtcaacccggaggcgcggtacgagctgcacaccacgcggacgcccgagttcctgggcatcgccggccagggcctgtccccgcagtccggcacggcgggcgacgtcgtcgtcggcgtgctcgacacgggcgtctggcccgagagcaagagctacgacgacnccggcctcgccgaggtgcccgcgtggtggaagggccagtgcnaggcgggacccggcttcgacgcctccaccgcctgcaaccgcaagctcgtcggcgccaggttcttcaacaagggctacgaggccgccatgggccccatggacaccgaccgggagtcccggtccccgctcgacgacgacggccacggcacgcacaccagctccacggccgccggcgccgccgtgccgggtgccagcctcttcggcttcgccgcgggcacggcgcgcggcatggcgccccgggcgcgcgtcgccgcctacaaggtgtgctggctcggcggctgcttcagctccgacatcctcgcgggcatggacgccgccgtcgccgacggctgcggcgtgctctcgctctcgctgggcggcggcgccgccgactactcgcgcgacagcgtcgccatcggcgccttcgccgccacggagcagaacgtcctcgtctcctgctcggccgggaacgccggccccgggagctccacgctgtccaacgtggcgccgtggatcaccaccgtgggcgccggcacgctcgaccgcgacttcccggcctacgtcgtgctcggcgacgggaagaactacacgggcgtctcgctctacgccgggaagccgctgcccagcgccccgatccccatcgtgtacgcggccaacgcctccaactccaccgcggggaacctgtgcatgcccggaaccctcgtgccggagaaggtggccggcaagatcgtcgtgtgcgaccgcggcgtcagcgcgcgcgtccagaagggcctcgtcgtgcgcgacgcgggcggcgccggcatggtgctgtccaacacggccgccaacggccaggagctcgtcgccgacgcgcacctcctgcccgccgccggcgtcggcgagagggaaggcncggcgatcaagtcgtacgtggcctccgccacgaaccccacgacgacggtcgtggtcgccgggacggaggtgggcgtgcgcccctcgccggtggtggcggcgttctcgtcgcgcgggcccaacatggtgacgccggagatcctgaagccggacatgatcgcgccgggggtgaacatcctggcgtcgtggacgggcaaggccgggccgacgggcctcgccgccgacacccgccgcgtgggcttcaacatcatctccggcacgtccatgtcgtgcccgcacgtgagcgggctggcggcgctgctccggagcgcgcacccggagtggagccccgccgccgtgcgctcggcgctcatgaccacagcctacgccagctactccggcgggtcgtcgctgctggacgcggcgacgggcgggatggccacgccgttnnantacggcgcggggcacgtggaccccgcgcgggcgctggacccggggctcgtctacgacctgggcacccgcgactacgtggacttcttgtgcgcgctcaagtacagctccaccatgatcgccgccgtggcgcggagccgggagtacgcgtgcgccgagaacaagacctactccgtgggcgccctcaactacccgtccttctcggtggcctactcgacggccaacggcgacggcggcggggactcggcnnccgtgacacacacgcggacgctgaccaacgtgggcggggcgggcacgtacaaggcgtccacgtcgctcgccgctgccaagggcgtggccgtggacgtggagccggcggagctggagttcacgtcggtgggggagaagaagagctacacggtgaggttcacgtccaagtcgcagccgtcgggcaccgccggtttcgggcggctcgtgtggtcggacgggaagcacagcgtggccagcccgatagcgttcacgtggacctgaacctgatggacggatggattataccatacgacagtggtttttggcgcctcagcctcaaagaaaggcccataatccatcatccatgtgacggcctcgttccctacactacgcagtcaaaagggccgaagtgtagggtgggaaggtttggagggggtacggtgcaaattggaggtttcttctgtgttgctattattactactaataaggtcattaatcctatcagcgtccgtaggttgtgatttttggatggaaatgggatcggggtggacggttggatggagattgatggtgcttggttgattggaatggaattattagagaggagaaggtttttagctt

SEQ ID NO: 17546 - protein, 764 aa, Zea mays subsp. mays
  peptide (1)..(764): Ceres Seq. ID no. 12417748
  misc_feature (360)..(458): Pfam Name: PA domain Pfam Description: PA domain
  misc_feature (1)..(763): Homolog of NCBI NO: 22331076 NR Description: subtilisin-like serine protease, putative
  misc_feature (17)..(762): Homolog of NCBI NO: 21536632 NR Description: subtilisin-like serine protease [Arabidopsis
  misc_feature (12)..(763): Homolog of NCBI NO: 7435656 NR Description: subtilisin-like proteinase (EC 3.4.21.-) 2 -
  misc_feature (25)..(763): Homolog of NCBI NO: 18423316 NR Description: subtilisin-like serine protease
  misc_feature (25)..(763): Homolog of NCBI NO: 18396193 NR Description: subtilisin-like serine protease, putative
  misc_feature (10)..(764): Homolog of NCBI NO: 1076414 NR Description: subtilisin-like proteinase (EC 3.4.21.-),
  misc_feature (10)..(764): Homolog of NCBI NO: 20147211 NR Description: AT5g67360/K8K14_8 [Arabidopsis thaliana]
  misc_feature (1)..(764): Homolog of NCBI NO: 7435657 NR Description: subtilisin-like proteinase (EC 3.4.21.-) 1 -
  misc_feature (10)..(764): Homolog of NCBI NO: 18425181 NR Description: subtilisin-like serine protease ARA12
  misc_feature (9)..(764): Homolog of NCBI NO: 14488360 NR Description: putative serine protease [Oryza sativa (japonica
  misc_feature (82)..(82): Xaa is any aa, unknown or other
  misc_feature (149)..(149): Xaa is any aa, unknown or other
  misc_feature (163)..(163): Xaa is any aa, unknown or other
  misc_feature (453)..(453): Xaa is any aa, unknown or other
  misc_feature (595)..(595): Xaa is any aa, unknown or other
  misc_feature (596)..(596): Xaa is any aa, unknown or other
  misc_feature (678)..(678): Xaa is any aa, unknown or other
  misc_feature (679)..(679): Xaa is any aa, unknown or other
MRNIGMLRALVLALAVAAAAAAEKRRTYIVHMAKSAMPAEYADHAEWYGASLRSVSASASAAKMLYAYDTVLHGFSARLTPXEASDLASAEGVLAVNPEARYELHTTRTPEFLGIAGQGLSPQSGTAGDVVVGVLDTGVWPESKSYDDXGLAEVPAWWKGQCXAGPGFDASTACNRKLVGARFFNKGYEAAMGPMDTDRESRSPLDDDGHGTHTSSTAAGAAVPGASLFGFAAGTARGMAPRARVAAYKVCWLGGCFSSDILAGMDAAVADGCGVLSLSLGGGAADYSRDSVAIGAFAATEQNVLVSCSAGNAGPGSSTLSNVAPWITTVGAGTLDRDFPAYVVLGDGKNYTGVSLYAGKPLPSAPIPIVYAANASNSTAGNLCMPGTLVPEKVAGKIVVCDRGVSARVQKGLVVRDAGGAGMVLSNTAANGQELVADAHLLPAAGVGEREGXAIKSYVASATNPTTTVVVAGTEVGVRPSPVVAAFSSRGPNMVTPEILKPDMIAPGVNILASWTGKAGPTGLAADTRRVGFNIISGTSMSCPHVSGLAALLRSAHPEWSPAAVRSALMTTAYASYSGGSSLLDAATGGMATPXXYGAGHVDPARALDPGLVYDLGTRDYVDFLCALKYSSTMIAAVARSREYACAENKTYSVGALNYPSFSVAYSTANGDGGGDSXXVTHTRTLTNVGGAGTYKASTSLAAAKGVAVDVEPAELEFTSVGEKKSYTVRFTSKSQPSGTAGFGRLVWSDGKHSVASPIAFTWT

SEQ ID NO: 17547 - protein, 759 aa, Zea mays subsp. mays
  peptide (1)..(759): Ceres Seq. ID no. 12417749
  misc_feature (355)..(453): Pfam Name: PA domain Pfam Description: PA domain
  misc_feature (1)..(758): Homolog of NCBI NO: 22331076 NR Description: subtilisin-like serine protease, putative
  misc_feature (12)..(757): Homolog of NCBI NO: 21536632 NR Description: subtilisin-like serine protease [Arabidopsis
  misc_feature (7)..(758): Homolog of NCBI NO: 7435656 NR Description: subtilisin-like proteinase (EC 3.4.21.-) 2 -
  misc_feature (20)..(758): Homolog of NCBI NO: 18423316 NR Description: subtilisin-like serine protease
  misc_feature (20)..(758): Homolog of NCBI NO: 18396193 NR Description: subtilisin-like serine protease, putative
  misc_feature (5)..(759): Homolog of NCBI NO: 1076414 NR Description: subtilisin-like proteinase (EC 3.4.21.-),
  misc_feature (5)..(759): Homolog of NCBI NO: 20147211 NR Description: AT5g67360/K8K14_8 [Arabidopsis thaliana]
  misc_feature (1)..(759): Homolog of NCBI NO: 7435657 NR Description: subtilisin-like proteinase (EC 3.4.21.-) 1 -
  misc_feature (5)..(759): Homolog of NCBI NO: 18425181 NR Description: subtilisin-like serine protease ARA12
  misc_feature (4)..(759): Homolog of NCBI NO: 14488360 NR Description: putative serine protease [Oryza sativa (japonica
  misc_feature (77)..(77): Xaa is any aa, unknown or other
  misc_feature (144)..(144): Xaa is any aa, unknown or other
  misc_feature (158)..(158): Xaa is any aa, unknown or other
  misc_feature (448)..(448): Xaa is any aa, unknown or other
  misc_feature (590)..(590): Xaa is any aa, unknown or other
  misc_feature (591)..(591): Xaa is any aa, unknown or other
  misc_feature (673)..(673): Xaa is any aa, unknown or other
  misc_feature (674)..(674): Xaa is any aa, unknown or other
MLRALVLALAVAAAAAAEKRRTYIVHMAKSAMPAEYADHAEWYGASLRSVSASASAAKMLYAYDTVLHGFSARLTPXEASDLASAEGVLAVNPEARYELHTTRTPEFLGIAGQGLSPQSGTAGDVVVGVLDTGVWPESKSYDDXGLAEVPAWWKGQCXAGPGFDASTACNRKLVGARFFNKGYEAAMGPMDTDRESRSPLDDDGHGTHTSSTAAGAAVPGASLFGFAAGTARGMAPRARVAAYKVCWLGGCFSSDILAGMDAAVADGCGVLSLSLGGGAADYSRDSVAIGAFAATEQNVLVSCSAGNAGPGSSTLSNVAPWITTVGAGTLDRDFPAYVVLGDGKNYTGVSLYAGKPLPSAPIPIVYAANASNSTAGNLCMPGTLVPEKVAGKIVVCDRGVSARVQKGLVVRDAGGAGMVLSNTAANGQELVADAHLLPAAGVGEREGXAIKSYVASATNPTTTVVVAGTEVGVRPSPVVAAFSSRGPNMVTPEILKPDMIAPGVNILASWTGKAGPTGLAADTRRVGFNIISGTSMSCPHVSGLAALLRSAHPEWSPAAVRSALMTTAYASYSGGSSLLDAATGGMATPXXYGAGHVDPARALDPGLVYDLGTRDYVDFLCALKYSSTMIAAVARSREYACAENKTYSVGALNYPSFSVAYSTANGDGGGDSXXVTHTRTLTNVGGAGTYKASTSLAAAKGVAVDVEPAELEFTSVGEKKSYTVRFTSKSQPSGTAGFGRLVWSDGKHSVASPIAFTWT

SEQ ID NO: 17548 - protein, 733 aa, Zea mays subsp. mays
  peptide (1)..(733): Ceres Seq. ID no. 12417750
  misc_feature (329)..(427): Pfam Name: PA domain Pfam Description: PA domain
  misc_feature (1)..(733): Homolog of NCBI NO: 1076414 NR Description: subtilisin-like proteinase (EC 3.4.21.-),
  misc_feature (1)..(733): Homolog of NCBI NO: 20147211 NR Description: AT5g67360/K8K14_8 [Arabidopsis thaliana]
  misc_feature (1)..(733): Homolog of NCBI NO: 7435657 NR Description: subtilisin-like proteinase (EC 3.4.21.-) 1 -
  misc_feature (1)..(731): Homolog of NCBI NO: 21536632 NR Description: subtilisin-like serine protease [Arabidopsis
  misc_feature (1)..(732): Homolog of NCBI NO: 18423316 NR Description: subtilisin-like serine protease
  misc_feature (1)..(732): Homolog of NCBI NO: 18396193 NR Description: subtilisin-like serine protease, putative
  misc_feature (1)..(732): Homolog of NCBI NO: 7435656 NR Description: subtilisin-like proteinase (EC 3.4.21.-) 2 -
  misc_feature (1)..(732): Homolog of NCBI NO: 22331076 NR Description: subtilisin-like serine protease, putative
  misc_feature (1)..(733): Homolog of NCBI NO: 18425181 NR Description: subtilisin-like serine protease ARA12
  misc_feature (1)..(733): Homolog of NCBI NO: 14488360 NR Description: putative serine protease [Oryza sativa (japonica
  misc_feature (51)..(51): Xaa is any aa, unknown or other
  misc_feature (118)..(118): Xaa is any aa, unknown or other
  misc_feature (132)..(132): Xaa is any aa, unknown or other
  misc_feature (422)..(422): Xaa is any aa, unknown or other
  misc_feature (564)..(564): Xaa is any aa, unknown or other
  misc_feature (565)..(565): Xaa is any aa, unknown or other
  misc_feature (647)..(647): Xaa is any aa, unknown or other
  misc_feature (648)..(648): Xaa is any aa, unknown or other
MAKSAMPAEYADHAEWYGASLRSVSASASAAKMLYAYDTVLHGFSARLTPXEASDLASAEGVLAVNPEARYELHTTRTPEFLGIAGQGLSPQSGTAGDVVVGVLDTGVWPESKSYDDXGLAEVPAWWKGQCXAGPGFDASTACNRKLVGARFFNKGYEAAMGPMDTDRESRSPLDDDGHGTHTSSTAAGAAVPGASLFGFAAGTARGMAPRARVAAYKVCWLGGCFSSDILAGMDAAVADGCGVLSLSLGGGAADYSRDSVAIGAFAATEQNVLVSCSAGNAGPGSSTLSNVAPWITTVGAGTLDRDFPAYVVLGDGKNYTGVSLYAGKPLPSAPIPIVYAANASNSTAGNLCMPGTLVPEKVAGKIVVCDRGVSARVQKGLVVRDAGGAGMVLSNTAANGQELVADAHLLPAAGVGEREGXAIKSYVASATNPTTTVVVAGTEVGVRPSPVVAAFSSRGPNMVTPEILKPDMIAPGVNILASWTGKAGPTGLAADTRRVGFNIISGTSMSCPHVSGLAALLRSAHPEWSPAAVRSALMTTAYASYSGGSSLLDAATGGMATPXXYGAGHVDPARALDPGLVYDLGTRDYVDFLCALKYSSTMIAAVARSREYACAENKTYSVGALNYPSFSVAYSTANGDGGGDSXXVTHTRTLTNVGGAGTYKASTSLAAAKGVAVDVEPAELEFTSVGEKKSYTVRFTSKSQPSGTAGFGRLVWSDGKHSVASPIAFTWT

SEQ ID NO: 17549 - DNA, 1378 bp, Zea mays subsp. mays
  misc_feature (1)..(1378): Ceres Seq. ID no. 13493680
  misc_feature: MA Experiment ID: 108515 Result: Down-regulated in Transcription
  misc_feature: MA Experiment 108515 PARAMETER Experiment Name: Zm_2mM_SA_P Parameter: Age (day) Value: 8
  misc_feature: MA Experiment 108515 PARAMETER Experiment Name: Zm_2mM_SA_P Parameter: Organism Value: Zea mays
  misc_feature: MA Experiment 108515 PARAMETER Experiment Name: Zm_2mM_SA_P Parameter: Plant Line Value: 35A19
  misc_feature: MA Experiment 108515 PARAMETER Experiment Name: Zm_2mM_SA_P Parameter: Timepoint (hr) Value: 12
  misc_feature: MA Experiment 108515 PARAMETER Experiment Name: Zm_2mM_SA_P Parameter: Tissue Value: Aerial
  misc_feature: MA Experiment 108515 PARAMETER Experiment Name: Zm_2mM_SA_P Parameter: Treatment Value: 2mM SA vs. No Treatment
  misc_feature: MA Experiment ID: 108523 Result: Down-regulated in Transcription
  misc_feature: MA Experiment 108523 PARAMETER Experiment Name: Zm_42deg_Heat_P Parameter: Age (day) Value: 8
  misc_feature: MA Experiment 108523 PARAMETER Experiment Name: Zm_42deg_Heat_P Parameter: Organism Value: Zea mays
  misc_feature: MA Experiment 108523 PARAMETER Experiment Name: Zm_42deg_Heat_P Parameter: Plant Line Value: 35A19
  misc_feature: MA Experiment 108523 PARAMETER Experiment Name: Zm_42deg_Heat_P Parameter: Temperature (deg C) Value: 42 vs. 22
  misc_feature: MA Experiment 108523 PARAMETER Experiment Name: Zm_42deg_Heat_P Parameter: Timepoint (hr) Value: 6
  misc_feature: MA Experiment 108523 PARAMETER Experiment Name: Zm_42deg_Heat_P Parameter: Tissue Value: Aerial
  misc_feature: MA Experiment ID: 108527 Result: Down-regulated in Transcription
  misc_feature: MA Experiment 108527 PARAMETER Experiment Name: Zm_5mM_NO_P Parameter: Age (day) Value: 8
  misc_feature: MA Experiment 108527 PARAMETER Experiment Name: Zm_5mM_NO_P Parameter: Organism Value: Zea mays
  misc_feature: MA Experiment 108527 PARAMETER Experiment Name: Zm_5mM_NO_P Parameter: Plant Line Value: 35A19
  misc_feature: MA Experiment 108527 PARAMETER Experiment Name: Zm_5mM_NO_P Parameter: Timepoint (hr) Value: 6
  misc_feature: MA Experiment 108527 PARAMETER Experiment Name: Zm_5mM_NO_P Parameter: Tissue Value: Aerial
  misc_feature: MA Experiment 108527 PARAMETER Experiment Name: Zm_5mM_NO_P Parameter: Treatment Value: 5mM NO vs. No Treatment
  misc_feature: MA Experiment ID: 108529 Result: Up-regulated in Transcription
  misc_feature: MA Experiment 108529 PARAMETER Experiment Name: Zm_Imbibed_Seeds_P Parameter: Age (day) Value: 5 vs. 2
  misc_feature: MA Experiment 108529 PARAMETER Experiment Name: Zm_Imbibed_Seeds_P Parameter: Organism Value: Zea mays
  misc_feature: MA Experiment 108529 PARAMETER Experiment Name: Zm_Imbibed_Seeds_P Parameter: Plant Line Value: 35A19
  misc_feature: MA Experiment 108529 PARAMETER Experiment Name: Zm_Imbibed_Seeds_P Parameter: Tissue Value: Roots vs. Embryo
  misc_feature: MA Experiment ID: 108535 Result: Down-regulated in Transcription
  misc_feature: MA Experiment 108535 PARAMETER Experiment Name: Zm_Meristem_P Parameter: Age (day) Value: 8
  misc_feature: MA Experiment 108535 PARAMETER Experiment Name: Zm_Meristem_P Parameter: Organism Value: Zea mays
  misc_feature: MA Experiment 108535 PARAMETER Experiment Name: Zm_Meristem_P Parameter: Plant Line Value: 35A19
  misc_feature: MA Experiment 108535 PARAMETER Experiment Name: Zm_Meristem_P Parameter: Tissue Value: Root Meristem vs. Above Root Meristem
  misc_feature: MA Experiment ID: 108543 Result: Up-regulated in Transcription
  misc_feature: MA Experiment ID: 108545 Result: Down-regulated in Transcription
  misc_feature: MA Experiment 108545 PARAMETER Experiment Name: Zm_Imbibed_Seeds_P Parameter: Age (day) Value: 3 vs. 2
  misc_feature: MA Experiment 108545 PARAMETER Experiment Name: Zm_Imbibed_Seeds_P Parameter: Organism Value: Zea mays
  misc_feature: MA Experiment 108545 PARAMETER Experiment Name: Zm_Imbibed_Seeds_P Parameter: Plant Line Value: 35A19
  misc_feature: MA Experiment 108545 PARAMETER Experiment Name: Zm_Imbibed_Seeds_P Parameter: Tissue Value: Aerial vs. Embryo
  misc_feature: MA Experiment ID: 108546 Result: Up-regulated in Transcription
  misc_feature: MA Experiment 108546 PARAMETER Experiment Name: Zm_Imbibed_Seeds_P Parameter: Age (day) Value: 3 vs. 2
  misc_feature: MA Experiment 108546 PARAMETER Experiment Name: Zm_Imbibed_Seeds_P Parameter: Organism Value: Zea mays
  misc_feature: MA Experiment 108546 PARAMETER Experiment Name: Zm_Imbibed_Seeds_P Parameter: Plant Line Value: 35A19
  misc_feature: MA Experiment 108546 PARAMETER Experiment Name: Zm_Imbibed_Seeds_P Parameter: Tissue Value: Roots vs. Embryo
  misc_feature: MA Experiment ID: 108547 Result: Down-regulated in Transcription
  misc_feature: MA Experiment 108547 PARAMETER Experiment Name: Zm_Imbibed_Seeds_P Parameter: Age (day) Value: 4 vs. 2
  misc_feature: MA Experiment 108547 PARAMETER Experiment Name: Zm_Imbibed_Seeds_P Parameter: Organism Value: Zea mays
  misc_feature: MA Experiment 108547 PARAMETER Experiment Name: Zm_Imbibed_Seeds_P Parameter: Plant Line Value: 35A19
  misc_feature: MA Experiment 108547 PARAMETER Experiment Name: Zm_Imbibed_Seeds_P Parameter: Tissue Value: Aerial vs. Embryo
  misc_feature: MA Experiment ID: 108556 Result: Down-regulated in Transcription
  misc_feature: MA Experiment 108556 PARAMETER Experiment Name: Zm_Drought_P Parameter: Age (day) Value: 9
  misc_feature: MA Experiment 108556 PARAMETER Experiment Name: Zm_Drought_P Parameter: Organism Value: Zea mays
  misc_feature: MA Experiment 108556 PARAMETER Experiment Name: Zm_Drought_P Parameter: Plant Line Value: 35A19
  misc_feature: MA Experiment 108556 PARAMETER Experiment Name: Zm_Drought_P Parameter: Timepoint (hr) Value: 24
  misc_feature: MA Experiment 108556 PARAMETER Experiment Name: Zm_Drought_P Parameter: Tissue Value: Aerial
  misc_feature: MA Experiment 108556 PARAMETER Experiment Name: Zm_Drought_P Parameter: Treatment Value: Drought vs. No Drought
  misc_feature: MA Experiment ID: 108559 Result: Down-regulated in Transcription
  misc_feature: MA Experiment 108559 PARAMETER Experiment Name: Zm_5mM_NO_P Parameter: Age (day) Value: 8
  misc_feature: MA Experiment 108559 PARAMETER Experiment Name: Zm_5mM_NO_P Parameter: Organism Value: Zea mays
  misc_feature: MA Experiment 108559 PARAMETER Experiment Name: Zm_5mM_NO_P Parameter: Plant Line Value: 35A19
  misc_feature: MA Experiment 108559 PARAMETER Experiment Name: Zm_5mM_NO_P Parameter: Timepoint (hr) Value: 12
  misc_feature: MA Experiment 108559 PARAMETER Experiment Name: Zm_5mM_NO_P Parameter: Tissue Value: Aerial
  misc_feature: MA Experiment 108559 PARAMETER Experiment Name: Zm_5mM_NO_P Parameter: Treatment Value: 5mM NO vs. No Treatment
  misc_feature: MA Experiment ID: 20000108 Result: Down-regulated in Transcription
  misc_feature: MA Experiment 20000108 PARAMETER Experiment Name: Zm_Root-Tips_P Parameter: Age (day) Value: 12
  misc_feature: MA Experiment 20000108 PARAMETER Experiment Name: Zm_Root-Tips_P Parameter: Organism Value: Zea mays
  misc_feature: MA Experiment 20000108 PARAMETER Experiment Name: Zm_Root-Tips_P Parameter: Tissue Value: Root tips vs. Root mid region    35
  misc_feature: MA Experiment 20000108 PARAMETER Experiment Name: Zm_Root-Tips_P Parameter: Tissue Value: Root tips vs. Root mid region   Sequence Listing-Misc Features (4)
  misc_feature: MA Experiment ID: 20000477 Result: Down-regulated in Transcription
  misc_feature: MA Experiment 20000477 PARAMETER Experiment Name: Zm_5mM_SA_P Parameter: Age (day) Value: 10
  misc_feature: MA Experiment 20000477 PARAMETER Experiment Name: Zm_5mM_SA_P Parameter: Organism Value: Zea mays
  misc_feature: MA Experiment 20000477 PARAMETER Experiment Name: Zm_5mM_SA_P Parameter: Plant Line Value: 35A19
  misc_feature: MA Experiment 20000477 PARAMETER Experiment Name: Zm_5mM_SA_P Parameter: Timepoint (hr) Value: 48
  misc_feature: MA Experiment 20000477 PARAMETER Experiment Name: Zm_5mM_SA_P Parameter: Tissue Value: Aerial
  misc_feature: MA Experiment 20000477 PARAMETER Experiment Name: Zm_5mM_SA_P Parameter: Treatment Value: 5mM SA vs. No Treatment
  misc_feature: MA Experiment ID: 20000478 Result: Down-regulated in Transcription
  misc_feature: MA Experiment 20000478 PARAMETER Experiment Name: Zm_5mM_SA_P Parameter: Age (day) Value: 11
  misc_feature: MA Experiment 20000478 PARAMETER Experiment Name: Zm_5mM_SA_P Parameter: Organism Value: Zea mays
  misc_feature: MA Experiment 20000478 PARAMETER Experiment Name: Zm_5mM_SA_P Parameter: Plant Line Value: 35A19
  misc_feature: MA Experiment 20000478 PARAMETER Experiment Name: Zm_5mM_SA_P Parameter: Timepoint (hr) Value: 72
  misc_feature: MA Experiment 20000478 PARAMETER Experiment Name: Zm_5mM_SA_P Parameter: Tissue Value: Aerial
  misc_feature: MA Experiment 20000478 PARAMETER Experiment Name: Zm_5mM_SA_P Parameter: Treatment Value: 5mM SA vs. No Treatment
  misc_feature: MA Experiment ID: 20000479 Result: Down-regulated in Transcription
  misc_feature: MA Experiment 20000479 PARAMETER Experiment Name: Zm_Drought_P Parameter: Age (day) Value: 10
  misc_feature: MA Experiment 20000479 PARAMETER Experiment Name: Zm_Drought_P Parameter: Organism Value: Zea mays
  misc_feature: MA Experiment 20000479 PARAMETER Experiment Name: Zm_Drought_P Parameter: Plant Line Value: 35A19
  misc_feature: MA Experiment 20000479 PARAMETER Experiment Name: Zm_Drought_P Parameter: Timepoint (hr) Value: 48
  misc_feature: MA Experiment 20000479 PARAMETER Experiment Name: Zm_Drought_P Parameter: Tissue Value: Aerial
  misc_feature: MA Experiment 20000479 PARAMETER Experiment Name: Zm_Drought_P Parameter: Treatment Value: Drought vs. No Drought
  misc_feature: MA Experiment ID: 20000480 Result: Down-regulated in Transcription
  misc_feature: MA Experiment 20000480 PARAMETER Experiment Name: Zm_Drought_P Parameter: Age (day) Value: 11
  misc_feature: MA Experiment 20000480 PARAMETER Experiment Name: Zm_Drought_P Parameter: Organism Value: Zea mays
  misc_feature: MA Experiment 20000480 PARAMETER Experiment Name: Zm_Drought_P Parameter: Plant Line Value: 35A19
  misc_feature: MA Experiment 20000480 PARAMETER Experiment Name: Zm_Drought_P Parameter: Timepoint (hr) Value: 72
  misc_feature: MA Experiment 20000480 PARAMETER Experiment Name: Zm_Drought_P Parameter: Tissue Value: Aerial
  misc_feature: MA Experiment 20000480 PARAMETER Experiment Name: Zm_Drought_P Parameter: Treatment Value: Drought vs. No Drought
  misc_feature: MA Experiment ID: 20000492 Result: Down-regulated in Transcription
  misc_feature: MA Experiment 20000492 PARAMETER Experiment Name: Zm_Hybrid_Seed_Dev_P Parameter: DAP Value: 12
  misc_feature: MA Experiment 20000492 PARAMETER Experiment Name: Zm_Hybrid_Seed_Dev_P Parameter: Organism Value: Zea mays
  misc_feature: MA Experiment 20000492 PARAMETER Experiment Name: Zm_Hybrid_Seed_Dev_P Parameter: Plant Line Value: 35A19
  misc_feature: MA Experiment 20000492 PARAMETER Experiment Name: Zm_Hybrid_Seed_Dev_P Parameter: Tissue Value: Fert Kernel vs. Unfert Floret
  misc_feature: MA Experiment ID: 20000532 Result: Down-regulated in Transcription
  misc_feature: MA Experiment 20000532 PARAMETER Experiment Name: Zm_0.001percent_MeJA_P Parameter: Age (day) Value: 10
  misc_feature: MA Experiment 20000532 PARAMETER Experiment Name: Zm_0.001percent_MeJA_P Parameter: Organism Value: Zea mays
  misc_feature: MA Experiment 20000532 PARAMETER Experiment Name: Zm_0.001percent_MeJA_P Parameter: Plant Line Value: 35A19
  misc_feature: MA Experiment 20000532 PARAMETER Experiment Name: Zm_0.001percent_MeJA_P Parameter: Timepoint (hr) Value: 48
  misc_feature: MA Experiment 20000532 PARAMETER Experiment Name: Zm_0.001percent_MeJA_P Parameter: Tissue Value: Aerial
  misc_feature: MA Experiment 20000532 PARAMETER Experiment Name: Zm_0.001percent_MeJA_P Parameter: Treatment Value: 0.001percent MeJA vs. No Treatment
  misc_feature: MA Experiment ID: 20000533 Result: Down-regulated in Transcription
  misc_feature: MA Experiment 20000533 PARAMETER Experiment Name: Zm_0.001percent_MeJA_P Parameter: Age (day) Value: 11
  misc_feature: MA Experiment 20000533 PARAMETER Experiment Name: Zm_0.001percent_MeJA_P Parameter: Organism Value: Zea mays
  misc_feature: MA Experiment 20000533 PARAMETER Experiment Name: Zm_0.001percent_MeJA_P Parameter: Plant Line Value: 35A19
  misc_feature: MA Experiment 20000533 PARAMETER Experiment Name: Zm_0.001percent_MeJA_P Parameter: Timepoint (hr) Value: 72
  misc_feature: MA Experiment 20000533 PARAMETER Experiment Name: Zm_0.001percent_MeJA_P Parameter: Tissue Value: Aerial
  misc_feature: MA Experiment 20000533 PARAMETER Experiment Name: Zm_0.001percent_MeJA_P Parameter: Treatment Value: 0.001percent MeJA vs. No Treatment
  misc_feature: MA Experiment ID: 20000535 Result: Down-regulated in Transcription
  misc_feature: MA Experiment 20000535 PARAMETER Experiment Name: Zm_Hybrid_Seed_Dev_P Parameter: DAP Value: 30 vs. 12
  misc_feature: MA Experiment 20000535 PARAMETER Experiment Name: Zm_Hybrid_Seed_Dev_P Parameter: Organism Value: Zea mays
  misc_feature: MA Experiment 20000535 PARAMETER Experiment Name: Zm_Hybrid_Seed_Dev_P Parameter: Plant Line Value: 35A19
  misc_feature: MA Experiment 20000535 PARAMETER Experiment Name: Zm_Hybrid_Seed_Dev_P Parameter: Tissue Value: Embryo vs. Unfert Floret
  misc_feature: MA Experiment ID: 20000626 Result: Down-regulated in Transcription
  misc_feature: MA Experiment 20000626 PARAMETER Experiment Name: Zm_Herbicide-Treatments_P Parameter: Timepoint (hr) Value: 12
  misc_feature: MA Experiment 20000626 PARAMETER Experiment Name: Zm_Herbicide-Treatments_P Parameter: Tissue Value: Aerial
  misc_feature: MA Experiment 20000626 PARAMETER Experiment Name: Zm_Herbicide-Treatments_P Parameter: Treatment Value: Roundup vs. No Treatment
  misc_feature: MA Experiment ID: 20000630 Result: Down-regulated in Transcription
  misc_feature: MA Experiment 20000630 PARAMETER Experiment Name: Zm_Herbicide-Treatments_P Parameter: Timepoint (hr) Value: 4
  misc_feature: MA Experiment 20000630 PARAMETER Experiment Name: Zm_Herbicide-Treatments_P Parameter: Tissue Value: Aerial
  misc_feature: MA Experiment 20000630 PARAMETER Experiment Name: Zm_Herbicide-Treatments_P Parameter: Treatment Value: Roundup vs. No Treatment
gcacgagaccattacctagaaacatcctaatcgaaaaatgacaacttttcctttattcttggtgctcagattgcatcctttaatcatcaccattcaccatagacaagttaacaagtcaagctgatcgagacgctcgcaccagaggcttcttccaaagcaggggagaagaggagagaagagcgagcgagctatggggttcggcatggctgtccctcctcgacggtttcttccggcgcgcgctcacgtccgccggcctccgcgcaggctccgccgccgtggacgccgacaccaccatccacttctgggcgcacccctccctcctccaggcccaggcccagccctcctccgcggctccgcggccggtggtggtgctgatccacgggttcgggccggacccgacgtggcagtgggcggcgcaggcgggcccgctgtcgcgccacttcgacctgctggtgccggcagctgctcttcttcggcgcgtccgccacgcgcgcccccgngcggtccgacgcgttccaggccgccgcgctcgccgcgctgctcgcgggcggcggccacgtcccgggcctcggcggccggaccgtgcacctcgtgggcgccaactacggcggcctggtggcgtaccacctcgcccgggagctggagcagcgaggcgtccgcgtcgggaaggtggcgctgtgcgacgcggacgcgtgctggggcggcgaggacggccgcgcgctggcggcccggagcggcgcggcggacgtggtggacctgctggcgcctggcgacaccgccgcggtgcggcggaggtggatgatgagcgcctaccgccccttcaaacacatccccaagtgcttcctccgcgacctctttcagaaacacttcgcggacaacagggaggagaaggtggcgctagtcaaagggatcactgccaaagaaggcttcgagctgactcctctacctcaggaggtgctcatcatctggggtgagttcgaccagatctacccggtcgagaaagcacacaagatgggagagaagctcggggagaaggcgacggtgaaggtgatcccgggcacgggacacctgccgcagcaacaggacatcaagctcttcaaccgcgtcctcctcgacttcctgctgcagcctgctgctgcttccacctccaatggcagcgctgccgccaagtagctcgggttcttttcttggttctccacttgtattgtctcccgcgtggcacgagcttgctgttgtgttattgtgtatataaaattctctgcagctgggttttattccgcctcttcgttttctatccagctggtttggaaatagaggcaatgcacattgttgtgtttagcaagatgtgaaataaatgacgaggcattgttttttcttc

SEQ ID NO: 17550 - protein, 203 aa, Zea mays subsp. mays
  peptide (1)..(203): Ceres Seq. ID no. 13493681
  misc_feature (26)..(203): Homolog of NCBI NO: 9845307 NR Description: pr5 [Rat cytomegalovirus]
  misc_feature (104)..(104): Xaa is any aa, unknown or other
MGFGMAVPPRRFLPARAHVRRPPRRLRRRGRRHHHPLLGAPLPPPGPGPALLRGSAAGGGADPRVRAGPDVAVGGAGGPAVAPLRPAGAGSCSSSARPPRAPPXGPTRSRPPRSPRCSRAAATSRASAAGPCTSWAPTTAAWWRTTSPGSWSSEASASGRWRCATRTRAGAARTAARWRPGAARRTWWTCWRLATPPRCGGGG

SEQ ID NO: 17551 - protein, 199 aa, Zea mays subsp. mays
  peptide (1)..(199): Ceres Seq. ID no. 13493682
  misc_feature (22)..(199): Homolog of NCBI NO: 9845307 NR Description: pr5 [Rat cytomegalovirus]
  misc_feature (100)..(100): Xaa is any aa, unknown or other
MAVPPRRFLPARAHVRRPPRRLRRRGRRHHHPLLGAPLPPPGPGPALLRGSAAGGGADPRVRAGPDVAVGGAGGPAVAPLRPAGAGSCSSSARPPRAPPXGPTRSRPPRSPRCSRAAATSRASAAGPCTSWAPTTAAWWRTTSPGSWSSEASASGRWRCATRTRAGAARTAARWRPGAARRTWWTCWRLATPPRCGGGG

SEQ ID NO: 17552 - protein, 124 aa, Zea mays subsp. mays
  peptide (1)..(124): Ceres Seq. ID no. 13493683
  misc_feature (1)..(105): Pfam Name: alpha/beta hydrolase fold Pfam Description: alpha/beta hydrolase fold
  misc_feature (1)..(108): Homolog of NCBI NO: 21592805 NR Description: unknown [Arabidopsis thaliana]
  misc_feature (1)..(124): Homolog of NCBI NO: 37533664 NR Description: putative hydrolase [Oryza sativa (japonica
  misc_feature (1)..(110): Homolog of NCBI NO: 18411865 NR Description: hydrolase, alpha/beta fold family [Arabidopsis
  misc_feature (1)..(107): Homolog of NCBI NO: 33146617 NR Description: hydrolase-like protein [Oryza sativa (japonica
  misc_feature (1)..(118): Homolog of NCBI NO: 27436745 NR Description: Hypothetical protein [Oryza sativa (japonica
  misc_feature (14)..(116): Homolog of NCBI NO: 24059850 NR Description: hydrolase-like protein [Oryza sativa (japonica
  misc_feature (1)..(112): Homolog of NCBI NO: 22326938 NR Description: hydrolase, alpha/beta fold family [Arabidopsis
  misc_feature (1)..(108): Homolog of NCBI NO: 30689631 NR Description: hydrolase, alpha/beta fold family [Arabidopsis
  misc_feature (1)..(121): Homolog of NCBI NO: 27436746 NR Description: Unknown protein [Oryza sativa (japonica
  misc_feature (1)..(115): Homolog of NCBI NO: 34896168 NR Description: contains ESTs
MMSAYRPFKHIPKCFLRDLFQKHFADNREEKVALVKGITAKEGFELTPLPQEVLIIWGEFDQIYPVEKAHKMGEKLGEKATVKVIPGTGHLPQQQDIKLFNRVLLDFLLQPAAASTSNGSAAAK

SEQ ID NO: 17553 - DNA, 1913 bp, Zea mays subsp. mays
  misc_feature (1)..(1913): Ceres Seq. ID no. 12417052
  misc_feature: MA Experiment ID: 108528 Result: Up-regulated in Transcription
  misc_feature: MA Experiment 108528 PARAMETER Experiment Name: Zm_Imbibed_Seeds_P Parameter: Age (day) Value: 5 vs. 2
  misc_feature: MA Experiment 108528 PARAMETER Experiment Name: Zm_Imbibed_Seeds_P Parameter: Organism Value: Zea mays
  misc_feature: MA Experiment 108528 PARAMETER Experiment Name: Zm_Imbibed_Seeds_P Parameter: Plant Line Value: 35A19
  misc_feature: MA Experiment 108528 PARAMETER Experiment Name: Zm_Imbibed_Seeds_P Parameter: Tissue Value: Aerial vs. Embryo
  misc_feature: MA Experiment ID: 108530 Result: Up-regulated in Transcription
  misc_feature: MA Experiment 108530 PARAMETER Experiment Name: Zm_Imbibed_Seeds_P Parameter: Age (day) Value: 6 vs. 2
  misc_feature: MA Experiment 108530 PARAMETER Experiment Name: Zm_Imbibed_Seeds_P Parameter: Organism Value: Zea mays
  misc_feature: MA Experiment 108530 PARAMETER Experiment Name: Zm_Imbibed_Seeds_P Parameter: Plant Line Value: 35A19
  misc_feature: MA Experiment 108530 PARAMETER Experiment Name: Zm_Imbibed_Seeds_P Parameter: Tissue Value: Aerial vs. Embryo
  misc_feature: MA Experiment ID: 108536 Result: Up-regulated in Transcription
  misc_feature: MA Experiment 108536 PARAMETER Experiment Name: Zm_Meristem_P Parameter: Age (day) Value: 8
  misc_feature: MA Experiment 108536 PARAMETER Experiment Name: Zm_Meristem_P Parameter: Organism Value: Zea mays
  misc_feature: MA Experiment 108536 PARAMETER Experiment Name: Zm_Meristem_P Parameter: Plant Line Value: 35A19
  misc_feature: MA Experiment 108536 PARAMETER Experiment Name: Zm_Meristem_P Parameter: Tissue Value: Shoot Meristem vs. Above Shoot Meristem
  misc_feature: MA Experiment ID: 108556 Result: Down-regulated in Transcription
  misc_feature: MA Experiment 108556 PARAMETER Experiment Name: Zm_Drought_P Parameter: Age (day) Value: 9
  misc_feature: MA Experiment 108556 PARAMETER Experiment Name: Zm_Drought_P Parameter: Organism Value: Zea mays
  misc_feature: MA Experiment 108556 PARAMETER Experiment Name: Zm_Drought_P Parameter: Plant Line Value: 35A19
  misc_feature: MA Experiment 108556 PARAMETER Experiment Name: Zm_Drought_P Parameter: Timepoint (hr) Value: 24
  misc_feature: MA Experiment 108556 PARAMETER Experiment Name: Zm_Drought_P Parameter: Tissue Value: Aerial
  misc_feature: MA Experiment 108556 PARAMETER Experiment Name: Zm_Drought_P Parameter: Treatment Value: Drought vs. No Drought
  misc_feature: MA Experiment ID: 20000480 Result: Down-regulated in Transcription
  misc_feature: MA Experiment 20000480 PARAMETER Experiment Name: Zm_Drought_P Parameter: Age (day) Value: 11
  misc_feature: MA Experiment 20000480 PARAMETER Experiment Name: Zm_Drought_P Parameter: Organism Value: Zea mays
  misc_feature: MA Experiment 20000480 PARAMETER Experiment Name: Zm_Drought_P Parameter: Plant Line Value: 35A19
  misc_feature: MA Experiment 20000480 PARAMETER Experiment Name: Zm_Drought_P Parameter: Timepoint (hr) Value: 72
  misc_feature: MA Experiment 20000480 PARAMETER Experiment Name: Zm_Drought_P Parameter: Tissue Value: Aerial
  misc_feature: MA Experiment 20000480 PARAMETER Experiment Name: Zm_Drought_P Parameter: Treatment Value: Drought vs. No Drought
gtgagtccgtcttcaactccatcgtcgtcgtcgtcgcgcgcgccgagtgtttggttgctcgggagaggagactatggagacgaccaagagcttggaggttgctgggggcgccatggacgacaacgacgacgaccacgaggcgtgggtgcacgactcctccgtcgatcaccgcgggaggtctccctcccgcgccaccaccgggtcctggaaggccgccatgttcatcatcttgatcgagttcagcgagaggctgagctacttcggcatagccacgagcctcatgatctacctcaccaaggtgctgcaagaggagatgaaggcggccgccaagaatgccaactactggatgagcgtcaccacgctcatgcccctgctcggtggcttcctcgccgacggctacctcggcaggttctccaccgtcgtcgtctccaccgccgtctacctgctgggcctgacggtgctggcgacggcgcagctggcgccggggctgaggcccgaccgctcgccgcgcctgcacgaggcgctcttcttcgccggcatctacctggtgtccgccggcaccggcggccacaagccggccctggagagcttcggcgcggaccagttcgacgaggcccacgcggcggagcgggtgcgcaagatgtccttcttcaactggtggaactgcgcgctctgctcgggcgtcctgctcggcgtcaccgccgtcgtctacgcgcaggaccgcgccggctggggcgccgccaccgtcgcgctcgccgccgtcatggccgcctcgctcgccgtcttcctcgccggccgccggtactaccgctacagggtgcccgagggcagcccgctcacgccgctgctccaggtcctcgtcgccgccttccggaataggcggctcccgttgccggacgacgacgccgagctgtacgaggtcaggcggccgcanagtancaagaggaggctgctttgccacacctaccagctgaggttcctcgacaaggcagccatagtggagcccggcgccggcgaggacgcctgcgggccgtggcggctggcgacggtgacgcaggtggaggagacgaagctggtgctggcgatggtgcccatctgggtgtgcacgctgcccttcggcatggcggtggcgcaggtgtccaccttcttcatcaagcagggcagcgtgatggaccgtcgcctgggcccgcacttggaggccccggcggcgtcggtgttcgcgctgtcggcggtggccatgatcgccacggtggcggcctacgacaaggcgctggtgccgtacctgcggcgcgccacgggaggggagcgcgggatcagcatccttgggcgcgtgggcatcggcatggcgttcgccatcgcggggctgggcgtggcggcggcggttggagcggcggctcctgntgtcggcggnngccgcgcggccgtcgacgtcggtgctgtggctggtgccgcagttcgcgctgatgggcgtggccgacgggttcgcgctggtgggcctgcaggagtacttctacgagcaggtccccgacggcatgcgcagcctgggcatcggcctctacctcagcgtcattggcgccgggagcttcctgagcagcctggtgatcacggcggcggaccgcgccagctcccgcggagggcgcgccggctggttcgccaaggacctcaaccgcagcaggctggacctcttctactggctgctggcgtgcatcagcgccgtcaacctggcattctacgcgctggtcgccaccaagtgctcgtacaagcagaccgtcagggccggcagggtcggcgacnaggtcgagtgcgccgccgcgtagctgctgctgtacgtggnggtcatgaaaccaaccatgcatcagccgcacgaccatgtgtattattattattattataggggctaatagtaactagct

SEQ ID NO: 17554 - protein, 606 aa, Zea mays subsp. mays
  peptide (1)..(606): Ceres Seq. ID no. 12417053
  misc_feature (113)..(437): Pfam Name: POT family Pfam Description: POT family
  misc_feature (6)..(437): Homolog of NCBI NO: 6635838 NR Description: amino acid/peptide transporter [Prunus dulcis]
  misc_feature (7)..(435): Homolog of NCBI NO: 37535270 NR Description: putative peptide transport protein
  misc_feature (18)..(437): Homolog of NCBI NO: 15240905 NR Description: oligopeptide transporter - like protein; protein
  misc_feature (27)..(437): Homolog of NCBI NO: 30696666 NR Description: oligopeptide transporter -related [Arabidopsis
  misc_feature (38)..(452): Homolog of NCBI NO: 11358594 NR Description: oligopeptide transporter-like protein -
  misc_feature (11)..(437): Homolog of NCBI NO: 4102839 NR Description: LeOPT1 [Lycopersicon esculentum]
  misc_feature (18)..(451): Homolog of NCBI NO: 37530502 NR Description: putative LeOPT1 - oligopeptide transporter
  misc_feature (16)..(437): Homolog of NCBI NO: 15232380 NR Description: transporter-like protein; protein id: At3g53960.1
  misc_feature (9)..(437): Homolog of NCBI NO: 15224397 NR Description: putative peptide/amino acid transporter; protein
  misc_feature (11)..(437): Homolog of NCBI NO: 34897398 NR Description: putative peptide transport protein
  misc_feature (287)..(287): Xaa is any aa, unknown or other
  misc_feature (289)..(289): Xaa is any aa, unknown or other
  misc_feature (443)..(443): Xaa is any aa, unknown or other
  misc_feature (446)..(446): Xaa is any aa, unknown or other
  misc_feature (447)..(447): Xaa is any aa, unknown or other
  misc_feature (574)..(574): Xaa is any aa, unknown or other
  misc_feature (587)..(587): Xaa is any aa, unknown or other
METTKSLEVAGGAMDDNDDDHEAWVHDSSVDHRGRSPSRATTGSWKAAMFIILIEFSERLSYFGIATSLMIYLTKVLQEEMKAAAKNANYWMSVTTLMPLLGGFLADGYLGRFSTVVVSTAVYLLGLTVLATAQLAPGLRPDRSPRLHEALFFAGIYLVSAGTGGHKPALESFGADQFDEAHAAERVRKMSFFNWWNCALCSGVLLGVTAVVYAQDRAGWGAATVALAAVMAASLAVFLAGRRYYRYRVPEGSPLTPLLQVLVAAFRNRRLPLPDDDAELYEVRRPXSXKRRLLCHTYQLRFLDKAAIVEPGAGEDACGPWRLATVTQVEETKLVLAMVPIWVCTLPFGMAVAQVSTFFIKQGSVMDRRLGPHLEAPAASVFALSAVAMIATVAAYDKALVPYLRRATGGERGISILGRVGIGMAFAIAGLGVAAAVGAAAPXVGXXRAAVDVGAVAGAAVRADGRGRRVRAGGPAGVLLRAGPRRHAQPGHRPLPQRHWRRELPEQPGDHGGGPRQLPRRARRLVRQGPQPQQAGPLLLAAGVHQRRQPGILRAGRHQVLVQADRQGRQGRRXGRVRRRVAAAVRXGHETNHASAARPCVLLLLL

SEQ ID NO: 17555 - protein, 593 aa, Zea mays subsp. mays
  peptide (1)..(593): Ceres Seq. ID no. 12417054
  misc_feature (100)..(424): Pfam Name: POT family Pfam Description: POT family
  misc_feature (1)..(424): Homolog of NCBI NO: 6635838 NR Description: amino acid/peptide transporter [Prunus dulcis]
  misc_feature (1)..(422): Homolog of NCBI NO: 37535270 NR Description: putative peptide transport protein
  misc_feature (5)..(424): Homolog of NCBI NO: 15240905 NR Description: oligopeptide transporter - like protein; protein
  misc_feature (14)..(424): Homolog of NCBI NO: 30696666 NR Description: oligopeptide transporter -related [Arabidopsis
  misc_feature (25)..(439): Homolog of NCBI NO: 11358594 NR Description: oligopeptide transporter-like protein -
  misc_feature (1)..(424): Homolog of NCBI NO: 4102839 NR Description: LeOPT1 [Lycopersicon esculentum]
  misc_feature (5)..(438): Homolog of NCBI NO: 37530502 NR Description: putative LeOPT1 - oligopeptide transporter
  misc_feature (3)..(424): Homolog of NCBI NO: 15232380 NR Description: transporter-like protein; protein id: At3g53960.1
  misc_feature (1)..(424): Homolog of NCBI NO: 15224397 NR Description: putative peptide/amino acid transporter; protein
  misc_feature (1)..(424): Homolog of NCBI NO: 34897398 NR Description: putative peptide transport protein
  misc_feature (274)..(274): Xaa is any aa, unknown or other
  misc_feature (276)..(276): Xaa is any aa, unknown or other
  misc_feature (430)..(430): Xaa is any aa, unknown or other
  misc_feature (433)..(433): Xaa is any aa, unknown or other
  misc_feature (434)..(434): Xaa is any aa, unknown or other
  misc_feature (561)..(561): Xaa is any aa, unknown or other
  misc_feature (574)..(574): Xaa is any aa, unknown or other
MDDNDDDHEAWVHDSSVDHRGRSPSRATTGSWKAAMFIILIEFSERLSYFGIATSLMIYLTKVLQEEMKAAAKNANYWMSVTTLMPLLGGFLADGYLGRFSTVVVSTAVYLLGLTVLATAQLAPGLRPDRSPRLHEALFFAGIYLVSAGTGGHKPALESFGADQFDEAHAAERVRKMSFFNWWNCALCSGVLLGVTAVVYAQDRAGWGAATVALAAVMAASLAVFLAGRRYYRYRVPEGSPLTPLLQVLVAAFRNRRLPLPDDDAELYEVRRPXSXKRRLLCHTYQLRFLDKAAIVEPGAGEDACGPWRLATVTQVEETKLVLAMVPIWVCTLPFGMAVAQVSTFFIKQGSVMDRRLGPHLEAPAASVFALSAVAMIATVAAYDKALVPYLRRATGGERGISILGRVGIGMAFAIAGLGVAAAVGAAAPXVGXXRAAVDVGAVAGAAVRADGRGRRVRAGGPAGVLLRAGPRRHAQPGHRPLPQRHWRRELPEQPGDHGGGPRQLPRRARRLVRQGPQPQQAGPLLLAAGVHQRRQPGILRAGRHQVLVQADRQGRQGRRXGRVRRRVAAAVRXGHETNHASAARPCVLLLLL

SEQ ID NO: 17556 - protein, 558 aa, Zea mays subsp. mays
  peptide (1)..(558): Ceres Seq. ID no. 12417055
  misc_feature (65)..(389): Pfam Name: POT family Pfam Description: POT family
  misc_feature (1)..(389): Homolog of NCBI NO: 6635838 NR Description: amino acid/peptide transporter [Prunus dulcis]
  misc_feature (1)..(387): Homolog of NCBI NO: 37535270 NR Description: putative peptide transport protein
  misc_feature (1)..(389): Homolog of NCBI NO: 15240905 NR Description: oligopeptide transporter - like protein; protein
  misc_feature (1)..(389): Homolog of NCBI NO: 30696666 NR Description: oligopeptide transporter -related [Arabidopsis
  misc_feature (1)..(404): Homolog of NCBI NO: 11358594 NR Description: oligopeptide transporter-like protein -
  misc_feature (1)..(389): Homolog of NCBI NO: 4102839 NR Description: LeOPT1 [Lycopersicon esculentum]
  misc_feature (1)..(403): Homolog of NCBI NO: 37530502 NR Description: putative LeOPT1 - oligopeptide transporter
  misc_feature (1)..(389): Homolog of NCBI NO: 15232380 NR Description: transporter-like protein; protein id: At3g53960.1
  misc_feature (1)..(389): Homolog of NCBI NO: 15224397 NR Description: putative peptide/amino acid transporter; protein
  misc_feature (1)..(389): Homolog of NCBI NO: 34897398 NR Description: putative peptide transport protein
  misc_feature (239)..(239): Xaa is any aa, unknown or other
  misc_feature (241)..(241): Xaa is any aa, unknown or other
  misc_feature (395)..(395): Xaa is any aa, unknown or other
  misc_feature (398)..(398): Xaa is any aa, unknown or other
  misc_feature (399)..(399): Xaa is any aa, unknown or other
  misc_feature (526)..(526): Xaa is any aa, unknown or other
  misc_feature (539)..(539): Xaa is any aa, unknown or other
MFIILIEFSERLSYFGIATSLMIYLTKVLQEEMKAAAKNANYWMSVTTLMPLLGGFLADGYLGRFSTVVVSTAVYLLGLTVLATAQLAPGLRPDRSPRLHEALFFAGIYLVSAGTGGHKPALESFGADQFDEAHAAERVRKMSFFNWWNCALCSGVLLGVTAVVYAQDRAGWGAATVALAAVMAASLAVFLAGRRYYRYRVPEGSPLTPLLQVLVAAFRNRRLPLPDDDAELYEVRRPXSXKRRLLCHTYQLRFLDKAAIVEPGAGEDACGPWRLATVTQVEETKLVLAMVPIWVCTLPFGMAVAQVSTFFIKQGSVMDRRLGPHLEAPAASVFALSAVAMIATVAAYDKALVPYLRRATGGERGISILGRVGIGMAFAIAGLGVAAAVGAAAPXVGXXRAAVDVGAVAGAAVRADGRGRRVRAGGPAGVLLRAGPRRHAQPGHRPLPQRHWRRELPEQPGDHGGGPRQLPRRARRLVRQGPQPQQAGPLLLAAGVHQRRQPGILRAGRHQVLVQADRQGRQGRRXGRVRRRVAAAVRXGHETNHASAARPCVLLLLL

SEQ ID NO: 17557 - DNA, 1271 bp, Zea mays subsp. mays
  misc_feature (1)..(1271): Ceres Seq. ID no. 12358974
  misc_feature: MA Experiment ID: 108523 Result: Down-regulated in Transcription
  misc_feature: MA Experiment 108523 PARAMETER Experiment Name: Zm_42deg_Heat_P Parameter: Age (day) Value: 8
  misc_feature: MA Experiment 108523 PARAMETER Experiment Name: Zm_42deg_Heat_P Parameter: Organism Value: Zea mays
  misc_feature: MA Experiment 108523 PARAMETER Experiment Name: Zm_42deg_Heat_P Parameter: Plant Line Value: 35A19
  misc_feature: MA Experiment 108523 PARAMETER Experiment Name: Zm_42deg_Heat_P Parameter: Temperature (deg C) Value: 42 vs. 22
  misc_feature: MA Experiment 108523 PARAMETER Experiment Name: Zm_42deg_Heat_P Parameter: Timepoint (hr) Value: 6
  misc_feature: MA Experiment 108523 PARAMETER Experiment Name: Zm_42deg_Heat_P Parameter: Tissue Value: Aerial
  misc_feature: MA Experiment ID: 108527 Result: Down-regulated in Transcription
  misc_feature: MA Experiment 108527 PARAMETER Experiment Name: Zm_5mM_NO_P Parameter: Age (day) Value: 8
  misc_feature: MA Experiment 108527 PARAMETER Experiment Name: Zm_5mM_NO_P Parameter: Organism Value: Zea mays
  misc_feature: MA Experiment 108527 PARAMETER Experiment Name: Zm_5mM_NO_P Parameter: Plant Line Value: 35A19
  misc_feature: MA Experiment 108527 PARAMETER Experiment Name: Zm_5mM_NO_P Parameter: Timepoint (hr) Value: 6
  misc_feature: MA Experiment 108527 PARAMETER Experiment Name: Zm_5mM_NO_P Parameter: Tissue Value: Aerial
  misc_feature: MA Experiment 108527 PARAMETER Experiment Name: Zm_5mM_NO_P Parameter: Treatment Value: 5mM NO vs. No Treatment
  misc_feature: MA Experiment ID: 108535 Result: Down-regulated in Transcription
  misc_feature: MA Experiment 108535 PARAMETER Experiment Name: Zm_Meristem_P Parameter: Age (day) Value: 8
  misc_feature: MA Experiment 108535 PARAMETER Experiment Name: Zm_Meristem_P Parameter: Organism Value: Zea mays
  misc_feature: MA Experiment 108535 PARAMETER Experiment Name: Zm_Meristem_P Parameter: Plant Line Value: 35A19
  misc_feature: MA Experiment 108535 PARAMETER Experiment Name: Zm_Meristem_P Parameter: Tissue Value: Root Meristem vs. Above Root Meristem
  misc_feature: MA Experiment ID: 108556 Result: Down-regulated in Transcription
  misc_feature: MA Experiment 108556 PARAMETER Experiment Name: Zm_Drought_P Parameter: Age (day) Value: 9
  misc_feature: MA Experiment 108556 PARAMETER Experiment Name: Zm_Drought_P Parameter: Organism Value: Zea mays
  misc_feature: MA Experiment 108556 PARAMETER Experiment Name: Zm_Drought_P Parameter: Plant Line Value: 35A19
  misc_feature: MA Experiment 108556 PARAMETER Experiment Name: Zm_Drought_P Parameter: Timepoint (hr) Value: 24
  misc_feature: MA Experiment 108556 PARAMETER Experiment Name: Zm_Drought_P Parameter: Tissue Value: Aerial
  misc_feature: MA Experiment 108556 PARAMETER Experiment Name: Zm_Drought_P Parameter: Treatment Value: Drought vs. No Drought
  misc_feature: MA Experiment ID: 108687 Result: Down-regulated in Transcription
  misc_feature: MA Experiment 108687 PARAMETER Experiment Name: Zm_Embryos-Flowers__P Parameter: Tissue Value: Embryo vs. Aerial+
  misc_feature: MA Experiment ID: 108689 Result: Down-regulated in Transcription
  misc_feature: MA Experiment 108689 PARAMETER Experiment Name: Zm_Drought_Roots_P Parameter: Age (day) Value: 9
  misc_feature: MA Experiment 108689 PARAMETER Experiment Name: Zm_Drought_Roots_P Parameter: Organism Value: Zea mays
  misc_feature: MA Experiment 108689 PARAMETER Experiment Name: Zm_Drought_Roots_P Parameter: Plant Line Value: 35A19
  misc_feature: MA Experiment 108689 PARAMETER Experiment Name: Zm_Drought_Roots_P Parameter: Timepoint (hr) Value: 24
  misc_feature: MA Experiment 108689 PARAMETER Experiment Name: Zm_Drought_Roots_P Parameter: Tissue Value: Roots
  misc_feature: MA Experiment 108689 PARAMETER Experiment Name: Zm_Drought_Roots_P Parameter: Treatment Value: Drought vs. No Drought
  misc_feature: MA Experiment ID: 20000480 Result: Down-regulated in Transcription
  misc_feature: MA Experiment 20000480 PARAMETER Experiment Name: Zm_Drought_P Parameter: Age (day) Value: 11
  misc_feature: MA Experiment 20000480 PARAMETER Experiment Name: Zm_Drought_P Parameter: Organism Value: Zea mays
  misc_feature: MA Experiment 20000480 PARAMETER Experiment Name: Zm_Drought_P Parameter: Plant Line Value: 35A19
  misc_feature: MA Experiment 20000480 PARAMETER Experiment Name: Zm_Drought_P Parameter: Timepoint (hr) Value: 72
  misc_feature: MA Experiment 20000480 PARAMETER Experiment Name: Zm_Drought_P Parameter: Tissue Value: Aerial
  misc_feature: MA Experiment 20000480 PARAMETER Experiment Name: Zm_Drought_P Parameter: Treatment Value: Drought vs. No Drought
  misc_feature: MA Experiment ID: 20000535 Result: Down-regulated in Transcription
  misc_feature: MA Experiment 20000535 PARAMETER Experiment Name: Zm_Hybrid_Seed_Dev_P Parameter: DAP Value: 30 vs. 12
  misc_feature: MA Experiment 20000535 PARAMETER Experiment Name: Zm_Hybrid_Seed_Dev_P Parameter: Organism Value: Zea mays
  misc_feature: MA Experiment 20000535 PARAMETER Experiment Name: Zm_Hybrid_Seed_Dev_P Parameter: Plant Line Value: 35A19
  misc_feature: MA Experiment 20000535 PARAMETER Experiment Name: Zm_Hybrid_Seed_Dev_P Parameter: Tissue Value: Embryo vs. Unfert Floret
aaagagaggtgccctagcttccctcccaatcccaccaggccgccgccaccacatcgcgccctcgcccgcttgccgccgaccctaaccggctgagcccctgaccagctcgtccaggcggacagcggcctgcggcaagccagcgcccagccaacagcgactgcctgactggtgagaggtgcgcatggtatggccggcctgatcagcttgcgcgccggtccgaggagttcaccgtcacttgcccggtcgtcgtccgcctgggcatcaccatcaccggcttcacaggtggcggttcgtttgccaagcccactgtttcgctgtgccaaacttcgtaggagccgtagtctactggcagcagcactggagatctctaaggacggttccgccgcggttctggccaacagcctgccttcccaaggggctatcgagacgctgcggaatgccgatgcagtatgtttcgacgttgacagcaccgtcatcctggacgagggcattgacgagcttgctgatttctgcggggcggggaaagctgttgctgaatggactgcaaaggccatgacagggactgttccgtttgaggaggcgctggcagccaggctgtctttaatcaagccatctctctcccaggtggaggagtgcctggagaagaggccaccaaggatttctcctggaatggctgatttggttaataagctaaaatccaataatattgacgtgttccttgtgtcaggaggcttccgacaaatgatcaagccagtagcatttgagcttggtattcctcctgaaaacatcactgcaaaccaattgttatttggcacattgggggagtacgccggatttgatcccacagagcccacttctngcagtgggggtaaagcaaaagcagtgcagcaaataaaacaggaccatggctacaagacagttgttatgattggtgatggtgcaactgatctggaggcccggcaacctggcggagcagacttgttcatatgttacgccggggttcanatgagagagccagtcgcagcacaagctgactgggtggtttttgattttcaagagctgatcactaagttgccatgaattcattacctaccgcaatttatgaacctttgcattgtcggctaaataattgcggccacattttaaagctgtagatttcactagcaattcttggagacaactgaattattacccggttgtaaagtattttttatttgttttcccgcattgtttgtatgatcctgaaccatgaatgcggaggttgtgttccg

SEQ ID NO: 17558 - protein, 297 aa, Zea mays subsp. mays
  peptide (1)..(297): Ceres Seq. ID no. 12358975
  misc_feature (85)..(271): Pfam Name: haloacid dehalogenase-like hydrolase Pfam Description: haloacid dehalogenase-like hydrolase
  misc_feature (41)..(293): Homolog of NCBI NO: 6513610 NR Description: O-phosphoserine phosphohydrolase Astray
  misc_feature (78)..(293): Homolog of NCBI NO: 31239763 NR Description: ENSANGP00000016587 [Anopheles gambiae]
  misc_feature (84)..(296): Homolog of NCBI NO: 29726390 NR Description: Chain A, Molecular Basis For The Local
  misc_feature (84)..(296): Homolog of NCBI NO: 31873380 NR Description: hypothetical protein [Homo sapiens]
  misc_feature (84)..(296): Homolog of NCBI NO: 19527116 NR Description: expressed sequence AI480570 [Mus musculus]
  misc_feature (84)..(296): Homolog of NCBI NO: 4758972 NR Description: phosphoserine phosphatase
  misc_feature (84)..(296): Homolog of NCBI NO: 34872053 NR Description: similar to expressed sequence AI480570 [Rattus
  misc_feature (71)..(296): Homolog of NCBI NO: 11358621 NR Description: phosphoserine phosphatase (EC 3.1.3.3) precursor,
  misc_feature (71)..(296): Homolog of NCBI NO: 15221827 NR Description: 3-phosphoserine phosphatase
  misc_feature (77)..(297): Homolog of NCBI NO: 4680206 NR Description: hypothetical protein [Sorghum bicolor]
  misc_feature (225)..(225): Xaa is any aa, unknown or other
  misc_feature (273)..(273): Xaa is any aa, unknown or other
MAGLISLRAGPRSSPSLARSSSAWASPSPASQVAVRLPSPLFRCAKLRRSRSLLAAALEISKDGSAAVLANSLPSQGAIETLRNADAVCFDVDSTVILDEGIDELADFCGAGKAVAEWTAKAMTGTVPFEEALAARLSLIKPSLSQVEECLEKRPPRISPGMADLVNKLKSNNIDVFLVSGGFRQMIKPVAFELGIPPENITANQLLFGTLGEYAGFDPTEPTSXSGGKAKAVQQIKQDHGYKTVVMIGDGATDLEARQPGGADLFICYAGVXMREPVAAQADWVVFDFQELITKLP

SEQ ID NO: 17559 - protein, 175 aa, Zea mays subsp. mays
  peptide (1)..(175): Ceres Seq. ID no. 12358976
  misc_feature (1)..(149): Pfam Name: haloacid dehalogenase-like hydrolase Pfam Description: haloacid dehalogenase-like hydrolase
  misc_feature (1)..(171): Homolog of NCBI NO: 6513610 NR Description: O-phosphoserine phosphohydrolase Astray
  misc_feature (1)..(171): Homolog of NCBI NO: 31239763 NR Description: ENSANGP00000016587 [Anopheles gambiae]
  misc_feature (1)..(174): Homolog of NCBI NO: 29726390 NR Description: Chain A, Molecular Basis For The Local
  misc_feature (1)..(174): Homolog of NCBI NO: 31873380 NR Description: hypothetical protein [Homo sapiens]
  misc_feature (1)..(174): Homolog of NCBI NO: 19527116 NR Description: expressed sequence AI480570 [Mus musculus]
  misc_feature (1)..(174): Homolog of NCBI NO: 4758972 NR Description: phosphoserine phosphatase
  misc_feature (1)..(174): Homolog of NCBI NO: 34872053 NR Description: similar to expressed sequence AI480570 [Rattus
  misc_feature (1)..(174): Homolog of NCBI NO: 11358621 NR Description: phosphoserine phosphatase (EC 3.1.3.3) precursor,
  misc_feature (1)..(174): Homolog of NCBI NO: 15221827 NR Description: 3-phosphoserine phosphatase
  misc_feature (1)..(175): Homolog of NCBI NO: 4680206 NR Description: hypothetical protein [Sorghum bicolor]
  misc_feature (103)..(103): Xaa is any aa, unknown or other
  misc_feature (151)..(151): Xaa is any aa, unknown or other
MTGTVPFEEALAARLSLIKPSLSQVEECLEKRPPRISPGMADLVNKLKSNNIDVFLVSGGFRQMIKPVAFELGIPPENITANQLLFGTLGEYAGFDPTEPTSXSGGKAKAVQQIKQDHGYKTVVMIGDGATDLEARQPGGADLFICYAGVXMREPVAAQADWVVFDFQELITKLP

SEQ ID NO: 17560 - DNA, 831 bp, Zea mays subsp. mays
  misc_feature (1)..(831): Ceres Seq. ID no. 12375378
  misc_feature: MA Experiment ID: 108535 Result: Up-regulated in Transcription
  misc_feature: MA Experiment 108535 PARAMETER Experiment Name: Zm_Meristem_P Parameter: Age (day) Value: 8
  misc_feature: MA Experiment 108535 PARAMETER Experiment Name: Zm_Meristem_P Parameter: Organism Value: Zea mays
  misc_feature: MA Experiment 108535 PARAMETER Experiment Name: Zm_Meristem_P Parameter: Plant Line Value: 35A19
  misc_feature: MA Experiment 108535 PARAMETER Experiment Name: Zm_Meristem_P Parameter: Tissue Value: Root Meristem vs. Above Root Meristem
aggctcgtgcaccatttcccctggttcccctcaatccaaatagtgccgtcccccccatcggctacctttcctcatcccacgcggcgcccatgccagccacacctgttcgaccacctgacccgcgcgcgccctgatggctcccgcgctcacctccaacccgccctccttccgtcccctaacgtccccactccgccgtcgtgccgccaccgtcccatgccgcgtcggtaagcccggcaaggactcctccgctgcggatgacgctaccggccccaacaagaggcccaacctcttcgcggacttcgggaatgccaagtcgctcatacaggcgttcccgtcgcagtcgctgttcgcgggcggtggcaggggcaggaaggacccgcagacggtgttcgtcgcaggcgccacagggcaggccggggtccgcatcgcgcagaccctgctgcggcaggggtttgccgtgcgcgctggcgtcccggacctagcgtcggcgcaggagctagcgcggctggcggcggcataccggctcatctcccccgcggaagcgcggcggctaaacgcggtagaggcgggcttcggtgaccccgacgcgatagccaagtccatcggccccgccgcgaaggtggtggtcaccgtcggctcggccgagaaagggccagaaggcggaggcgtcaccaccgacgacgcgctccgagtggtgcgggccgcagatctcgccagcgtggcgcacgtcgttgtcgtgtatgacgagggggcggccagcggcggccttggcggcgggggctccacttacaatgtgcttagcaagttctatctatcagagtgttttagttc

SEQ ID NO: 17561 - protein, 232 aa, Zea mays subsp. mays
  peptide (1)..(232): Ceres Seq. ID no. 12375379
  misc_feature (80)..(212): Homolog of NCBI NO: 21616072 NR Description: Tic62 protein [Pisum sativum]
  misc_feature (5)..(222): Homolog of NCBI NO: 18408279 NR Description: putative protein
  misc_feature (5)..(222): Homolog of NCBI NO: 7487756 NR Description: hypothetical protein T6H20.190 - Arabidopsis
MAPALTSNPPSFRPLTSPLRRRAATVPCRVGKPGKDSSAADDATGPNKRPNLFADFGNAKSLIQAFPSQSLFAGGGRGRKDPQTVFVAGATGQAGVRIAQTLLRQGFAVRAGVPDLASAQELARLAAAYRLISPAEARRLNAVEAGFGDPDAIAKSIGPAAKVVVTVGSAEKGPEGGGVTTDDALRVVRAADLASVAHVVVVYDEGAASGGLGGGGSTYNVLSKFYLSECFS

SEQ ID NO: 17562 - DNA, 1155 bp, Zea mays subsp. mays
  misc_feature (1)..(1155): Ceres Seq. ID no. 12369561
  misc_feature: MA Experiment ID: 108523 Result: Down-regulated in Transcription
  misc_feature: MA Experiment 108523 PARAMETER Experiment Name: Zm_42deg_Heat_P Parameter: Age (day) Value: 8
  misc_feature: MA Experiment 108523 PARAMETER Experiment Name: Zm_42deg_Heat_P Parameter: Organism Value: Zea mays
  misc_feature: MA Experiment 108523 PARAMETER Experiment Name: Zm_42deg_Heat_P Parameter: Plant Line Value: 35A19
  misc_feature: MA Experiment 108523 PARAMETER Experiment Name: Zm_42deg_Heat_P Parameter: Temperature (deg C) Value: 42 vs. 22
  misc_feature: MA Experiment 108523 PARAMETER Experiment Name: Zm_42deg_Heat_P Parameter: Timepoint (hr) Value: 6
  misc_feature: MA Experiment 108523 PARAMETER Experiment Name: Zm_42deg_Heat_P Parameter: Tissue Value: Aerial
  misc_feature: MA Experiment ID: 108528 Result: Up-regulated in Transcription
  misc_feature: MA Experiment 108528 PARAMETER Experiment Name: Zm_Imbibed_Seeds_P Parameter: Age (day) Value: 5 vs. 2
  misc_feature: MA Experiment 108528 PARAMETER Experiment Name: Zm_Imbibed_Seeds_P Parameter: Organism Value: Zea mays
  misc_feature: MA Experiment 108528 PARAMETER Experiment Name: Zm_Imbibed_Seeds_P Parameter: Plant Line Value: 35A19
  misc_feature: MA Experiment 108528 PARAMETER Experiment Name: Zm_Imbibed_Seeds_P Parameter: Tissue Value: Aerial vs. Embryo
  misc_feature: MA Experiment ID: 108530 Result: Up-regulated in Transcription
  misc_feature: MA Experiment 108530 PARAMETER Experiment Name: Zm_Imbibed_Seeds_P Parameter: Age (day) Value: 6 vs. 2
  misc_feature: MA Experiment 108530 PARAMETER Experiment Name: Zm_Imbibed_Seeds_P Parameter: Organism Value: Zea mays
  misc_feature: MA Experiment 108530 PARAMETER Experiment Name: Zm_Imbibed_Seeds_P Parameter: Plant Line Value: 35A19
  misc_feature: MA Experiment 108530 PARAMETER Experiment Name: Zm_Imbibed_Seeds_P Parameter: Tissue Value: Aerial vs. Embryo
  misc_feature: MA Experiment ID: 108536 Result: Down-regulated in Transcription
  misc_feature: MA Experiment 108536 PARAMETER Experiment Name: Zm_Meristem_P Parameter: Age (day) Value: 8
  misc_feature: MA Experiment 108536 PARAMETER Experiment Name: Zm_Meristem_P Parameter: Organism Value: Zea mays
  misc_feature: MA Experiment 108536 PARAMETER Experiment Name: Zm_Meristem_P Parameter: Plant Line Value: 35A19
  misc_feature: MA Experiment 108536 PARAMETER Experiment Name: Zm_Meristem_P Parameter: Tissue Value: Shoot Meristem vs. Above Shoot Meristem
  misc_feature: MA Experiment ID: 108547 Result: Up-regulated in Transcription
  misc_feature: MA Experiment 108547 PARAMETER Experiment Name: Zm_Imbibed_Seeds_P Parameter: Age (day) Value: 4 vs. 2
  misc_feature: MA Experiment 108547 PARAMETER Experiment Name: Zm_Imbibed_Seeds_P Parameter: Organism Value: Zea mays
  misc_feature: MA Experiment 108547 PARAMETER Experiment Name: Zm_Imbibed_Seeds_P Parameter: Plant Line Value: 35A19
  misc_feature: MA Experiment 108547 PARAMETER Experiment Name: Zm_Imbibed_Seeds_P Parameter: Tissue Value: Aerial vs. Embryo
  misc_feature: MA Experiment ID: 108687 Result: Down-regulated in Transcription
  misc_feature: MA Experiment 108687 PARAMETER Experiment Name: Zm_Embryos-Flowers__P Parameter: Tissue Value: Embryo vs. Aerial+
  misc_feature: MA Experiment ID: 20000534 Result: Down-regulated in Transcription
  misc_feature: MA Experiment 20000534 PARAMETER Experiment Name: Zm_Hybrid_Pollen_P Parameter: Age (day) Value: 8
  misc_feature: MA Experiment 20000534 PARAMETER Experiment Name: Zm_Hybrid_Pollen_P Parameter: Organism Value: Zea mays
  misc_feature: MA Experiment 20000534 PARAMETER Experiment Name: Zm_Hybrid_Pollen_P Parameter: Plant Line Value: 35A19
  misc_feature: MA Experiment 20000534 PARAMETER Experiment Name: Zm_Hybrid_Pollen_P Parameter: Tissue Value: Pollen vs. Aerial
atctctggtctggtcgctgcgcctcccgcttggccgcgagcccgcgaccatggcggcgccacccgtccccgtcctctgcagcgcttccccatgtcgcatcaccacccacctcgcccctcctgcctttcggaccgttgccgcggcgcggccgcaggccttgcccttcgtcttgtgcgtcgagcagcgcgtggggccctcggcgcgcgcgcgcgcgccgttcgcggccaagcgcggcggcggcggcgaggtatccgcggaagctccagacggcacgcgcgcgctgctccaggcggcgctctggggcgccgaggctgcctatatactctggctcttccttctgccttacgccccgggcgacccggtctgggcaatctcgcaggctaccatcagcgacctcatcggcctatcactcaacttcttcttcgtcctgccgctgctcaactcagttggcgttcacctgctcgaatcgcctctacttcaccctatggcagaaggattgttcaacttggtgctcgcttggacgctgctttttgcgccactcctcttcacggattgtaggagggaccgctacaagggatcgctcgacgtcctgtggggctttcagatgttcctcacaaacactttcttgataccttacatggcgatccgactgaacggtccggacgcggaccggtctccgccacgaagatcacagctgggttcagtcatggtcaacggcgcgccggctgtgggcgcggtcggcggcctcgtctgcgttctctcgatcgtttgggcgttctctggccgcggagattctggtttcggaggcattgcggaacggtggcagtatctgcagagctacctattctcggagcggcttgcttatgcgtttctctgggatatgtttctgtactccgtattccagccgtggctgatcggggacaatcttgggaacgtgaaggcggatgctgctgggcttgtgagtgtggtgcggttcgtccccgttgtgggtttagttgcctaccttctttgcttagaggaagaggattagctgttaactgtgttttttatatattttttttgtcgatcgtttggatcgttgatcagcgtgcagttgagtggattctgtgcttggtggcagtgagtttgcaactgaaaacacaaatcttgccgccg

SEQ ID NO: 17563 - protein, 342 aa, Zea mays subsp. mays
  peptide (1)..(342): Ceres Seq. ID no. 12369562
  misc_feature (154)..(336): Homolog of NCBI NO: 23043330 NR Description: hypothetical protein [Trichodesmium erythraeum
  misc_feature (204)..(342): Homolog of NCBI NO: 7939567 NR Description: gene_id:K13N2.15~unknown protein [Arabidopsis
  misc_feature (204)..(342): Homolog of NCBI NO: 38567712 NR Description: B1358B12.10 [Oryza sativa (japonica
  misc_feature (16)..(148): Homolog of NCBI NO: 38567712 NR Description: B1358B12.10 [Oryza sativa (japonica
  misc_feature (89)..(342): Homolog of NCBI NO: 18404669 NR Description: Expressed protein
  misc_feature (16)..(342): Homolog of NCBI NO: 38344973 NR Description: OSJNBa0072F16.18 [Oryza sativa (japonica
SLVWSLRLPLGREPATMAAPPVPVLCSASPCRITTHLAPPAFRTVAAARPQALPFVLCVEQRVGPSARARAPFAAKRGGGGEVSAEAPDGTRALLQAALWGAEAAYILWLFLLPYAPGDPVWAISQATISDLIGLSLNFFFVLPLLNSVGVHLLESPLLHPMAEGLFNLVLAWTLLFAPLLFTDCRRDRYKGSLDVLWGFQMFLTNTFLIPYMAIRLNGPDADRSPPRRSQLGSVMVNGAPAVGAVGGLVCVLSIVWAFSGRGDSGFGGIAERWQYLQSYLFSERLAYAFLWDMFLYSVFQPWLIGDNLGNVKADAAGLVSVVRFVPVVGLVAYLLCLEEED

SEQ ID NO: 17564 - protein, 326 aa, Zea mays subsp. mays
  peptide (1)..(326): Ceres Seq. ID no. 12369563
  misc_feature (188)..(326): Homolog of NCBI NO: 38567712 NR Description: B1358B12.10 [Oryza sativa (japonica
  misc_feature (1)..(132): Homolog of NCBI NO: 38567712 NR Description: B1358B12.10 [Oryza sativa (japonica
  misc_feature (73)..(326): Homolog of NCBI NO: 18404669 NR Description: Expressed protein
  misc_feature (1)..(326): Homolog of NCBI NO: 38344973 NR Description: OSJNBa0072F16.18 [Oryza sativa (japonica
  misc_feature (138)..(320): Homolog of NCBI NO: 23043330 NR Description: hypothetical protein [Trichodesmium erythraeum
  misc_feature (188)..(326): Homolog of NCBI NO: 7939567 NR Description: gene_id:K13N2.15~unknown protein [Arabidopsis
MAAPPVPVLCSASPCRITTHLAPPAFRTVAAARPQALPFVLCVEQRVGPSARARAPFAAKRGGGGEVSAEAPDGTRALLQAALWGAEAAYILWLFLLPYAPGDPVWAISQATISDLIGLSLNFFFVLPLLNSVGVHLLESPLLHPMAEGLFNLVLAWTLLFAPLLFTDCRRDRYKGSLDVLWGFQMFLTNTFLIPYMAIRLNGPDADRSPPRRSQLGSVMVNGAPAVGAVGGLVCVLSIVWAFSGRGDSGFGGIAERWQYLQSYLFSERLAYAFLWDMFLYSVFQPWLIGDNLGNVKADAAGLVSVVRFVPVVGLVAYLLCLEEED

SEQ ID NO: 17565 - protein, 208 aa, Zea mays subsp. mays
  peptide (1)..(208): Ceres Seq. ID no. 12369564
LWSGRCASRLAASPRPWRRHPSPSSAALPHVASPPTSPLLPFGPLPRRGRRPCPSSCASSSAWGPRRARARRSRPSAAAAARYPRKLQTARARCSRRRSGAPRLPIYSGSSFCLTPRATRSGQSRRLPSATSSAYHSTSSSSCRCSTQLAFTCSNRLYFTLWQKDCSTWCSLGRCFLRHSSSRIVGGTATRDRSTSCGAFRCSSQTLS

SEQ ID NO: 17566 - DNA, 2712 bp, Zea mays subsp. mays
  misc_feature (1)..(2712): Ceres Seq. ID no. 12382014
  misc_feature: MA Experiment ID: 108523 Result: Up-regulated in Transcription
  misc_feature: MA Experiment 108523 PARAMETER Experiment Name: Zm_42deg_Heat_P Parameter: Age (day) Value: 8
  misc_feature: MA Experiment 108523 PARAMETER Experiment Name: Zm_42deg_Heat_P Parameter: Organism Value: Zea mays
  misc_feature: MA Experiment 108523 PARAMETER Experiment Name: Zm_42deg_Heat_P Parameter: Plant Line Value: 35A19
  misc_feature: MA Experiment 108523 PARAMETER Experiment Name: Zm_42deg_Heat_P Parameter: Temperature (deg C) Value: 42 vs. 22
  misc_feature: MA Experiment 108523 PARAMETER Experiment Name: Zm_42deg_Heat_P Parameter: Timepoint (hr) Value: 6
  misc_feature: MA Experiment 108523 PARAMETER Experiment Name: Zm_42deg_Heat_P Parameter: Tissue Value: Aerial
  misc_feature: MA Experiment ID: 108535 Result: Down-regulated in Transcription
  misc_feature: MA Experiment 108535 PARAMETER Experiment Name: Zm_Meristem_P Parameter: Age (day) Value: 8
  misc_feature: MA Experiment 108535 PARAMETER Experiment Name: Zm_Meristem_P Parameter: Organism Value: Zea mays
  misc_feature: MA Experiment 108535 PARAMETER Experiment Name: Zm_Meristem_P Parameter: Plant Line Value: 35A19
  misc_feature: MA Experiment 108535 PARAMETER Experiment Name: Zm_Meristem_P Parameter: Tissue Value: Root Meristem vs. Above Root Meristem
  misc_feature: MA Experiment ID: 108547 Result: Down-regulated in Transcription
  misc_feature: MA Experiment 108547 PARAMETER Experiment Name: Zm_Imbibed_Seeds_P Parameter: Age (day) Value: 4 vs. 2
  misc_feature: MA Experiment 108547 PARAMETER Experiment Name: Zm_Imbibed_Seeds_P Parameter: Organism Value: Zea mays
  misc_feature: MA Experiment 108547 PARAMETER Experiment Name: Zm_Imbibed_Seeds_P Parameter: Plant Line Value: 35A19
  misc_feature: MA Experiment 108547 PARAMETER Experiment Name: Zm_Imbibed_Seeds_P Parameter: Tissue Value: Aerial vs. Embryo
  misc_feature: MA Experiment ID: 108689 Result: Up-regulated in Transcription
  misc_feature: MA Experiment 108689 PARAMETER Experiment Name: Zm_Drought_Roots_P Parameter: Age (day) Value: 9
  misc_feature: MA Experiment 108689 PARAMETER Experiment Name: Zm_Drought_Roots_P Parameter: Organism Value: Zea mays
  misc_feature: MA Experiment 108689 PARAMETER Experiment Name: Zm_Drought_Roots_P Parameter: Plant Line Value: 35A19
  misc_feature: MA Experiment 108689 PARAMETER Experiment Name: Zm_Drought_Roots_P Parameter: Timepoint (hr) Value: 24
  misc_feature: MA Experiment 108689 PARAMETER Experiment Name: Zm_Drought_Roots_P Parameter: Tissue Value: Roots
  misc_feature: MA Experiment 108689 PARAMETER Experiment Name: Zm_Drought_Roots_P Parameter: Treatment Value: Drought vs. No Drought
  misc_feature: MA Experiment ID: 20000477 Result: Up-regulated in Transcription
  misc_feature: MA Experiment 20000477 PARAMETER Experiment Name: Zm_5mM_SA_P Parameter: Age (day) Value: 10
  misc_feature: MA Experiment 20000477 PARAMETER Experiment Name: Zm_5mM_SA_P Parameter: Organism Value: Zea mays
  misc_feature: MA Experiment 20000477 PARAMETER Experiment Name: Zm_5mM_SA_P Parameter: Plant Line Value: 35A19
  misc_feature: MA Experiment 20000477 PARAMETER Experiment Name: Zm_5mM_SA_P Parameter: Timepoint (hr) Value: 48
  misc_feature: MA Experiment 20000477 PARAMETER Experiment Name: Zm_5mM_SA_P Parameter: Tissue Value: Aerial
  misc_feature: MA Experiment 20000477 PARAMETER Experiment Name: Zm_5mM_SA_P Parameter: Treatment Value: 5mM SA vs. No Treatment
  misc_feature: MA Experiment ID: 20000478 Result: Up-regulated in Transcription
  misc_feature: MA Experiment 20000478 PARAMETER Experiment Name: Zm_5mM_SA_P Parameter: Age (day) Value: 11
  misc_feature: MA Experiment 20000478 PARAMETER Experiment Name: Zm_5mM_SA_P Parameter: Organism Value: Zea mays
  misc_feature: MA Experiment 20000478 PARAMETER Experiment Name: Zm_5mM_SA_P Parameter: Plant Line Value: 35A19
  misc_feature: MA Experiment 20000478 PARAMETER Experiment Name: Zm_5mM_SA_P Parameter: Timepoint (hr) Value: 72
  misc_feature: MA Experiment 20000478 PARAMETER Experiment Name: Zm_5mM_SA_P Parameter: Tissue Value: Aerial
  misc_feature: MA Experiment 20000478 PARAMETER Experiment Name: Zm_5mM_SA_P Parameter: Treatment Value: 5mM SA vs. No Treatment
  misc_feature: MA Experiment ID: 20000479 Result: Up-regulated in Transcription
  misc_feature: MA Experiment 20000479 PARAMETER Experiment Name: Zm_Drought_P Parameter: Age (day) Value: 10
  misc_feature: MA Experiment 20000479 PARAMETER Experiment Name: Zm_Drought_P Parameter: Organism Value: Zea mays
  misc_feature: MA Experiment 20000479 PARAMETER Experiment Name: Zm_Drought_P Parameter: Plant Line Value: 35A19
  misc_feature: MA Experiment 20000479 PARAMETER Experiment Name: Zm_Drought_P Parameter: Timepoint (hr) Value: 48
  misc_feature: MA Experiment 20000479 PARAMETER Experiment Name: Zm_Drought_P Parameter: Tissue Value: Aerial
  misc_feature: MA Experiment 20000479 PARAMETER Experiment Name: Zm_Drought_P Parameter: Treatment Value: Drought vs. No Drought
  misc_feature: MA Experiment ID: 20000488 Result: Up-regulated in Transcription
  misc_feature: MA Experiment 20000488 PARAMETER Experiment Name: Zm_50mM_NH4NO3_L_to_H_P Parameter: Organism Value: Zea mays
  misc_feature: MA Experiment 20000488 PARAMETER Experiment Name: Zm_50mM_NH4NO3_L_to_H_P Parameter: Timepoint (hr) Value: 8
  misc_feature: MA Experiment 20000488 PARAMETER Experiment Name: Zm_50mM_NH4NO3_L_to_H_P Parameter: Tissue Value: Leaves
  misc_feature: MA Experiment 20000488 PARAMETER Experiment Name: Zm_50mM_NH4NO3_L_to_H_P Parameter: Treatment Value: 50mM NH4NO3 vs. 100mM Mannitol
  misc_feature: MA Experiment ID: 20000535 Result: Down-regulated in Transcription
  misc_feature: MA Experiment 20000535 PARAMETER Experiment Name: Zm_Hybrid_Seed_Dev_P Parameter: DAP Value: 30 vs. 12
  misc_feature: MA Experiment 20000535 PARAMETER Experiment Name: Zm_Hybrid_Seed_Dev_P Parameter: Organism Value: Zea mays
  misc_feature: MA Experiment 20000535 PARAMETER Experiment Name: Zm_Hybrid_Seed_Dev_P Parameter: Plant Line Value: 35A19
  misc_feature: MA Experiment 20000535 PARAMETER Experiment Name: Zm_Hybrid_Seed_Dev_P Parameter: Tissue Value: Embryo vs. Unfert Floret
gcacgagaccattacctagaacatcctaatcaaaaaaaaaaccataagaacgcacgcgagtggccagtgggaaccaggaaacaagaaagtgagagggggaagctgcggccgacggccgagctcttgccgtccctatccacccctctcgcctttcgctcttgcctttcgctccgtccagccgccgcgtaaaatccgcggaaccagatgcccttatccgccctctgatcgaatccggccagaaagcccggttctttgtcgtcgtcctcggcatcgccgacgaccttgatggcactggaggcgggtagtagcggcggcggcgggaggggatggggtggcgggttccgaagtctgatgcggcggaagcaggtggactccgatcgggtccgcgccgagggccagccgcagctcgccaaggagctcaacgtgccggagctggtcgcgatcggggttggttccacagttggaccaggagtatatgttcttgttggaacagttgctagggagcacgctggtccagcattgacaatttcatttctgatagctggaatagcagccgcgctttcagctttctgttatgctgagcttgctagtcgttgcccctcagctggaagtgcttaccattattcatatatctgtgttggagaaggtgttgcctggttgattggctgggctctagtgctggaatatactattggtgggtctgctgttgcccgtggtatatctccaaatttagccttgttttttggaggacaggatagtgtgccatggattttagcacgccatcagcttccatggtttgatatcattgttgatccctgtgcagccgctcttgtttttgttgtcactgttttactatgtgtgggaattaaagagagttcatttgcacaaggagtcgtaacagttctcaatgcctgtgtaatgatatttgttattgtagctgggagttatattggcttccaaataggatgggtgggctacaaggtttctgacgggtatttcccacatggagtaaatggaatgcttgctggatcagcaactgtcttctttgcatacataggctttgatacagtcgctagtacagctgaagaggtaaagaatccacagagagatttgccattgggaattggagttgcattggctatttgttgtgcgttgtatatggctgtttctgttgttattgttgggctggtgccatatttcgccatggatccagatactcctatttcatctgcctttgcaaggcatggaatgcaatgggctatgtacgttgtgacaagtggtgctgttcttgcactctgctcgaccttgatgggctcacttcttccacagcctagaatacttatggccatggcacgagatggtctgttgccatccttcttctctgatgttaacaagcaaactcaagtacctgttaagagcacaattgtgactggcatctgtgcagctgctctggcttttgcaatggatgtttcacagttagcaggaatggtcagtgtaggcacactccttgcattcaccgtagttgctgtctcgatcttgatactcagatatgtccctccatatgaggtccctttgccgccttctatgcaagaatcattccgtttgaaccaggaatgtgatgaggaaagggataggggtcttcttggagttgggaactgtaacttatctcagacaaaggatgtgattgtggtagtagaatcagtgaaggatcctctcattgataaaagactgcataaaggcaagatggatgagacgaagcgccgaaagatagcctctttaagcatagggtctgtgtgtgtaggggttctgatccttgcttcttcagcctctgccacatggttgccttttctcccgatatgtattggctgcaccattggagttgtgctccttctggctggcctcagcttgctctcctggatcgaccaagatgctggcaggcactcttttggtcattccggaggattcacatgcccttttgttccagtgctaccagttttgtgtatcctgataaatacgtatctgttaataaacctgagtggtgacacatggatgagagttggcatatggctgctgctgggtgttcttgtgtacgctttctacggacgaacccacagctccttaatagatgttgtctacgttccggcagcgcaagctgatgagatatacaggagttcatcaggatatgtatcatagaaaagaacagctgcagctgcagtcatgtgacacgatagagccacagaaagaccgagcggatgacagttacttaaaaggtggttgtccatcagctgtagaaaattggttatcagccggggaagacggaactgactgttatttctttcatgctcggctagcatgatctcgtggatgcaacttggcaagatatatatgctgctcacgagccaggtcaatttatacattgttggagtgtgtgtagatgtggtgtatataaaaccaactgggtggagtatgtgatgcgatacataataatttgtctaattcatgtaaaagccctttgtgcggaaatgtgagtgcatttaaaggacctattgaaaacagtacacggacggcaaaagaagccaccttttttatatatcatgtatatgtcgtccacaaacattctcttcatgtgtcatgtatatttgaccttggtcaggggttcatgaatgtactttgtttcttggtgtggcttttattagggataaaaagtccact

SEQ ID NO: 17567 - protein, 635 aa, Zea mays subsp. mays
  peptide (1)..(635): Ceres Seq. ID no. 12382015
  misc_feature (236)..(610): Homolog of NCBI NO: 4507047 NR Description: solute carrier family 7 (cationic amino acid
  misc_feature (20)..(610): Homolog of NCBI NO: 6671596 NR Description: solute carrier family 7 (cationic amino acid
  misc_feature (55)..(617): Homolog of NCBI NO: 37534696 NR Description: putative cationic amino acid transporter -like
  misc_feature (21)..(619): Homolog of NCBI NO: 6006869 NR Description: putative cationic amino acid transporter
  misc_feature (21)..(619): Homolog of NCBI NO: 22330822 NR Description: putative cationic amino acid transporter
  misc_feature (17)..(630): Homolog of NCBI NO: 10178213 NR Description: cationic amino acid transporter-like protein
  misc_feature (17)..(630): Homolog of NCBI NO: 30693001 NR Description: cationic amino acid transporter -related protein
  misc_feature (10)..(632): Homolog of NCBI NO: 30696198 NR Description: expressed protein [Arabidopsis thaliana]
  misc_feature (10)..(632): Homolog of NCBI NO: 23306414 NR Description: Unknown protein [Arabidopsis thaliana]
  misc_feature (1)..(635): Homolog of NCBI NO: 29244640 NR Description: putative cationic amino acid transporter
MALEAGSSGGGGRGWGGGFRSLMRRKQVDSDRVRAEGQPQLAKELNVPELVAIGVGSTVGPGVYVLVGTVAREHAGPALTISFLIAGIAAALSAFCYAELASRCPSAGSAYHYSYICVGEGVAWLIGWALVLEYTIGGSAVARGISPNLALFFGGQDSVPWILARHQLPWFDIIVDPCAAALVFVVTVLLCVGIKESSFAQGVVTVLNACVMIFVIVAGSYIGFQIGWVGYKVSDGYFPHGVNGMLAGSATVFFAYIGFDTVASTAEEVKNPQRDLPLGIGVALAICCALYMAVSVVIVGLVPYFAMDPDTPISSAFARHGMQWAMYVVTSGAVLALCSTLMGSLLPQPRILMAMARDGLLPSFFSDVNKQTQVPVKSTIVTGICAAALAFAMDVSQLAGMVSVGTLLAFTVVAVSILILRYVPPYEVPLPPSMQESFRLNQECDEERDRGLLGVGNCNLSQTKDVIVVVESVKDPLIDKRLHKGKMDETKRRKIASLSIGSVCVGVLILASSASATWLPFLPICIGCTIGVVLLLAGLSLLSWIDQDAGRHSFGHSGGFTCPFVPVLPVLCILINTYLLINLSGDTWMRVGIWLLLGVLVYAFYGRTHSSLIDVVYVPAAQADEIYRSSSGYVS

SEQ ID NO: 17568 - protein, 613 aa, Zea mays subsp. mays
  peptide (1)..(613): Ceres Seq. ID no. 12382016
  misc_feature (214)..(588): Homolog of NCBI NO: 4507047 NR Description: solute carrier family 7 (cationic amino acid
  misc_feature (1)..(588): Homolog of NCBI NO: 6671596 NR Description: solute carrier family 7 (cationic amino acid
  misc_feature (33)..(595): Homolog of NCBI NO: 37534696 NR Description: putative cationic amino acid transporter -like
  misc_feature (1)..(597): Homolog of NCBI NO: 6006869 NR Description: putative cationic amino acid transporter
  misc_feature (1)..(597): Homolog of NCBI NO: 22330822 NR Description: putative cationic amino acid transporter
  misc_feature (1)..(608): Homolog of NCBI NO: 10178213 NR Description: cationic amino acid transporter-like protein
  misc_feature (1)..(608): Homolog of NCBI NO: 30693001 NR Description: cationic amino acid transporter -related protein
  misc_feature (1)..(610): Homolog of NCBI NO: 30696198 NR Description: expressed protein [Arabidopsis thaliana]
  misc_feature (1)..(610): Homolog of NCBI NO: 23306414 NR Description: Unknown protein [Arabidopsis thaliana]
  misc_feature (1)..(613): Homolog of NCBI NO: 29244640 NR Description: putative cationic amino acid transporter
MRRKQVDSDRVRAEGQPQLAKELNVPELVAIGVGSTVGPGVYVLVGTVAREHAGPALTISFLIAGIAAALSAFCYAELASRCPSAGSAYHYSYICVGEGVAWLIGWALVLEYTIGGSAVARGISPNLALFFGGQDSVPWILARHQLPWFDIIVDPCAAALVFVVTVLLCVGIKESSFAQGVVTVLNACVMIFVIVAGSYIGFQIGWVGYKVSDGYFPHGVNGMLAGSATVFFAYIGFDTVASTAEEVKNPQRDLPLGIGVALAICCALYMAVSVVIVGLVPYFAMDPDTPISSAFARHGMQWAMYVVTSGAVLALCSTLMGSLLPQPRILMAMARDGLLPSFFSDVNKQTQVPVKSTIVTGICAAALAFAMDVSQLAGMVSVGTLLAFTVVAVSILILRYVPPYEVPLPPSMQESFRLNQECDEERDRGLLGVGNCNLSQTKDVIVVVESVKDPLIDKRLHKGKMDETKRRKIASLSIGSVCVGVLILASSASATWLPFLPICIGCTIGVVLLLAGLSLLSWIDQDAGRHSFGHSGGFTCPFVPVLPVLCILINTYLLINLSGDTWMRVGIWLLLGVLVYAFYGRTHSSLIDVVYVPAAQADEIYRSSSGYVS

SEQ ID NO: 17569 - protein, 424 aa, Zea mays subsp. mays
  peptide (1)..(424): Ceres Seq. ID no. 12382017
  misc_feature (25)..(399): Homolog of NCBI NO: 4507047 NR Description: solute carrier family 7 (cationic amino acid
  misc_feature (1)..(399): Homolog of NCBI NO: 6671596 NR Description: solute carrier family 7 (cationic amino acid
  misc_feature (1)..(406): Homolog of NCBI NO: 37534696 NR Description: putative cationic amino acid transporter -like
  misc_feature (1)..(408): Homolog of NCBI NO: 6006869 NR Description: putative cationic amino acid transporter
  misc_feature (1)..(408): Homolog of NCBI NO: 22330822 NR Description: putative cationic amino acid transporter
  misc_feature (1)..(419): Homolog of NCBI NO: 10178213 NR Description: cationic amino acid transporter-like protein
  misc_feature (1)..(419): Homolog of NCBI NO: 30693001 NR Description: cationic amino acid transporter -related protein
  misc_feature (1)..(421): Homolog of NCBI NO: 30696198 NR Description: expressed protein [Arabidopsis thaliana]
  misc_feature (1)..(421): Homolog of NCBI NO: 23306414 NR Description: Unknown protein [Arabidopsis thaliana]
  misc_feature (1)..(424): Homolog of NCBI NO: 29244640 NR Description: putative cationic amino acid transporter
MIFVIVAGSYIGFQIGWVGYKVSDGYFPHGVNGMLAGSATVFFAYIGFDTVASTAEEVKNPQRDLPLGIGVALAICCALYMAVSVVIVGLVPYFAMDPDTPISSAFARHGMQWAMYVVTSGAVLALCSTLMGSLLPQPRILMAMARDGLLPSFFSDVNKQTQVPVKSTIVTGICAAALAFAMDVSQLAGMVSVGTLLAFTVVAVSILILRYVPPYEVPLPPSMQESFRLNQECDEERDRGLLGVGNCNLSQTKDVIVVVESVKDPLIDKRLHKGKMDETKRRKIASLSIGSVCVGVLILASSASATWLPFLPICIGCTIGVVLLLAGLSLLSWIDQDAGRHSFGHSGGFTCPFVPVLPVLCILINTYLLINLSGDTWMRVGIWLLLGVLVYAFYGRTHSSLIDVVYVPAAQADEIYRSSSGYVS

SEQ ID NO: 17570 - DNA, 1314 bp, Zea mays subsp. mays
  misc_feature (1)..(1314): Ceres Seq. ID no. 15179566
  misc_feature: MA Experiment ID: 108544 Result: Down-regulated in Transcription
  misc_feature: MA Experiment ID: 20000492 Result: Up-regulated in Transcription
  misc_feature: MA Experiment 20000492 PARAMETER Experiment Name: Zm_Hybrid_Seed_Dev_P Parameter: DAP Value: 12
  misc_feature: MA Experiment 20000492 PARAMETER Experiment Name: Zm_Hybrid_Seed_Dev_P Parameter: Organism Value: Zea mays
  misc_feature: MA Experiment 20000492 PARAMETER Experiment Name: Zm_Hybrid_Seed_Dev_P Parameter: Plant Line Value: 35A19
  misc_feature: MA Experiment 20000492 PARAMETER Experiment Name: Zm_Hybrid_Seed_Dev_P Parameter: Tissue Value: Fert Kernel vs. Unfert Floret
agaatacacaggctttcctatacttggagttgaatggcagaaaatggagaacccggatctccgcaaagcaatgggaatgaaaccagatcaaaagggtgttcgtgttagaagggtggagcccactgctccagaatctggatgcctacgaccatctgatattattcttagtttcgatggtgttgacattgctaatgatggaacagttcctttcaggcatggtgagcgcattggtttcagttatctggtttctcagaaatatactggagagaaagctcttgttaaagttctgcgtgattcaaaagttcatgaatttaaaataaggttagcaactcacaagcggcttgttgcggctcatgtgaagggcaggccaccgtcgtattacatagttgctggctttgtttttgcagctatctctgttccatatcttcgatctgagtatggaaaagattatgaatatgatgcacctgtcaagttgttggtgaaacatttacatgcgatggcggaatcacctgatgaacagcttgtggtggtatcacaggtgcttgtatcagatatcaatataggttatgaagaaatagtcaatactcaggtacttgctttcaatggccagcctgtaaaaaatttaaagaacttggcgaccatggtggaaaattgcaaggatgaatttttgaagtttgatctggagtatgaccagattgttgtcctcgagacgaaaactgcaaaggctgctacccaggacattctgacgacgcactgtataccttctgcaatgtcggatgaccttaaggcctagtggaaggaagggagcataacgcagccctgggccagggccatcaggtgggccaatagtttgggccgcattttcggctgaattgattagcgaagcgtacgatccgtgatgaagaggaaccccaatgtttatctgtttgagttaaatatcttttgaggggttgtggatgtgagagtgctggctggtgtctaaagctccgccattatagaaggtttgagggactgtcactgtcagataacaataaactggagttgttacaggcggagtcatcgtgaaaacgatagtgtctagtaagaagctgagtttgttttttctttacatgatttcattacaactacaccaaattattgacggggaaaggaatcataattggtccgtgatttcattacatccttggtgtctcaagcttgttccgcatagtacctgctatttgtcaacgatactttcacttctgcttgtaaagtatttgcatcttgtttctggacaagtggtacttaaaagatatttaagcgccgtgaaccaac

SEQ ID NO: 17571 - protein, 263 aa, Zea mays subsp. mays
  peptide (1)..(263): Ceres Seq. ID no. 15179567
  misc_feature (175)..(261): Homolog of NCBI NO: 9279653 NR Description: gb|AAF23847.1~gene_id:MDC8.17~strong similarity
  misc_feature (1)..(146): Homolog of NCBI NO: 9279653 NR Description: gb|AAF23847.1~gene_id:MDC8.17~strong similarity
  misc_feature (179)..(261): Homolog of NCBI NO: 18401167 NR Description: DegP protease [Arabidopsis thaliana]
  misc_feature (1)..(146): Homolog of NCBI NO: 18401167 NR Description: DegP protease [Arabidopsis thaliana]
  misc_feature (1)..(262): Homolog of NCBI NO: 18408327 NR Description: DegP protease [Arabidopsis thaliana]
  misc_feature (1)..(260): Homolog of NCBI NO: 18408329 NR Description: DegP protease [Arabidopsis thaliana]
  misc_feature (1)..(261): Homolog of NCBI NO: 25409077 NR Description: probable serine proteinase [imported] -
  misc_feature (1)..(261): Homolog of NCBI NO: 18407488 NR Description: DegP2 protease [Arabidopsis thaliana]
  misc_feature (1)..(261): Homolog of NCBI NO: 18421592 NR Description: DegP protease [Arabidopsis thaliana]
  misc_feature (1)..(262): Homolog of NCBI NO: 18421957 NR Description: DegP protease [Arabidopsis thaliana]
EYTGFPILGVEWQKMENPDLRKAMGMKPDQKGVRVRRVEPTAPESGCLRPSDIILSFDGVDIANDGTVPFRHGERIGFSYLVSQKYTGEKALVKVLRDSKVHEFKIRLATHKRLVAAHVKGRPPSYYIVAGFVFAAISVPYLRSEYGKDYEYDAPVKLLVKHLHAMAESPDEQLVVVSQVLVSDINIGYEEIVNTQVLAFNGQPVKNLKNLATMVENCKDEFLKFDLEYDQIVVLETKTAKAATQDILTTHCIPSAMSDDLKA

SEQ ID NO: 17572 - protein, 249 aa, Zea mays subsp. mays
  peptide (1)..(249): Ceres Seq. ID no. 15179568
  misc_feature (161)..(247): Homolog of NCBI NO: 9279653 NR Description: gb|AAF23847.1~gene_id:MDC8.17~strong similarity
  misc_feature (1)..(132): Homolog of NCBI NO: 9279653 NR Description: gb|AAF23847.1~gene_id:MDC8.17~strong similarity
  misc_feature (165)..(247): Homolog of NCBI NO: 18401167 NR Description: DegP protease [Arabidopsis thaliana]
  misc_feature (1)..(132): Homolog of NCBI NO: 18401167 NR Description: DegP protease [Arabidopsis thaliana]
  misc_feature (1)..(248): Homolog of NCBI NO: 18408327 NR Description: DegP protease [Arabidopsis thaliana]
  misc_feature (1)..(246): Homolog of NCBI NO: 18408329 NR Description: DegP protease [Arabidopsis thaliana]
  misc_feature (1)..(247): Homolog of NCBI NO: 25409077 NR Description: probable serine proteinase [imported] -
  misc_feature (1)..(247): Homolog of NCBI NO: 18407488 NR Description: DegP2 protease [Arabidopsis thaliana]
  misc_feature (1)..(247): Homolog of NCBI NO: 18421592 NR Description: DegP protease [Arabidopsis thaliana]
  misc_feature (1)..(248): Homolog of NCBI NO: 18421957 NR Description: DegP protease [Arabidopsis thaliana]
MENPDLRKAMGMKPDQKGVRVRRVEPTAPESGCLRPSDIILSFDGVDIANDGTVPFRHGERIGFSYLVSQKYTGEKALVKVLRDSKVHEFKIRLATHKRLVAAHVKGRPPSYYIVAGFVFAAISVPYLRSEYGKDYEYDAPVKLLVKHLHAMAESPDEQLVVVSQVLVSDINIGYEEIVNTQVLAFNGQPVKNLKNLATMVENCKDEFLKFDLEYDQIVVLETKTAKAATQDILTTHCIPSAMSDDLKA

SEQ ID NO: 17573 - protein, 240 aa, Zea mays subsp. mays
  peptide (1)..(240): Ceres Seq. ID no. 15179569
  misc_feature (152)..(238): Homolog of NCBI NO: 9279653 NR Description: gb|AAF23847.1~gene_id:MDC8.17~strong similarity
  misc_feature (1)..(123): Homolog of NCBI NO: 9279653 NR Description: gb|AAF23847.1~gene_id:MDC8.17~strong similarity
  misc_feature (156)..(238): Homolog of NCBI NO: 18401167 NR Description: DegP protease [Arabidopsis thaliana]
  misc_feature (1)..(123): Homolog of NCBI NO: 18401167 NR Description: DegP protease [Arabidopsis thaliana]
  misc_feature (1)..(239): Homolog of NCBI NO: 18408327 NR Description: DegP protease [Arabidopsis thaliana]
  misc_feature (1)..(237): Homolog of NCBI NO: 18408329 NR Description: DegP protease [Arabidopsis thaliana]
  misc_feature (1)..(238): Homolog of NCBI NO: 25409077 NR Description: probable serine proteinase [imported] -
  misc_feature (1)..(238): Homolog of NCBI NO: 18407488 NR Description: DegP2 protease [Arabidopsis thaliana]
  misc_feature (1)..(238): Homolog of NCBI NO: 18421592 NR Description: DegP protease [Arabidopsis thaliana]
  misc_feature (1)..(239): Homolog of NCBI NO: 18421957 NR Description: DegP protease [Arabidopsis thaliana]
MGMKPDQKGVRVRRVEPTAPESGCLRPSDIILSFDGVDIANDGTVPFRHGERIGFSYLVSQKYTGEKALVKVLRDSKVHEFKIRLATHKRLVAAHVKGRPPSYYIVAGFVFAAISVPYLRSEYGKDYEYDAPVKLLVKHLHAMAESPDEQLVVVSQVLVSDINIGYEEIVNTQVLAFNGQPVKNLKNLATMVENCKDEFLKFDLEYDQIVVLETKTAKAATQDILTTHCIPSAMSDDLKA

SEQ ID NO: 17574 - DNA, 1498 bp, Zea mays subsp. mays; identical to SEQ ID NO: 8726
  misc_feature (1)..(1498): Ceres Seq. ID no. 13570285
  misc_feature: MA Experiment ID: 108522 Result: Up-regulated in Transcription
  misc_feature: MA Experiment 108522 PARAMETER Experiment Name: Zm_42deg_Heat_P Parameter: Age (day) Value: 8
  misc_feature: MA Experiment 108522 PARAMETER Experiment Name: Zm_42deg_Heat_P Parameter: Organism Value: Zea mays
  misc_feature: MA Experiment 108522 PARAMETER Experiment Name: Zm_42deg_Heat_P Parameter: Plant Line Value: 35A19
  misc_feature: MA Experiment 108522 PARAMETER Experiment Name: Zm_42deg_Heat_P Parameter: Temperature (deg C) Value: 42 vs. 22
  misc_feature: MA Experiment 108522 PARAMETER Experiment Name: Zm_42deg_Heat_P Parameter: Timepoint (hr) Value: 1
  misc_feature: MA Experiment 108522 PARAMETER Experiment Name: Zm_42deg_Heat_P Parameter: Tissue Value: Aerial
  misc_feature: MA Experiment ID: 108523 Result: Up-regulated in Transcription
  misc_feature: MA Experiment 108523 PARAMETER Experiment Name: Zm_42deg_Heat_P Parameter: Age (day) Value: 8
  misc_feature: MA Experiment 108523 PARAMETER Experiment Name: Zm_42deg_Heat_P Parameter: Organism Value: Zea mays
  misc_feature: MA Experiment 108523 PARAMETER Experiment Name: Zm_42deg_Heat_P Parameter: Plant Line Value: 35A19
  misc_feature: MA Experiment 108523 PARAMETER Experiment Name: Zm_42deg_Heat_P Parameter: Temperature (deg C) Value: 42 vs. 22
  misc_feature: MA Experiment 108523 PARAMETER Experiment Name: Zm_42deg_Heat_P Parameter: Timepoint (hr) Value: 6
  misc_feature: MA Experiment 108523 PARAMETER Experiment Name: Zm_42deg_Heat_P Parameter: Tissue Value: Aerial

SEQ ID NO: 17575 - protein, 180 aa, Zea mays subsp. mays; identical to SEQ ID NO: 8727
  peptide (1)..(180): Ceres Seq. ID no. 15222583
  misc_feature (1)..(85): Pfam Name: FAD binding domain Pfam Description: FAD binding domain
  misc_feature (1)..(179): Homolog of NCBI NO: 34394418 NR Description: putative succinate dehydrogenase flavoprotein
  misc_feature (1)..(179): Homolog of NCBI NO: 15240075 NR Description: succinate dehydrogenase [ubiquinone], putative thaliana] >gi|20454872|sp|O82663|DHSA_ARATH Succinate [ubiquinone] flavoprotein subunit, mitochondrial (FP)
  misc_feature (1)..(179): Homolog of NCBI NO: 15224174 NR Description: succinate dehydrogenase [ubiquinone], putative
  misc_feature (1)..(179): Homolog of NCBI NO: 21231574 NR Description: succinate dehydrogenase flavoprotein subunit campestris pv. campestris str. ATCC 33913] succinate dehydrogenase flavoprotein subunit [Xanthomonas
  misc_feature (1)..(179): Homolog of NCBI NO: 37362284 NR Description: succinate dehydrogenase complex, subunit A,
  misc_feature (1)..(179): Homolog of NCBI NO: 28374211 NR Description: Similar to succinate dehydrogenase complex,
  misc_feature (1)..(179): Homolog of NCBI NO: 21242816 NR Description: succinate dehydrogenase flavoprotein subunit axonopodis pv. citri str. 306] >gi|21108302|gb|AAM36934.1| dehydrogenase flavoprotein subunit [Xanthomonas axonopodis pv.
  misc_feature (1)..(179): Homolog of NCBI NO: 22996847 NR Description: hypothetical protein [Xylella fastidiosa Ann-1]
  misc_feature (1)..(179): Homolog of NCBI NO: 15837674 NR Description: succinate dehydrogenase, flavoprotein subunit fastidiosa 9a5c] >gi|11252510|pir||E82728 succinate
  misc_feature (1)..(179): Homolog of NCBI NO: 28198269 NR Description: succinate dehydrogenase flavoprotein subunit fastidiosa Temecula1] >gi|28056339|gb|AAO28232.1| succinate
  misc_feature (24)..(24): Xaa is any aa, unknown or other
  misc_feature (26)..(26): Xaa is any aa, unknown or other
  misc_feature (172)..(172): Xaa is any aa, unknown or other

SEQ ID NO: 17576 - protein, 153 aa, Zea mays subsp. mays; identical to SEQ ID NO: 8728
  peptide (1)..(153): Ceres Seq. ID no. 15222584
  misc_feature (1)..(58): Pfam Name: FAD binding domain Pfam Description: FAD binding domain
  misc_feature (1)..(152): Homolog of NCBI NO: 34394418 NR Description: putative succinate dehydrogenase flavoprotein
  misc_feature (1)..(152): Homolog of NCBI NO: 15240075 NR Description: succinate dehydrogenase [ubiquinone], putative thaliana] >gi|20454872|sp|O82663|DHSA_ARATH Succinate [ubiquinone] flavoprotein subunit, mitochondrial (FP)
  misc_feature (1)..(152): Homolog of NCBI NO: 15224174 NR Description: succinate dehydrogenase [ubiquinone], putative
  misc_feature (1)..(152): Homolog of NCBI NO: 21231574 NR Description: succinate dehydrogenase flavoprotein subunit campestris pv. campestris str. ATCC 33913] succinate dehydrogenase flavoprotein subunit [Xanthomonas
  misc_feature (1)..(152): Homolog of NCBI NO: 37362284 NR Description: succinate dehydrogenase complex, subunit A,
  misc_feature (1)..(152): Homolog of NCBI NO: 28374211 NR Description: Similar to succinate dehydrogenase complex,
  misc_feature (1)..(152): Homolog of NCBI NO: 21242816 NR Description: succinate dehydrogenase flavoprotein subunit axonopodis pv. citri str. 306] >gi|21108302|gb|AAM36934.1| dehydrogenase flavoprotein subunit [Xanthomonas axonopodis pv.
  misc_feature (1)..(152): Homolog of NCBI NO: 22996847 NR Description: hypothetical protein [Xylella fastidiosa Ann-1]
  misc_feature (1)..(152): Homolog of NCBI NO: 15837674 NR Description: succinate dehydrogenase, flavoprotein subunit fastidiosa 9a5c] >gi|11252510|pir||E82728 succinate
  misc_feature (1)..(152): Homolog of NCBI NO: 28198269 NR Description: succinate dehydrogenase flavoprotein subunit fastidiosa Temecula1] >gi|28056339|gb|AAO28232.1| succinate
  misc_feature (145)..(145): Xaa is any aa, unknown or other

SEQ ID NO: 17577 - protein, 135 aa, Zea mays subsp. mays; identical to SEQ ID NO: 8729
  peptide (1)..(135): Ceres Seq. ID no. 15222585

SEQ ID NO: 17578 - DNA, 1091 bp, Zea mays subsp. mays
  misc_feature (1)..(1091): Ceres Seq. ID no. 12350723
  misc_feature: MA Experiment ID: 108529 Result: Up-regulated in Transcription
  misc_feature: MA Experiment 108529 PARAMETER Experiment Name: Zm_Imbibed_Seeds_P Parameter: Age (day) Value: 5 vs. 2
  misc_feature: MA Experiment 108529 PARAMETER Experiment Name: Zm_Imbibed_Seeds_P Parameter: Organism Value: Zea mays
  misc_feature: MA Experiment 108529 PARAMETER Experiment Name: Zm_Imbibed_Seeds_P Parameter: Plant Line Value: 35A19
  misc_feature: MA Experiment 108529 PARAMETER Experiment Name: Zm_Imbibed_Seeds_P Parameter: Tissue Value: Roots vs. Embryo
  misc_feature: MA Experiment ID: 108534 Result: Down-regulated in Transcription
  misc_feature: MA Experiment 108534 PARAMETER Experiment Name: Zm_4deg_Cold_P Parameter: Age (hr) Value: 8
  misc_feature: MA Experiment 108534 PARAMETER Experiment Name: Zm_4deg_Cold_P Parameter: Organism Value: Zea mays
  misc_feature: MA Experiment 108534 PARAMETER Experiment Name: Zm_4deg_Cold_P Parameter: Plant Line Value: 35A19
  misc_feature: MA Experiment 108534 PARAMETER Experiment Name: Zm_4deg_Cold_P Parameter: Temperature (deg C) Value: 4 vs. 22
  misc_feature: MA Experiment 108534 PARAMETER Experiment Name: Zm_4deg_Cold_P Parameter: Timepoint (hr) Value: 6
  misc_feature: MA Experiment 108534 PARAMETER Experiment Name: Zm_4deg_Cold_P Parameter: Tissue Value: Aerial
  misc_feature: MA Experiment ID: 108535 Result: Down-regulated in Transcription
  misc_feature: MA Experiment 108535 PARAMETER Experiment Name: Zm_Meristem_P Parameter: Age (day) Value: 8
  misc_feature: MA Experiment 108535 PARAMETER Experiment Name: Zm_Meristem_P Parameter: Organism Value: Zea mays
  misc_feature: MA Experiment 108535 PARAMETER Experiment Name: Zm_Meristem_P Parameter: Plant Line Value: 35A19
  misc_feature: MA Experiment 108535 PARAMETER Experiment Name: Zm_Meristem_P Parameter: Tissue Value: Root Meristem vs. Above Root Meristem
  misc_feature: MA Experiment ID: 108545 Result: Down-regulated in Transcription
  misc_feature: MA Experiment 108545 PARAMETER Experiment Name: Zm_Imbibed_Seeds_P Parameter: Age (day) Value: 3 vs. 2
  misc_feature: MA Experiment 108545 PARAMETER Experiment Name: Zm_Imbibed_Seeds_P Parameter: Organism Value: Zea mays
  misc_feature: MA Experiment 108545 PARAMETER Experiment Name: Zm_Imbibed_Seeds_P Parameter: Plant Line Value: 35A19
  misc_feature: MA Experiment 108545 PARAMETER Experiment Name: Zm_Imbibed_Seeds_P Parameter: Tissue Value: Aerial vs. Embryo
  misc_feature: MA Experiment ID: 108687 Result: Up-regulated in Transcription
  misc_feature: MA Experiment 108687 PARAMETER Experiment Name: Zm_Embryos-Flowers__P Parameter: Tissue Value: Embryo vs. Aerial+
  misc_feature: MA Experiment ID: 20001613 Result: Down-regulated in Transcription
  misc_feature: MA Experiment 20001613 PARAMETER Experiment Name: Zm_50ppm_KNO3_L-to-H_P Parameter: Age (day) Value: 20
  misc_feature: MA Experiment 20001613 PARAMETER Experiment Name: Zm_50ppm_KNO3_L-to-H_P Parameter: Organism Value: Zea mays
  misc_feature: MA Experiment 20001613 PARAMETER Experiment Name: Zm_50ppm_KNO3_L-to-H_P Parameter: Plant Line Value: 35A19
  misc_feature: MA Experiment 20001613 PARAMETER Experiment Name: Zm_50ppm_KNO3_L-to-H_P Parameter: Timepoint (hr) Value: 24
  misc_feature: MA Experiment 20001613 PARAMETER Experiment Name: Zm_50ppm_KNO3_L-to-H_P Parameter: Tissue Value: Roots
  misc_feature: MA Experiment 20001613 PARAMETER Experiment Name: Zm_50ppm_KNO3_L-to-H_P Parameter: Treatment Value: 50ppm KNO3 vs. 50ppm KCl
  misc_feature: MA Experiment ID: 20001614 Result: Down-regulated in Transcription
  misc_feature: MA Experiment 20001614 PARAMETER Experiment Name: Zm_50ppm_KNO3_L-to-H_P Parameter: Age (day) Value: 21
  misc_feature: MA Experiment 20001614 PARAMETER Experiment Name: Zm_50ppm_KNO3_L-to-H_P Parameter: Organism Value: Zea mays
  misc_feature: MA Experiment 20001614 PARAMETER Experiment Name: Zm_50ppm_KNO3_L-to-H_P Parameter: Plant Line Value: 35A19
  misc_feature: MA Experiment 20001614 PARAMETER Experiment Name: Zm_50ppm_KNO3_L-to-H_P Parameter: Timepoint (hr) Value: 48
  misc_feature: MA Experiment 20001614 PARAMETER Experiment Name: Zm_50ppm_KNO3_L-to-H_P Parameter: Tissue Value: Roots
  misc_feature: MA Experiment 20001614 PARAMETER Experiment Name: Zm_50ppm_KNO3_L-to-H_P Parameter: Treatment Value: 50ppm KNO3 vs. 50ppm KCl
acaagtcacaacgccctagagtagaggctgagctgcatatatcaccgagcaccctctctctctctgttcccctccctcgctcgacatggaggtcgccgccgccacttgtacgctccttgctgccgtcgccctaccagtttcgtcctcagcagcagcagcacgctctgcgacgaaacagagctactcgaggaggaagacgacggccgtgcgagccgtcatggcgaggccgcatcaggtgccgccgcctgccactgccaccgccaccgccaccacgtaccgcgacaactggttcgacaagctggccatcgggtacctgtcccggaaccttcaagaagcttctgggatgaagaacggaaaggacggctacgagggcctgatagaggcggccctggccatctccgcgctgttcagggttgaccagcagtgggacactgtggccagcgctctccaacgggccttccccagctacatcctcaccatgatcaaggtgatgatgccaccctctcgattctcgcgggagtatttcgccgccttcaccacggtgttcttcccttggctcgtcggaccatgtgaggtcagggaatcccaagtggatggaagggaagagaggaacgtggtctacatacccaaatgcagatttctggaaagcaccaactgtgtcggaatgtgcacgaacctctgcaaaatcccatgccagaggttcatccaggattcacttggcacggctgtctacatgtctcccaattttgaggacatgagctgcgagatgatctttggacagcaaccacctgaagatgatccagcactgaagcagccctgcttccggacaaaatgcatcgcaaagcagaatcatcaagtgaattgctctatttgatttgagaggaagtggatatgtaaattactatactactatcagtggaaattcccaaaattacatgctttcatgtttattcccttagtaagcagcatcagtttcatagattctttttacttgaaaacatagcagaaggcaattctagtatacgtcaaattgttaggaaactggttgctgatcaagaggattgaagaggaaacacaagatatgcctttgt

SEQ ID NO: 17579 - protein, 262 aa, Zea mays subsp. mays
  peptide (1)..(262): Ceres Seq. ID no. 12350724
  misc_feature (67)..(247): Homolog of NCBI NO: 22299485 NR Description: ORF_ID:tll1942~hypothetical protein
  misc_feature (10)..(252): Homolog of NCBI NO: 22328234 NR Description: unknown protein
  misc_feature (21)..(250): Homolog of NCBI NO: 18408106 NR Description: expressed protein
  misc_feature (56)..(258): Homolog of NCBI NO: 18379048 NR Description: Expressed protein
MEVAAATCTLLAAVALPVSSSAAAARSATKQSYSRRKTTAVRAVMARPHQVPPPATATATATTYRDNWFDKLAIGYLSRNLQEASGMKNGKDGYEGLIEAALAISALFRVDQQWDTVASALQRAFPSYILTMIKVMMPPSRFSREYFAAFTTVFFPWLVGPCEVRESQVDGREERNVVYIPKCRFLESTNCVGMCTNLCKIPCQRFIQDSLGTAVYMSPNFEDMSCEMIFGQQPPEDDPALKQPCFRTKCIAKQNHQVNCSI

SEQ ID NO: 17580 - protein, 218 aa, Zea mays subsp. mays
  peptide (1)..(218): Ceres Seq. ID no. 12350725
  misc_feature (23)..(203): Homolog of NCBI NO: 22299485 NR Description: ORF_ID:tll1942~hypothetical protein
  misc_feature (1)..(208): Homolog of NCBI NO: 22328234 NR Description: unknown protein
  misc_feature (1)..(206): Homolog of NCBI NO: 18408106 NR Description: expressed protein
  misc_feature (12)..(214): Homolog of NCBI NO: 18379048 NR Description: Expressed protein
MARPHQVPPPATATATATTYRDNWFDKLAIGYLSRNLQEASGMKNGKDGYEGLIEAALAISALFRVDQQWDTVASALQRAFPSYILTMIKVMMPPSRFSREYFAAFTTVFFPWLVGPCEVRESQVDGREERNVVYIPKCRFLESTNCVGMCTNLCKIPCQRFIQDSLGTAVYMSPNFEDMSCEMIFGQQPPEDDPALKQPCFRTKCIAKQNHQVNCSI

SEQ ID NO: 17581 - protein, 176 aa, Zea mays subsp. mays
  peptide (1)..(176): Ceres Seq. ID no. 12350726
  misc_feature (1)..(161): Homolog of NCBI NO: 22299485 NR Description: ORF_ID:tll1942~hypothetical protein
  misc_feature (1)..(166): Homolog of NCBI NO: 22328234 NR Description: unknown protein
  misc_feature (1)..(164): Homolog of NCBI NO: 18408106 NR Description: expressed protein
  misc_feature (1)..(172): Homolog of NCBI NO: 18379048 NR Description: Expressed protein
MKNGKDGYEGLIEAALAISALFRVDQQWDTVASALQRAFPSYILTMIKVMMPPSRFSREYFAAFTTVFFPWLVGPCEVRESQVDGREERNVVYIPKCRFLESTNCVGMCTNLCKIPCQRFIQDSLGTAVYMSPNFEDMSCEMIFGQQPPEDDPALKQPCFRTKCIAKQNHQVNCSI

SEQ ID NO: 17582 - DNA, 1724 bp, Zea mays subsp. mays
  misc_feature (1)..(1724): Ceres Seq. ID no. 12359928
  misc_feature: MA Experiment ID: 108515 Result: Up-regulated in Transcription
  misc_feature: MA Experiment 108515 PARAMETER Experiment Name: Zm_2mM_SA_P Parameter: Age (day) Value: 8
  misc_feature: MA Experiment 108515 PARAMETER Experiment Name: Zm_2mM_SA_P Parameter: Organism Value: Zea mays
  misc_feature: MA Experiment 108515 PARAMETER Experiment Name: Zm_2mM_SA_P Parameter: Plant Line Value: 35A19
  misc_feature: MA Experiment 108515 PARAMETER Experiment Name: Zm_2mM_SA_P Parameter: Timepoint (hr) Value: 12
  misc_feature: MA Experiment 108515 PARAMETER Experiment Name: Zm_2mM_SA_P Parameter: Tissue Value: Aerial
  misc_feature: MA Experiment 108515 PARAMETER Experiment Name: Zm_2mM_SA_P Parameter: Treatment Value: 2mM SA vs. No Treatment
  misc_feature: MA Experiment ID: 108527 Result: Up-regulated in Transcription
  misc_feature: MA Experiment 108527 PARAMETER Experiment Name: Zm_5mM_NO_P Parameter: Age (day) Value: 8
  misc_feature: MA Experiment 108527 PARAMETER Experiment Name: Zm_5mM_NO_P Parameter: Organism Value: Zea mays
  misc_feature: MA Experiment 108527 PARAMETER Experiment Name: Zm_5mM_NO_P Parameter: Plant Line Value: 35A19
  misc_feature: MA Experiment 108527 PARAMETER Experiment Name: Zm_5mM_NO_P Parameter: Timepoint (hr) Value: 6
  misc_feature: MA Experiment 108527 PARAMETER Experiment Name: Zm_5mM_NO_P Parameter: Tissue Value: Aerial
  misc_feature: MA Experiment 108527 PARAMETER Experiment Name: Zm_5mM_NO_P Parameter: Treatment Value: 5mM NO vs. No Treatment
  misc_feature: MA Experiment ID: 108530 Result: Down-regulated in Transcription
  misc_feature: MA Experiment 108530 PARAMETER Experiment Name: Zm_Imbibed_Seeds_P Parameter: Age (day) Value: 6 vs. 2
  misc_feature: MA Experiment 108530 PARAMETER Experiment Name: Zm_Imbibed_Seeds_P Parameter: Organism Value: Zea mays
  misc_feature: MA Experiment 108530 PARAMETER Experiment Name: Zm_Imbibed_Seeds_P Parameter: Plant Line Value: 35A19
  misc_feature: MA Experiment 108530 PARAMETER Experiment Name: Zm_Imbibed_Seeds_P Parameter: Tissue Value: Aerial vs. Embryo
  misc_feature: MA Experiment ID: 108535 Result: Up-regulated in Transcription
  misc_feature: MA Experiment 108535 PARAMETER Experiment Name: Zm_Meristem_P Parameter: Age (day) Value: 8
  misc_feature: MA Experiment 108535 PARAMETER Experiment Name: Zm_Meristem_P Parameter: Organism Value: Zea mays
  misc_feature: MA Experiment 108535 PARAMETER Experiment Name: Zm_Meristem_P Parameter: Plant Line Value: 35A19
  misc_feature: MA Experiment 108535 PARAMETER Experiment Name: Zm_Meristem_P Parameter: Tissue Value: Root Meristem vs. Above Root Meristem
  misc_feature: MA Experiment ID: 108543 Result: Down-regulated in Transcription
  misc_feature: MA Experiment ID: 108559 Result: Up-regulated in Transcription
  misc_feature: MA Experiment 108559 PARAMETER Experiment Name: Zm_5mM_NO_P Parameter: Age (day) Value: 8
  misc_feature: MA Experiment 108559 PARAMETER Experiment Name: Zm_5mM_NO_P Parameter: Organism Value: Zea mays
  misc_feature: MA Experiment 108559 PARAMETER Experiment Name: Zm_5mM_NO_P Parameter: Plant Line Value: 35A19
  misc_feature: MA Experiment 108559 PARAMETER Experiment Name: Zm_5mM_NO_P Parameter: Timepoint (hr) Value: 12
  misc_feature: MA Experiment 108559 PARAMETER Experiment Name: Zm_5mM_NO_P Parameter: Tissue Value: Aerial
  misc_feature: MA Experiment 108559 PARAMETER Experiment Name: Zm_5mM_NO_P Parameter: Treatment Value: 5mM NO vs. No Treatment
  misc_feature: MA Experiment ID: 20000479 Result: Up-regulated in Transcription
  misc_feature: MA Experiment 20000479 PARAMETER Experiment Name: Zm_Drought_P Parameter: Age (day) Value: 10
  misc_feature: MA Experiment 20000479 PARAMETER Experiment Name: Zm_Drought_P Parameter: Organism Value: Zea mays
  misc_feature: MA Experiment 20000479 PARAMETER Experiment Name: Zm_Drought_P Parameter: Plant Line Value: 35A19
  misc_feature: MA Experiment 20000479 PARAMETER Experiment Name: Zm_Drought_P Parameter: Timepoint (hr) Value: 48
  misc_feature: MA Experiment 20000479 PARAMETER Experiment Name: Zm_Drought_P Parameter: Tissue Value: Aerial
  misc_feature: MA Experiment 20000479 PARAMETER Experiment Name: Zm_Drought_P Parameter: Treatment Value: Drought vs. No Drought
acgcgtttgcttcttcaagcattgaccccttccgccccgtccgtcatcttccccacctctctccgcactgcaggagcttgcgggcgtggcggcggccgtgaccggcgctggagatcttggacgcgcgcgacatcctggtctccgctctgtgcctctggtctccgaaggcgccgccaccctatttttttttaaaaaaaatcctaagatagtttcttcagtccgacaccgcttctagcttcccctcggcgatctgtgaagctatgaagccacctctcgagaggaacccgactaagaagcgccactcgtggtggtgggacagtcacattagccctaagaactcgaaatggctcgccgaaaatctcgaagaaatggacaagcaagtgaaggaaatgctccagctgatcgaggaggacggcgactccttcgctaagaaagcgcaaatgtattaccagaggcgtccgatgctcgtcacccacgtcgagaacttctaccgtatgtatcgtgctctagccgagcgctatgacaatgtaaccggcgagctgcgcaagaacatccctacaaggctgcagacaaccggatttttaaccagttcagagtacggttctgagctgcagaggtcgccctcaccgtctcctgagccgttacagaggtcgtggacaagggagcagagccctagggccgctggcttcgacttcttcctgagcaataggagcaatgactcgccacctgtctacaggaaggaacccgaggacgcggcatcgcagtcggagtctgacgcgaagtctgcagacggtgaggatgatggcatcgcctacacgctgcaccagagagttcttgagctagaggacgagctcaatgcgacaaaccagaaactacaagatgcaaacgagaagcttgaggttctggaggagaagagcttgaggtgccattgtgattataaagagaatggaaacggtgctcagcgaactacagaagtttcaggcaaagagggggagctggaagccgaaatcgtcaatctccaggaggaagcggactcggcaagaaggcgattcgaagaggcattgtctgaacgagatggagaaatcagcaagctaaagcaagagcttgctggtgcttctgagaagctgcagcgagagaagtacgccaatggcgtgcaggtatctgagctgcagcgatcggttgaacacatcaggtccgaactagagagagtttctgaagagaaactactgtccgagaacaagatcaaggagctggaggcagcaaacgctgaagccggtaagtacggccacgagctcacgcgagctgccgagaagatttccgaggagaagttcgcgctcgaagctgagatcctcacgatgcggcagaacattgaagatctgaaatccaggatcgagagcctcgctcgagagaagtccctgctcaaatcatggtttgaggacttggagcaagttgtggggcgaggaaggggcatcttcgccgattaaccgagtttctatccagaacatcatcggtagctagaatttagcaagttagcaacattttgttttgttttctggtactggtacccataccatcttgcgaaattgagatacgtcagtgtacttcctttttgttggctgaatcttaaacttagacgtgatggatggtggtgatgtactggcaatatatgaaatattatactgaaccgcgctcgacgtcaataataagattcctatggtgcatcc

SEQ ID NO: 17583 - protein, 407 aa, Zea mays subsp. mays
  peptide (1)..(407): Ceres Seq. ID no. 12359929
  misc_feature (195)..(395): Pfam Name: Tropomyosin Pfam Description: Tropomyosin
  misc_feature (8)..(387): Homolog of NCBI NO: 15218702 NR Description: unknown protein; protein id: At1g03080.1
  misc_feature (2)..(385): Homolog of NCBI NO: 28416683 NR Description: At2g30500 [Arabidopsis thaliana]
  misc_feature (2)..(385): Homolog of NCBI NO: 15224515 NR Description: unknown protein; protein id: At2g30500.1
  misc_feature (2)..(384): Homolog of NCBI NO: 30697046 NR Description: contains similarity to unknown protein
  misc_feature (2)..(384): Homolog of NCBI NO: 30697043 NR Description: contains similarity to unknown protein
  misc_feature (1)..(384): Homolog of NCBI NO: 8777333 NR Description: contains similarity to unknown
  misc_feature (199)..(407): Homolog of NCBI NO: 34896152 NR Description: P0701D05.31 [Oryza sativa (japonica
  misc_feature (11)..(398): Homolog of NCBI NO: 22002966 NR Description: putative CENP-E like kinetochore protein
  misc_feature (5)..(398): Homolog of NCBI NO: 34896156 NR Description: P0701D05.33 [Oryza sativa (japonica
  misc_feature (1)..(385): Homolog of NCBI NO: 34896152 NR Description: P0701D05.31 [Oryza sativa (japonica
MKPPLERNPTKKRHSWWWDSHISPKNSKWLAENLEEMDKQVKEMLQLIEEDGDSFAKKAQMYYQRRPMLVTHVENFYRMYRALAERYDNVTGELRKNIPTRLQTTGFLTSSEYGSELQRSPSPSPEPLQRSWTREQSPRAAGFDFFLSNRSNDSPPVYRKEPEDAASQSESDAKSADGEDDGIAYTLHQRVLELEDELNATNQKLQDANEKLEVLEEKSLRCHCDYKENGNGAQRTTEVSGKEGELEAEIVNLQEEADSARRRFEEALSERDGEISKLKQELAGASEKLQREKYANGVQVSELQRSVEHIRSELERVSEEKLLSENKIKELEAANAEAGKYGHELTRAAEKISEEKFALEAEILTMRQNIEDLKSRIESLAREKSLLKSWFEDLEQVVGRGRGIFAD

SEQ ID NO: 17584 - protein, 371 aa, Zea mays subsp. mays
  peptide (1)..(371): Ceres Seq. ID no. 12359930
  misc_feature (159)..(359): Pfam Name: Tropomyosin Pfam Description: Tropomyosin
  misc_feature (1)..(351): Homolog of NCBI NO: 15218702 NR Description: unknown protein; protein id: At1g03080.1
  misc_feature (1)..(349): Homolog of NCBI NO: 28416683 NR Description: At2g30500 [Arabidopsis thaliana]
  misc_feature (1)..(349): Homolog of NCBI NO: 15224515 NR Description: unknown protein; protein id: At2g30500.1
  misc_feature (1)..(348): Homolog of NCBI NO: 30697046 NR Description: contains similarity to unknown protein
  misc_feature (1)..(348): Homolog of NCBI NO: 30697043 NR Description: contains similarity to unknown protein
  misc_feature (1)..(348): Homolog of NCBI NO: 8777333 NR Description: contains similarity to unknown
  misc_feature (163)..(371): Homolog of NCBI NO: 34896152 NR Description: P0701D05.31 [Oryza sativa (japonica
  misc_feature (1)..(362): Homolog of NCBI NO: 22002966 NR Description: putative CENP-E like kinetochore protein
  misc_feature (1)..(362): Homolog of NCBI NO: 34896156 NR Description: P0701D05.33 [Oryza sativa (japonica
  misc_feature (1)..(349): Homolog of NCBI NO: 34896152 NR Description: P0701D05.31 [Oryza sativa (japonica
MDKQVKEMLQLIEEDGDSFAKKAQMYYQRRPMLVTHVENFYRMYRALAERYDNVTGELRKNIPTRLQTTGFLTSSEYGSELQRSPSPSPEPLQRSWTREQSPRAAGFDFFLSNRSNDSPPVYRKEPEDAASQSESDAKSADGEDDGIAYTLHQRVLELEDELNATNQKLQDANEKLEVLEEKSLRCHCDYKENGNGAQRTTEVSGKEGELEAEIVNLQEEADSARRRFEEALSERDGEISKLKQELAGASEKLQREKYANGVQVSELQRSVEHIRSELERVSEEKLLSENKIKELEAANAEAGKYGHELTRAAEKISEEKFALEAEILTMRQNIEDLKSRIESLAREKSLLKSWFEDLEQVVGRGRGIFAD

SEQ ID NO: 17585 - protein, 364 aa, Zea mays subsp. mays
  peptide (1)..(364): Ceres Seq. ID no. 12359931
  misc_feature (152)..(352): Pfam Name: Tropomyosin Pfam Description: Tropomyosin
  misc_feature (1)..(344): Homolog of NCBI NO: 15218702 NR Description: unknown protein; protein id: At1g03080.1
  misc_feature (1)..(342): Homolog of NCBI NO: 28416683 NR Description: At2g30500 [Arabidopsis thaliana]
  misc_feature (1)..(342): Homolog of NCBI NO: 15224515 NR Description: unknown protein; protein id: At2g30500.1
  misc_feature (1)..(341): Homolog of NCBI NO: 30697046 NR Description: contains similarity to unknown protein
  misc_feature (1)..(341): Homolog of NCBI NO: 30697043 NR Description: contains similarity to unknown protein
  misc_feature (1)..(341): Homolog of NCBI NO: 8777333 NR Description: contains similarity to unknown
  misc_feature (156)..(364): Homolog of NCBI NO: 34896152 NR Description: P0701D05.31 [Oryza sativa (japonica
  misc_feature (1)..(355): Homolog of NCBI NO: 22002966 NR Description: putative CENP-E like kinetochore protein
  misc_feature (1)..(355): Homolog of NCBI NO: 34896156 NR Description: P0701D05.33 [Oryza sativa (japonica
  misc_feature (1)..(342): Homolog of NCBI NO: 34896152 NR Description: P0701D05.31 [Oryza sativa (japonica
MLQLIEEDGDSFAKKAQMYYQRRPMLVTHVENFYRMYRALAERYDNVTGELRKNIPTRLQTTGFLTSSEYGSELQRSPSPSPEPLQRSWTREQSPRAAGFDFFLSNRSNDSPPVYRKEPEDAASQSESDAKSADGEDDGIAYTLHQRVLELEDELNATNQKLQDANEKLEVLEEKSLRCHCDYKENGNGAQRTTEVSGKEGELEAEIVNLQEEADSARRRFEEALSERDGEISKLKQELAGASEKLQREKYANGVQVSELQRSVEHIRSELERVSEEKLLSENKIKELEAANAEAGKYGHELTRAAEKISEEKFALEAEILTMRQNIEDLKSRIESLAREKSLLKSWFEDLEQVVGRGRGIFAD

SEQ ID NO: 17586 - DNA, 2165 bp, Zea mays subsp. mays
  misc_feature (1)..(2165): Ceres Seq. ID no. 12435375
  misc_feature: MA Experiment ID: 108504 Result: Up-regulated in Transcription
  misc_feature: MA Experiment 108504 PARAMETER Experiment Name: Zm_Drought_P Parameter: Age (day) Value: 8
  misc_feature: MA Experiment 108504 PARAMETER Experiment Name: Zm_Drought_P Parameter: Organism Value: Zea mays
  misc_feature: MA Experiment 108504 PARAMETER Experiment Name: Zm_Drought_P Parameter: Plant Line Value: 35A19
  misc_feature: MA Experiment 108504 PARAMETER Experiment Name: Zm_Drought_P Parameter: Timepoint (hr) Value: 12
  misc_feature: MA Experiment 108504 PARAMETER Experiment Name: Zm_Drought_P Parameter: Tissue Value: Aerial
  misc_feature: MA Experiment 108504 PARAMETER Experiment Name: Zm_Drought_P Parameter: Treatment Value: Drought vs. No Drought
  misc_feature: MA Experiment ID: 108513 Result: Up-regulated in Transcription
  misc_feature: MA Experiment 108513 PARAMETER Experiment Name: Zm_100uM_ABA_P Parameter: Age (day) Value: 8
  misc_feature: MA Experiment 108513 PARAMETER Experiment Name: Zm_100uM_ABA_P Parameter: Organism Value: Zea mays
  misc_feature: MA Experiment 108513 PARAMETER Experiment Name: Zm_100uM_ABA_P Parameter: Plant Line Value: 35A19
  misc_feature: MA Experiment 108513 PARAMETER Experiment Name: Zm_100uM_ABA_P Parameter: Timepoint (hr) Value: 6
  misc_feature: MA Experiment 108513 PARAMETER Experiment Name: Zm_100uM_ABA_P Parameter: Tissue Value: Aerial
  misc_feature: MA Experiment 108513 PARAMETER Experiment Name: Zm_100uM_ABA_P Parameter: Treatment Value: 100uM ABA vs. No Treatment
  misc_feature: MA Experiment ID: 108523 Result: Up-regulated in Transcription
  misc_feature: MA Experiment 108523 PARAMETER Experiment Name: Zm_42deg_Heat_P Parameter: Age (day) Value: 8
  misc_feature: MA Experiment 108523 PARAMETER Experiment Name: Zm_42deg_Heat_P Parameter: Organism Value: Zea mays
  misc_feature: MA Experiment 108523 PARAMETER Experiment Name: Zm_42deg_Heat_P Parameter: Plant Line Value: 35A19
  misc_feature: MA Experiment 108523 PARAMETER Experiment Name: Zm_42deg_Heat_P Parameter: Temperature (deg C) Value: 42 vs. 22
  misc_feature: MA Experiment 108523 PARAMETER Experiment Name: Zm_42deg_Heat_P Parameter: Timepoint (hr) Value: 6
  misc_feature: MA Experiment 108523 PARAMETER Experiment Name: Zm_42deg_Heat_P Parameter: Tissue Value: Aerial
  misc_feature: MA Experiment ID: 108528 Result: Down-regulated in Transcription
  misc_feature: MA Experiment 108528 PARAMETER Experiment Name: Zm_Imbibed_Seeds_P Parameter: Age (day) Value: 5 vs. 2
  misc_feature: MA Experiment 108528 PARAMETER Experiment Name: Zm_Imbibed_Seeds_P Parameter: Organism Value: Zea mays
  misc_feature: MA Experiment 108528 PARAMETER Experiment Name: Zm_Imbibed_Seeds_P Parameter: Plant Line Value: 35A19
  misc_feature: MA Experiment 108528 PARAMETER Experiment Name: Zm_Imbibed_Seeds_P Parameter: Tissue Value: Aerial vs. Embryo
  misc_feature: MA Experiment ID: 108530 Result: Down-regulated in Transcription
  misc_feature: MA Experiment 108530 PARAMETER Experiment Name: Zm_Imbibed_Seeds_P Parameter: Age (day) Value: 6 vs. 2
  misc_feature: MA Experiment 108530 PARAMETER Experiment Name: Zm_Imbibed_Seeds_P Parameter: Organism Value: Zea mays
  misc_feature: MA Experiment 108530 PARAMETER Experiment Name: Zm_Imbibed_Seeds_P Parameter: Plant Line Value: 35A19
  misc_feature: MA Experiment 108530 PARAMETER Experiment Name: Zm_Imbibed_Seeds_P Parameter: Tissue Value: Aerial vs. Embryo
  misc_feature: MA Experiment ID: 108534 Result: Down-regulated in Transcription
  misc_feature: MA Experiment 108534 PARAMETER Experiment Name: Zm_4deg_Cold_P Parameter: Age (hr) Value: 8
  misc_feature: MA Experiment 108534 PARAMETER Experiment Name: Zm_4deg_Cold_P Parameter: Organism Value: Zea mays
  misc_feature: MA Experiment 108534 PARAMETER Experiment Name: Zm_4deg_Cold_P Parameter: Plant Line Value: 35A19
  misc_feature: MA Experiment 108534 PARAMETER Experiment Name: Zm_4deg_Cold_P Parameter: Temperature (deg C) Value: 4 vs. 22
  misc_feature: MA Experiment 108534 PARAMETER Experiment Name: Zm_4deg_Cold_P Parameter: Timepoint (hr) Value: 6
  misc_feature: MA Experiment 108534 PARAMETER Experiment Name: Zm_4deg_Cold_P Parameter: Tissue Value: Aerial
  misc_feature: MA Experiment ID: 108540 Result: Up-regulated in Transcription
  misc_feature: MA Experiment 108540 PARAMETER Experiment Name: Zm_20percent_PEG_P Parameter: Age (day) Value: 8
  misc_feature: MA Experiment 108540 PARAMETER Experiment Name: Zm_20percent_PEG_P Parameter: Organism Value: Zea mays
  misc_feature: MA Experiment 108540 PARAMETER Experiment Name: Zm_20percent_PEG_P Parameter: Plant Line Value: 35A19
  misc_feature: MA Experiment 108540 PARAMETER Experiment Name: Zm_20percent_PEG_P Parameter: Timepoint (hr) Value: 6
  misc_feature: MA Experiment 108540 PARAMETER Experiment Name: Zm_20percent_PEG_P Parameter: Tissue Value: Aerial
  misc_feature: MA Experiment 108540 PARAMETER Experiment Name: Zm_20percent_PEG_P Parameter: Treatment Value: 20percent PEG vs. No Treatment
  misc_feature: MA Experiment ID: 108542 Result: Up-regulated in Transcription
  misc_feature: MA Experiment 108542 PARAMETER Experiment Name: Zm_150mM_NaCl_P Parameter: Age (day) Value: 8
  misc_feature: MA Experiment 108542 PARAMETER Experiment Name: Zm_150mM_NaCl_P Parameter: Organism Value: Zea mays
  misc_feature: MA Experiment 108542 PARAMETER Experiment Name: Zm_150mM_NaCl_P Parameter: Plant Line Value: 35A19
  misc_feature: MA Experiment 108542 PARAMETER Experiment Name: Zm_150mM_NaCl_P Parameter: Timepoint (hr) Value: 6
  misc_feature: MA Experiment 108542 PARAMETER Experiment Name: Zm_150mM_NaCl_P Parameter: Tissue Value: Aerial
  misc_feature: MA Experiment 108542 PARAMETER Experiment Name: Zm_150mM_NaCl_P Parameter: Treatment Value: 150mM NaCl vs. No Treatment
  misc_feature: MA Experiment ID: 108543 Result: Up-regulated in Transcription
  misc_feature: MA Experiment ID: 108547 Result: Down-regulated in Transcription
  misc_feature: MA Experiment 108547 PARAMETER Experiment Name: Zm_Imbibed_Seeds_P Parameter: Age (day) Value: 4 vs. 2
  misc_feature: MA Experiment 108547 PARAMETER Experiment Name: Zm_Imbibed_Seeds_P Parameter: Organism Value: Zea mays
  misc_feature: MA Experiment 108547 PARAMETER Experiment Name: Zm_Imbibed_Seeds_P Parameter: Plant Line Value: 35A19
  misc_feature: MA Experiment 108547 PARAMETER Experiment Name: Zm_Imbibed_Seeds_P Parameter: Tissue Value: Aerial vs. Embryo
  misc_feature: MA Experiment ID: 108556 Result: Up-regulated in Transcription
  misc_feature: MA Experiment 108556 PARAMETER Experiment Name: Zm_Drought_P Parameter: Age (day) Value: 9
  misc_feature: MA Experiment 108556 PARAMETER Experiment Name: Zm_Drought_P Parameter: Organism Value: Zea mays
  misc_feature: MA Experiment 108556 PARAMETER Experiment Name: Zm_Drought_P Parameter: Plant Line Value: 35A19
  misc_feature: MA Experiment 108556 PARAMETER Experiment Name: Zm_Drought_P Parameter: Timepoint (hr) Value: 24
  misc_feature: MA Experiment 108556 PARAMETER Experiment Name: Zm_Drought_P Parameter: Tissue Value: Aerial
  misc_feature: MA Experiment 108556 PARAMETER Experiment Name: Zm_Drought_P Parameter: Treatment Value: Drought vs. No Drought
  misc_feature: MA Experiment ID: 108559 Result: Up-regulated in Transcription
  misc_feature: MA Experiment 108559 PARAMETER Experiment Name: Zm_5mM_NO_P Parameter: Age (day) Value: 8
  misc_feature: MA Experiment 108559 PARAMETER Experiment Name: Zm_5mM_NO_P Parameter: Organism Value: Zea mays
  misc_feature: MA Experiment 108559 PARAMETER Experiment Name: Zm_5mM_NO_P Parameter: Plant Line Value: 35A19
  misc_feature: MA Experiment 108559 PARAMETER Experiment Name: Zm_5mM_NO_P Parameter: Timepoint (hr) Value: 12
  misc_feature: MA Experiment 108559 PARAMETER Experiment Name: Zm_5mM_NO_P Parameter: Tissue Value: Aerial
  misc_feature: MA Experiment 108559 PARAMETER Experiment Name: Zm_5mM_NO_P Parameter: Treatment Value: 5mM NO vs. No Treatment
  misc_feature: MA Experiment ID: 108599 Result: Up-regulated in Transcription
  misc_feature: MA Experiment 108599 PARAMETER Experiment Name: Zm_RT1_P Parameter: Age (day) Value: 11
  misc_feature: MA Experiment 108599 PARAMETER Experiment Name: Zm_RT1_P Parameter: Organism Value: Zea mays
  misc_feature: MA Experiment 108599 PARAMETER Experiment Name: Zm_RT1_P Parameter: Plant Line Value: rt1 mut vs. rt1 wt
  misc_feature: MA Experiment 108599 PARAMETER Experiment Name: Zm_RT1_P Parameter: Tissue Value: Roots
  misc_feature: MA Experiment ID: 108687 Result: Down-regulated in Transcription
  misc_feature: MA Experiment 108687 PARAMETER Experiment Name: Zm_Embryos-Flowers__P Parameter: Tissue Value: Embryo vs. Aerial+
  misc_feature: MA Experiment ID: 20000477 Result: Up-regulated in Transcription
  misc_feature: MA Experiment 20000477 PARAMETER Experiment Name: Zm_5mM_SA_P Parameter: Age (day) Value: 10
  misc_feature: MA Experiment 20000477 PARAMETER Experiment Name: Zm_5mM_SA_P Parameter: Organism Value: Zea mays
  misc_feature: MA Experiment 20000477 PARAMETER Experiment Name: Zm_5mM_SA_P Parameter: Plant Line Value: 35A19
  misc_feature: MA Experiment 20000477 PARAMETER Experiment Name: Zm_5mM_SA_P Parameter: Timepoint (hr) Value: 48
  misc_feature: MA Experiment 20000477 PARAMETER Experiment Name: Zm_5mM_SA_P Parameter: Tissue Value: Aerial
  misc_feature: MA Experiment 20000477 PARAMETER Experiment Name: Zm_5mM_SA_P Parameter: Treatment Value: 5mM SA vs. No Treatment
  misc_feature: MA Experiment ID: 20000478 Result: Up-regulated in Transcription
  misc_feature: MA Experiment 20000478 PARAMETER Experiment Name: Zm_5mM_SA_P Parameter: Age (day) Value: 11
  misc_feature: MA Experiment 20000478 PARAMETER Experiment Name: Zm_5mM_SA_P Parameter: Organism Value: Zea mays
  misc_feature: MA Experiment 20000478 PARAMETER Experiment Name: Zm_5mM_SA_P Parameter: Plant Line Value: 35A19
  misc_feature: MA Experiment 20000478 PARAMETER Experiment Name: Zm_5mM_SA_P Parameter: Timepoint (hr) Value: 72
  misc_feature: MA Experiment 20000478 PARAMETER Experiment Name: Zm_5mM_SA_P Parameter: Tissue Value: Aerial
  misc_feature: MA Experiment 20000478 PARAMETER Experiment Name: Zm_5mM_SA_P Parameter: Treatment Value: 5mM SA vs. No Treatment
  misc_feature: MA Experiment ID: 20000479 Result: Up-regulated in Transcription
  misc_feature: MA Experiment 20000479 PARAMETER Experiment Name: Zm_Drought_P Parameter: Age (day) Value: 10
  misc_feature: MA Experiment 20000479 PARAMETER Experiment Name: Zm_Drought_P Parameter: Organism Value: Zea mays
  misc_feature: MA Experiment 20000479 PARAMETER Experiment Name: Zm_Drought_P Parameter: Plant Line Value: 35A19
  misc_feature: MA Experiment 20000479 PARAMETER Experiment Name: Zm_Drought_P Parameter: Timepoint (hr) Value: 48
  misc_feature: MA Experiment 20000479 PARAMETER Experiment Name: Zm_Drought_P Parameter: Tissue Value: Aerial
  misc_feature: MA Experiment 20000479 PARAMETER Experiment Name: Zm_Drought_P Parameter: Treatment Value: Drought vs. No Drought
  misc_feature: MA Experiment ID: 20000488 Result: Up-regulated in Transcription
  misc_feature: MA Experiment 20000488 PARAMETER Experiment Name: Zm_50mM_NH4NO3_L_to_H_P Parameter: Organism Value: Zea mays
  misc_feature: MA Experiment 20000488 PARAMETER Experiment Name: Zm_50mM_NH4NO3_L_to_H_P Parameter: Timepoint (hr) Value: 8
  misc_feature: MA Experiment 20000488 PARAMETER Experiment Name: Zm_50mM_NH4NO3_L_to_H_P Parameter: Tissue Value: Leaves
  misc_feature: MA Experiment 20000488 PARAMETER Experiment Name: Zm_50mM_NH4NO3_L_to_H_P Parameter: Treatment Value: 50mM NH4NO3 vs. 100mM Mannitol
  misc_feature: MA Experiment ID: 20000533 Result: Up-regulated in Transcription
  misc_feature: MA Experiment 20000533 PARAMETER Experiment Name: Zm_0.001percent_MeJA_P Parameter: Age (day) Value: 11
  misc_feature: MA Experiment 20000533 PARAMETER Experiment Name: Zm_0.001percent_MeJA_P Parameter: Organism Value: Zea mays
  misc_feature: MA Experiment 20000533 PARAMETER Experiment Name: Zm_0.001percent_MeJA_P Parameter: Plant Line Value: 35A19
  misc_feature: MA Experiment 20000533 PARAMETER Experiment Name: Zm_0.001percent_MeJA_P Parameter: Timepoint (hr) Value: 72
  misc_feature: MA Experiment 20000533 PARAMETER Experiment Name: Zm_0.001percent_MeJA_P Parameter: Tissue Value: Aerial
  misc_feature: MA Experiment 20000533 PARAMETER Experiment Name: Zm_0.001percent_MeJA_P Parameter: Treatment Value: 0.001percent MeJA vs. No Treatment
  misc_feature: MA Experiment ID: 20000626 Result: Up-regulated in Transcription
  misc_feature: MA Experiment 20000626 PARAMETER Experiment Name: Zm_Herbicide-Treatments_P Parameter: Timepoint (hr) Value: 12
  misc_feature: MA Experiment 20000626 PARAMETER Experiment Name: Zm_Herbicide-Treatments_P Parameter: Tissue Value: Aerial
  misc_feature: MA Experiment 20000626 PARAMETER Experiment Name: Zm_Herbicide-Treatments_P Parameter: Treatment Value: Roundup vs. No Treatment
  misc_feature: MA Experiment ID: 20001612 Result: Up-regulated in Transcription
  misc_feature: MA Experiment 20001612 PARAMETER Experiment Name: Zm_50ppm_KNO3_L-to-H_P Parameter: Age (day) Value: 19
  misc_feature: MA Experiment 20001612 PARAMETER Experiment Name: Zm_50ppm_KNO3_L-to-H_P Parameter: Organism Value: Zea mays
  misc_feature: MA Experiment 20001612 PARAMETER Experiment Name: Zm_50ppm_KNO3_L-to-H_P Parameter: Plant Line Value: 35A19
  misc_feature: MA Experiment 20001612 PARAMETER Experiment Name: Zm_50ppm_KNO3_L-to-H_P Parameter: Timepoint (hr) Value: 8
  misc_feature: MA Experiment 20001612 PARAMETER Experiment Name: Zm_50ppm_KNO3_L-to-H_P Parameter: Tissue Value: Roots
  misc_feature: MA Experiment 20001612 PARAMETER Experiment Name: Zm_50ppm_KNO3_L-to-H_P Parameter: Treatment Value: 50ppm KNO3 vs. 50ppm KCl
gcacgagaccattacctagaacatcctaatcgaaaaatcccagcacgtctcgtctcccggccctcccacaaaaaaaaactgctcggttgctgctcctgctccgccgcgccggcatcatgtgtggcatcttagccgtgctcggttgctccgactggtctcaggcaaagagggctcgcatcctcgcctgctccagaaggttgaagcacaggggccccgactggtcgggcctttaccagcacgagggcaacttcctggcgcagcagcggctcgccgtcgtctccccgctgtccggcgaccagccgctgttcaacgaggaccgcaccgtcgtggtggtggccaatggagagatctacaaccacaagaacgtccggaagcagttcaccggcacacacaacttcagcacgggcagtgactgcgaggtcatcatgcccctgtacgagaagtacggcgagaacttcgtggacatgctggacggggtgttcgcgttcgtgctctacgacacccgcgacaggacctacgtggcggcgcgcgacgccatcggcgtcaacccgctctacatcggctggggcagtgacggttccgtctggatcgcgtccgagatgaaggcgctgaacgaggactgcgtgcgcttcgagatcttccccgccgggccacctctactccagcgccggcggcgggttccggcggtggtacaccccgcactggttccaggagcaggtgccccggacgccgtaccagccgctcgtcctcagagaggccttcgagaaggcggtcatcaagaggctcatgactgacgtcccgttcggggtcctcctctccggcagcctcgactcctcgctagtcgcctccgtcaccaagcgccacctcgtcgagaccgaggccgccgagaagttcggcaccgagctccactcctttgtcgtcggcctcgagggctcccctgacctgaaggccgcacgagaggtcgctgactacctcggaaccatccatcacgagttccacttcaccgtacaggacggcatcgacgcgatcgaggaggtgatctaccacgacgagacgtacgacgtgacgacgatccgggccagcacgcccatgttcctgatggctcgcaagatcaagtcgctgggcgtgaagatggtgctgtccggggagggctccgacgagctcctgggcggctacctctacttccacttcgcccccaacaaggaggagttccacagggagacctgccgcaaggtgaaagccctgcaccagtacgactgcctgcgcgccaacaaggccacgtcggcgtggggcctggaggtccgcgtgccgttcctcgacaaggagttcatcaacgtcgccatgggcatggaccccgaatggaaaatgtacgacaagaacctgggccgcatcgagaagtgggtcatgaggaaggcgttcgacgacgacgagcacccttacctgcccaagcatattctctaccggcagaaagaacagttcagtgacggcgttggctacaactggatcgatggccttaaatccttcactgaacagcaggtgacggatgagatgatgaacaacgccgcccagatgttcccctacaacacgcccgtcaacaaggaggcctactactaccggatgatattcgagaggctcttccctcaggactcggcgagggagacggtgccgtggggcccgagcatcgcctgcagcacgcccgcggccatcgagtgggtggagcagtggaaggcctccaacgacccctccggccgcttcatctcctcccacgactccgccgccaccgaccacaccggcggtaagccggcggtggccaacggcggcggccacggcgcggcgaacggcacggtcaacggcaaggacgtcgcagtcgcgatcgcggtctgacgagagtacgtgctcgcgcacctccctgcttctaccgggctgcatcctgcagcatgcactgtgcgagcacagccgatcagcgccaataaactggaggataagaacgactggtagctgtgtgtgtgtgtgtcgtgcgtgcccaccggccatatcccggtgccgcagcacgtgctattgttacgtgttgtactgccaccagcgtacgtgtctgtgtgtctcgatcatatctgtacgtttttagatttagaaggggaaaaaaagtatgtccgtgtctgtatgtc

SEQ ID NO: 17587 - protein, 365 aa, Zea mays subsp. mays
  peptide (1)..(365): Ceres Seq. ID no. 12435376
  misc_feature (1)..(294): Pfam Name: Asparagine synthase Pfam Description: Asparagine synthase
  misc_feature (1)..(330): Homolog of NCBI NO: 13925886 NR Description: glutamine-dependent asparagine synthetase 1
  misc_feature (1)..(330): Homolog of NCBI NO: 3821280 NR Description: asparagine synthetase type II [Phaseolus vulgaris]
  misc_feature (1)..(364): Homolog of NCBI NO: 1617002 NR Description: asparagine synthetase [Asparagus officinalis]
  misc_feature (1)..(364): Homolog of NCBI NO: 399064 NR Description: Asparagine synthase [glutamine-hydrolyzing] (AS)
  misc_feature (1)..(336): Homolog of NCBI NO: 6049841 NR Description: asparagine synthetase [Helianthus annuus]
  misc_feature (1)..(365): Homolog of NCBI NO: 1351989 NR Description: Asparagine synthetase
MTDVPFGVLLSGSLDSSLVASVTKRHLVETEAAEKFGTELHSFVVGLEGSPDLKAAREVADYLGTIHHEFHFTVQDGIDAIEEVIYHDETYDVTTIRASTPMFLMARKIKSLGVKMVLSGEGSDELLGGYLYFHFAPNKEEFHRETCRKVKALHQYDCLRANKATSAWGLEVRVPFLDKEFINVAMGMDPEWKMYDKNLGRIEKWVMRKAFDDDEHPYLPKHILYRQKEQFSDGVGYNWIDGLKSFTEQQVTDEMMNNAAQMFPYNTPVNKEAYYYRMIFERLFPQDSARETVPWGPSIACSTPAAIEWVEQWKASNDPSGRFISSHDSAATDHTGGKPAVANGGGHGAANGTVNGKDVAVAIAV

SEQ ID NO: 17588 - protein, 264 aa, Zea mays subsp. mays
  peptide (1)..(264): Ceres Seq. ID no. 12435377
  misc_feature (1)..(193): Pfam Name: Asparagine synthase Pfam Description: Asparagine synthase
  misc_feature (1)..(229): Homolog of NCBI NO: 13925886 NR Description: glutamine-dependent asparagine synthetase 1
  misc_feature (1)..(229): Homolog of NCBI NO: 3821280 NR Description: asparagine synthetase type II [Phaseolus vulgaris]
  misc_feature (1)..(263): Homolog of NCBI NO: 1617002 NR Description: asparagine synthetase [Asparagus officinalis]
  misc_feature (1)..(263): Homolog of NCBI NO: 399064 NR Description: Asparagine synthase [glutamine-hydrolyzing] (AS)
  misc_feature (1)..(235): Homolog of NCBI NO: 6049841 NR Description: asparagine synthetase [Helianthus annuus]
  misc_feature (1)..(264): Homolog of NCBI NO: 1351989 NR Description: Asparagine synthetase
MFLMARKIKSLGVKMVLSGEGSDELLGGYLYFHFAPNKEEFHRETCRKVKALHQYDCLRANKATSAWGLEVRVPFLDKEFINVAMGMDPEWKMYDKNLGRIEKWVMRKAFDDDEHPYLPKHILYRQKEQFSDGVGYNWIDGLKSFTEQQVTDEMMNNAAQMFPYNTPVNKEAYYYRMIFERLFPQDSARETVPWGPSIACSTPAAIEWVEQWKASNDPSGRFISSHDSAATDHTGGKPAVANGGGHGAANGTVNGKDVAVAIAV

SEQ ID NO: 17589 - protein, 261 aa, Zea mays subsp. mays
  peptide (1)..(261): Ceres Seq. ID no. 12435378
  misc_feature (1)..(190): Pfam Name: Asparagine synthase Pfam Description: Asparagine synthase
  misc_feature (1)..(226): Homolog of NCBI NO: 13925886 NR Description: glutamine-dependent asparagine synthetase 1
  misc_feature (1)..(226): Homolog of NCBI NO: 3821280 NR Description: asparagine synthetase type II [Phaseolus vulgaris]
  misc_feature (1)..(260): Homolog of NCBI NO: 1617002 NR Description: asparagine synthetase [Asparagus officinalis]
  misc_feature (1)..(260): Homolog of NCBI NO: 399064 NR Description: Asparagine synthase [glutamine-hydrolyzing] (AS)
  misc_feature (1)..(232): Homolog of NCBI NO: 6049841 NR Description: asparagine synthetase [Helianthus annuus]
  misc_feature (1)..(261): Homolog of NCBI NO: 1351989 NR Description: Asparagine synthetase
MARKIKSLGVKMVLSGEGSDELLGGYLYFHFAPNKEEFHRETCRKVKALHQYDCLRANKATSAWGLEVRVPFLDKEFINVAMGMDPEWKMYDKNLGRIEKWVMRKAFDDDEHPYLPKHILYRQKEQFSDGVGYNWIDGLKSFTEQQVTDEMMNNAAQMFPYNTPVNKEAYYYRMIFERLFPQDSARETVPWGPSIACSTPAAIEWVEQWKASNDPSGRFISSHDSAATDHTGGKPAVANGGGHGAANGTVNGKDVAVAIAV

SEQ ID NO: 17590 - DNA, 898 bp, Zea mays subsp. mays
  misc_feature (1)..(898): Ceres Seq. ID no. 12377943
  misc_feature: MA Experiment ID: 108535 Result: Up-regulated in Transcription
  misc_feature: MA Experiment 108535 PARAMETER Experiment Name: Zm_Meristem_P Parameter: Age (day) Value: 8
  misc_feature: MA Experiment 108535 PARAMETER Experiment Name: Zm_Meristem_P Parameter: Organism Value: Zea mays
  misc_feature: MA Experiment 108535 PARAMETER Experiment Name: Zm_Meristem_P Parameter: Plant Line Value: 35A19
  misc_feature: MA Experiment 108535 PARAMETER Experiment Name: Zm_Meristem_P Parameter: Tissue Value: Root Meristem vs. Above Root Meristem
  misc_feature: MA Experiment ID: 108543 Result: Down-regulated in Transcription
  misc_feature: MA Experiment ID: 108544 Result: Down-regulated in Transcription
  misc_feature: MA Experiment ID: 108556 Result: Down-regulated in Transcription
  misc_feature: MA Experiment 108556 PARAMETER Experiment Name: Zm_Drought_P Parameter: Age (day) Value: 9
  misc_feature: MA Experiment 108556 PARAMETER Experiment Name: Zm_Drought_P Parameter: Organism Value: Zea mays
  misc_feature: MA Experiment 108556 PARAMETER Experiment Name: Zm_Drought_P Parameter: Plant Line Value: 35A19
  misc_feature: MA Experiment 108556 PARAMETER Experiment Name: Zm_Drought_P Parameter: Timepoint (hr) Value: 24
  misc_feature: MA Experiment 108556 PARAMETER Experiment Name: Zm_Drought_P Parameter: Tissue Value: Aerial
  misc_feature: MA Experiment 108556 PARAMETER Experiment Name: Zm_Drought_P Parameter: Treatment Value: Drought vs. No Drought
  misc_feature: MA Experiment ID: 20000108 Result: Up-regulated in Transcription
  misc_feature: MA Experiment 20000108 PARAMETER Experiment Name: Zm_Root-Tips_P Parameter: Age (day) Value: 12
  misc_feature: MA Experiment 20000108 PARAMETER Experiment Name: Zm_Root-Tips_P Parameter: Organism Value: Zea mays
  misc_feature: MA Experiment 20000108 PARAMETER Experiment Name: Zm_Root-Tips_P Parameter: Tissue Value: Root tips vs. Root mid region    35
  misc_feature: MA Experiment 20000108 PARAMETER Experiment Name: Zm_Root-Tips_P Parameter: Tissue Value: Root tips vs. Root mid region   Sequence Listing-Misc Features (4)
gcacgagaccattacctagaacatcctaatcgaaaactacaaggaaaatgaggattggggctgcagctagcaagaagaatacagatgctcagcagacatatgcaactaatggtgcataccagagttctcaaggcaattgttcagagaatgatcccaacaatacaacagtctttgtgggtgggttagattccaatgtagacgaggagtatctaagggaaatttttactccgtacggagaaatttcctatgtgaagattcctgtaggcaagcattgtggatttgttcaatttaccagcaggtcatgtgctgaggaagccatccaaatgctgaatgggagtcagattggtggacagaaagctcggctttcatggggccgtagtactcaaaacagacaggcttctcagcatgatgccaacagccagtataatgggaacaactattatcgataccaacagccgggtaatgaaggttatagctatggtgcacccaatgcacaagacccaagcattcaaaactactatggataccctggttatggtaactatgagcagcagtcaacacaggaacagcagcagcagcagcctccaccagcacaggagcagcctccaccggcaccacagtaacaatcatcgtggtgacgattgcttgggcacttctggaatgctatcagattagagggactacagtcagagcagtgccgtgccgaatgagacgtcctgaagatatggagggcatatagtctcatgggtgttcttgggccggtgttaatctacgatgacactcctgatgtctcttttgtttgtcattgagatcttgacggctgaagtatgcaccgttgaaattgatgtattcgtcgtcgtcggattgtttatttgctcggaaccattttttgcacttt

SEQ ID NO: 17591 - protein, 191 aa, Zea mays subsp. mays
  peptide (1)..(191): Ceres Seq. ID no. 12377944
  misc_feature (41)..(106): Pfam Name: RNA recognition motif. (a.k.a. RRM, RBD, or RNP domain) Pfam Description: RNA recognition motif. (a.k.a. RRM, RBD, or RNP
  misc_feature (1)..(185): Homolog of NCBI NO: 15221071 NR Description: RNA binding protein 45 (RBP45), putative
  misc_feature (1)..(177): Homolog of NCBI NO: 18416906 NR Description: RNA binding protein 45 (RBP45), putative
  misc_feature (1)..(177): Homolog of NCBI NO: 7485342 NR Description: hypothetical protein F10M23.340 - Arabidopsis
  misc_feature (1)..(180): Homolog of NCBI NO: 39545835 NR Description: OSJNBb0060E08.6 [Oryza sativa (japonica
  misc_feature (1)..(168): Homolog of NCBI NO: 9663767 NR Description: RNA Binding Protein 45 [Nicotiana plumbaginifolia]
  misc_feature (1)..(178): Homolog of NCBI NO: 40253807 NR Description: putative RNA Binding Protein 45
  misc_feature (1)..(177): Homolog of NCBI NO: 30524689 NR Description: salt tolerance protein 6 [Beta vulgaris]
  misc_feature (1)..(177): Homolog of NCBI NO: 34896988 NR Description: putative RNA binding protein [Oryza sativa]
  misc_feature (1)..(187): Homolog of NCBI NO: 34901884 NR Description: putative RNA Binding Protein 45
  misc_feature (1)..(187): Homolog of NCBI NO: 34395214 NR Description: putative RNA Binding Protein
MRIGAAASKKNTDAQQTYATNGAYQSSQGNCSENDPNNTTVFVGGLDSNVDEEYLREIFTPYGEISYVKIPVGKHCGFVQFTSRSCAEEAIQMLNGSQIGGQKARLSWGRSTQNRQASQHDANSQYNGNNYYRYQQPGNEGYSYGAPNAQDPSIQNYYGYPGYGNYEQQSTQEQQQQQPPPAQEQPPPAPQ

SEQ ID NO: 17592 - protein, 114 aa, Zea mays subsp. mays
  peptide (1)..(114): Ceres Seq. ID no. 12377945
MGVRLVDRKLGFHGAVVLKTDRLLSMMPTASIMGTTIIDTNSRVMKVIAMVHPMHKTQAFKTTMDTLVMVTMSSSQHRNSSSSSLHQHRSSLHRHHSNNHRGDDCLGTSGMLSD

SEQ ID NO: 17593 - protein, 99 aa, Zea mays subsp. mays
  peptide (1)..(99): Ceres Seq. ID no. 12377946
  misc_feature (1)..(85): Homolog of NCBI NO: 18416906 NR Description: RNA binding protein 45 (RBP45), putative
  misc_feature (1)..(85): Homolog of NCBI NO: 7485342 NR Description: hypothetical protein F10M23.340 - Arabidopsis
  misc_feature (1)..(88): Homolog of NCBI NO: 39545835 NR Description: OSJNBb0060E08.6 [Oryza sativa (japonica
  misc_feature (1)..(76): Homolog of NCBI NO: 9663767 NR Description: RNA Binding Protein 45 [Nicotiana plumbaginifolia]
  misc_feature (1)..(86): Homolog of NCBI NO: 40253807 NR Description: putative RNA Binding Protein 45
  misc_feature (1)..(85): Homolog of NCBI NO: 30524689 NR Description: salt tolerance protein 6 [Beta vulgaris]
  misc_feature (1)..(85): Homolog of NCBI NO: 34896988 NR Description: putative RNA binding protein [Oryza sativa]
  misc_feature (1)..(95): Homolog of NCBI NO: 34901884 NR Description: putative RNA Binding Protein 45
  misc_feature (1)..(95): Homolog of NCBI NO: 34395214 NR Description: putative RNA Binding Protein
  misc_feature (1)..(93): Homolog of NCBI NO: 15221071 NR Description: RNA binding protein 45 (RBP45), putative
MLNGSQIGGQKARLSWGRSTQNRQASQHDANSQYNGNNYYRYQQPGNEGYSYGAPNAQDPSIQNYYGYPGYGNYEQQSTQEQQQQQPPPAQEQPPPAPQ

SEQ ID NO: 17594 - DNA, 1484 bp, Zea mays subsp. mays
  misc_feature (1)..(1484): Ceres Seq. ID no. 12578861
  misc_feature: MA Experiment ID: 108535 Result: Up-regulated in Transcription
  misc_feature: MA Experiment 108535 PARAMETER Experiment Name: Zm_Meristem_P Parameter: Age (day) Value: 8
  misc_feature: MA Experiment 108535 PARAMETER Experiment Name: Zm_Meristem_P Parameter: Organism Value: Zea mays
  misc_feature: MA Experiment 108535 PARAMETER Experiment Name: Zm_Meristem_P Parameter: Plant Line Value: 35A19
  misc_feature: MA Experiment 108535 PARAMETER Experiment Name: Zm_Meristem_P Parameter: Tissue Value: Root Meristem vs. Above Root Meristem
  misc_feature: MA Experiment ID: 108689 Result: Down-regulated in Transcription
  misc_feature: MA Experiment 108689 PARAMETER Experiment Name: Zm_Drought_Roots_P Parameter: Age (day) Value: 9
  misc_feature: MA Experiment 108689 PARAMETER Experiment Name: Zm_Drought_Roots_P Parameter: Organism Value: Zea mays
  misc_feature: MA Experiment 108689 PARAMETER Experiment Name: Zm_Drought_Roots_P Parameter: Plant Line Value: 35A19
  misc_feature: MA Experiment 108689 PARAMETER Experiment Name: Zm_Drought_Roots_P Parameter: Timepoint (hr) Value: 24
  misc_feature: MA Experiment 108689 PARAMETER Experiment Name: Zm_Drought_Roots_P Parameter: Tissue Value: Roots
  misc_feature: MA Experiment 108689 PARAMETER Experiment Name: Zm_Drought_Roots_P Parameter: Treatment Value: Drought vs. No Drought
  misc_feature: MA Experiment ID: 20000487 Result: Up-regulated in Transcription
  misc_feature: MA Experiment 20000487 PARAMETER Experiment Name: Zm_50mM_NH4NO3_L_to_H_P Parameter: Organism Value: Zea mays
  misc_feature: MA Experiment 20000487 PARAMETER Experiment Name: Zm_50mM_NH4NO3_L_to_H_P Parameter: Timepoint (hr) Value: 4
  misc_feature: MA Experiment 20000487 PARAMETER Experiment Name: Zm_50mM_NH4NO3_L_to_H_P Parameter: Tissue Value: Leaves
  misc_feature: MA Experiment 20000487 PARAMETER Experiment Name: Zm_50mM_NH4NO3_L_to_H_P Parameter: Treatment Value: 50mM NH4NO3 vs. 100mM Mannitol
  misc_feature: MA Experiment ID: 20000488 Result: Up-regulated in Transcription
  misc_feature: MA Experiment 20000488 PARAMETER Experiment Name: Zm_50mM_NH4NO3_L_to_H_P Parameter: Organism Value: Zea mays
  misc_feature: MA Experiment 20000488 PARAMETER Experiment Name: Zm_50mM_NH4NO3_L_to_H_P Parameter: Timepoint (hr) Value: 8
  misc_feature: MA Experiment 20000488 PARAMETER Experiment Name: Zm_50mM_NH4NO3_L_to_H_P Parameter: Tissue Value: Leaves
  misc_feature: MA Experiment 20000488 PARAMETER Experiment Name: Zm_50mM_NH4NO3_L_to_H_P Parameter: Treatment Value: 50mM NH4NO3 vs. 100mM Mannitol
  misc_feature: MA Experiment ID: 20000535 Result: Up-regulated in Transcription
  misc_feature: MA Experiment 20000535 PARAMETER Experiment Name: Zm_Hybrid_Seed_Dev_P Parameter: DAP Value: 30 vs. 12
  misc_feature: MA Experiment 20000535 PARAMETER Experiment Name: Zm_Hybrid_Seed_Dev_P Parameter: Organism Value: Zea mays
  misc_feature: MA Experiment 20000535 PARAMETER Experiment Name: Zm_Hybrid_Seed_Dev_P Parameter: Plant Line Value: 35A19
  misc_feature: MA Experiment 20000535 PARAMETER Experiment Name: Zm_Hybrid_Seed_Dev_P Parameter: Tissue Value: Embryo vs. Unfert Floret
gcacgagaccattacctagaacatcctaatcgaaaagacctcgcatccggcccgattcgactagggttttagcactcccagtcccggctcccgccgtcgcctcgacgcttcccccctcttcctccgccgccaacccagcgagagagctcccagtccgcgaagacatggcggggaagaagcgcaagtccggctccgagaagccgacgaagcaccgcctcccgctgggagccgatgccgacgctgtcgccgaagcctcgaagcgccgccgatcgggcgccaccaagcagcaccaggcggacgaggaagcgtccatcccgccctctctcagcgccaagatcctccgcgaggcgcgcaagcagcaggaagaggagatgcgcgccgactccagcgacgaacagcgaccctcagccgtcgaggcgaccgcggggccgtccacgtcgtcctcgtttcccgtccccgccgccgacggcgagaatgagggggacgacgtcgatgagttcgacgggtttgacgcgcctgagcgagtacgatggcggtgaggtggagatcaacgaggaggacgagaaggccctcgctgctttcatgtcaaaggacaaagctgccgagcgcacccttggcgatatcattctccagaagatcagggagaaggacgccgaggtcgcaactggtgaaggacgacctcgtgtaaaattggacaacagcattattgaactttataaagaggttgggaagttcttaagccggtacacgagtggggctggcttctcctccccctcttaccaagtcctcctcgggttagggttccttagggttttgtggaggggcgatggcggcggctgatgtggagtaccgttgcttcgtcggcgggcttgcctgggccaccagcaacgagtcgctggagaatgccttcgcctcctacggcgagatcctcgactccaaggtcatcaccgaccgggagacggggaggtctcgcggcttcggcttcgttaccttctcctccgagaactccatgctcgacgctatcgagaacatgaacggcaaggagctcgacggccgtaacatcaccgttaaccaggcccagtcccgtggcggtggcggtggcggcggtggccgcggcggtcgcggcggcggcggctatggtggcgggcgccgtgacggcggttatggcggcggtggcggctacggcggtcggcgcgagggtggtggcggcggctacggaggcggtggcggctacggcggtcggcgcgagggtggtggtggcggctacggcggcggcggcggcggctggagggactgatgtgtgggcccatcctggcttcggccgagttatcttatctatctatagtatcgtgttaccgttcgcttctgtcaccgtgttagtgtccgttctacctttggattaggtgttggtacccctgttgttccctttgtttgctcccgctatgaaacgagacgagagaagaatgagcaaggtttttgttcgc

SEQ ID NO: 17595 - protein, 202 aa, Zea mays subsp. mays
  peptide (1)..(202): Ceres Seq. ID no. 12578862
  misc_feature (117)..(175): Pfam Name: Bystin Pfam Description: Bystin
  misc_feature (1)..(90): Homolog of NCBI NO: 31414574 NR Description: large tegument protein [Cercopithecine
  misc_feature (1)..(80): Homolog of NCBI NO: 31414574 NR Description: large tegument protein [Cercopithecine
MPTLSPKPRSAADRAPPSSTRRTRKRPSRPLSAPRSSARRASSRKRRCAPTPATNSDPQPSRRPRGRPRRPRFPSPPPTARMRGTTSMSSTGLTRLSEYDGGEVEINEEDEKALAAFMSKDKAAERTLGDIILQKIREKDAEVATGEGRPRVKLDNSIIELYKEVGKFLSRYTSGAGFSSPSYQVLLGLGFLRVLWRGDGGG

SEQ ID NO: 17596 - protein, 156 aa, Zea mays subsp. mays
  peptide (1)..(156): Ceres Seq. ID no. 12578863
  misc_feature (10)..(81): Pfam Name: RNA recognition motif. (a.k.a. RRM, RBD, or RNP domain) Pfam Description: RNA recognition motif. (a.k.a. RRM, RBD, or RNP
  misc_feature (1)..(154): Homolog of NCBI NO: 1346180 NR Description: Glycine-rich RNA-binding protein GRP1A
  misc_feature (4)..(155): Homolog of NCBI NO: 2119042 NR Description: glycine-rich RNA-binding protein RGP-1a - wood
  misc_feature (1)..(155): Homolog of NCBI NO: 18076086 NR Description: glycine-rich RNA-binding protein [Ricinus
  misc_feature (1)..(154): Homolog of NCBI NO: 7439985 NR Description: glycine-rich RNA-binding protein - rice
  misc_feature (1)..(156): Homolog of NCBI NO: 2331133 NR Description: glycine-rich protein [Oryza sativa]
  misc_feature (1)..(156): Homolog of NCBI NO: 2331131 NR Description: glycine-rich protein [Oryza sativa]
  misc_feature (4)..(155): Homolog of NCBI NO: 544426 NR Description: Glycine-rich RNA-binding protein
  misc_feature (1)..(152): Homolog of NCBI NO: 544423 NR Description: Glycine-rich RNA-binding protein 2
  misc_feature (1)..(152): Homolog of NCBI NO: 10799202 NR Description: glycine-rich RNA-binding protein [Sorghum bicolor]
  misc_feature (1)..(156): Homolog of NCBI NO: 112994 NR Description: Glycine-rich RNA-binding, abscisic acid-inducible
MAAADVEYRCFVGGLAWATSNESLENAFASYGEILDSKVITDRETGRSRGFGFVTFSSENSMLDAIENMNGKELDGRNITVNQAQSRGGGGGGGGRGGRGGGGYGGGRRDGGYGGGGGYGGRREGGGGGYGGGGGYGGRREGGGGGYGGGGGGWRD

SEQ ID NO: 17597 - protein, 124 aa, Zea mays subsp. mays
  peptide (1)..(124): Ceres Seq. ID no. 12578864
  misc_feature (1)..(119): Homolog of NCBI NO: 422617 NR Description: nucleolin - African clawed frog
MAGKKRKSGSEKPTKHRLPLGADADAVAEASKRRRSGATKQHQADEEASIPPSLSAKILREARKQQEEEMRADSSDEQRPSAVEATAGPSTSSSFPVPAADGENEGDDVDEFDGFDAPERVRWR

SEQ ID NO: 17598 - DNA, 1833 bp, Zea mays subsp. mays
  misc_feature (1)..(1833): Ceres Seq. ID no. 12379198
  misc_feature: MA Experiment ID: 108523 Result: Down-regulated in Transcription
  misc_feature: MA Experiment 108523 PARAMETER Experiment Name: Zm_42deg_Heat_P Parameter: Age (day) Value: 8
  misc_feature: MA Experiment 108523 PARAMETER Experiment Name: Zm_42deg_Heat_P Parameter: Organism Value: Zea mays
  misc_feature: MA Experiment 108523 PARAMETER Experiment Name: Zm_42deg_Heat_P Parameter: Plant Line Value: 35A19
  misc_feature: MA Experiment 108523 PARAMETER Experiment Name: Zm_42deg_Heat_P Parameter: Temperature (deg C) Value: 42 vs. 22
  misc_feature: MA Experiment 108523 PARAMETER Experiment Name: Zm_42deg_Heat_P Parameter: Timepoint (hr) Value: 6
  misc_feature: MA Experiment 108523 PARAMETER Experiment Name: Zm_42deg_Heat_P Parameter: Tissue Value: Aerial
  misc_feature: MA Experiment ID: 108528 Result: Up-regulated in Transcription
  misc_feature: MA Experiment 108528 PARAMETER Experiment Name: Zm_Imbibed_Seeds_P Parameter: Age (day) Value: 5 vs. 2
  misc_feature: MA Experiment 108528 PARAMETER Experiment Name: Zm_Imbibed_Seeds_P Parameter: Organism Value: Zea mays
  misc_feature: MA Experiment 108528 PARAMETER Experiment Name: Zm_Imbibed_Seeds_P Parameter: Plant Line Value: 35A19
  misc_feature: MA Experiment 108528 PARAMETER Experiment Name: Zm_Imbibed_Seeds_P Parameter: Tissue Value: Aerial vs. Embryo
  misc_feature: MA Experiment ID: 108530 Result: Up-regulated in Transcription
  misc_feature: MA Experiment 108530 PARAMETER Experiment Name: Zm_Imbibed_Seeds_P Parameter: Age (day) Value: 6 vs. 2
  misc_feature: MA Experiment 108530 PARAMETER Experiment Name: Zm_Imbibed_Seeds_P Parameter: Organism Value: Zea mays
  misc_feature: MA Experiment 108530 PARAMETER Experiment Name: Zm_Imbibed_Seeds_P Parameter: Plant Line Value: 35A19
  misc_feature: MA Experiment 108530 PARAMETER Experiment Name: Zm_Imbibed_Seeds_P Parameter: Tissue Value: Aerial vs. Embryo
  misc_feature: MA Experiment ID: 108547 Result: Up-regulated in Transcription
  misc_feature: MA Experiment 108547 PARAMETER Experiment Name: Zm_Imbibed_Seeds_P Parameter: Age (day) Value: 4 vs. 2
  misc_feature: MA Experiment 108547 PARAMETER Experiment Name: Zm_Imbibed_Seeds_P Parameter: Organism Value: Zea mays
  misc_feature: MA Experiment 108547 PARAMETER Experiment Name: Zm_Imbibed_Seeds_P Parameter: Plant Line Value: 35A19
  misc_feature: MA Experiment 108547 PARAMETER Experiment Name: Zm_Imbibed_Seeds_P Parameter: Tissue Value: Aerial vs. Embryo
  misc_feature: MA Experiment ID: 108556 Result: Down-regulated in Transcription
  misc_feature: MA Experiment 108556 PARAMETER Experiment Name: Zm_Drought_P Parameter: Age (day) Value: 9
  misc_feature: MA Experiment 108556 PARAMETER Experiment Name: Zm_Drought_P Parameter: Organism Value: Zea mays
  misc_feature: MA Experiment 108556 PARAMETER Experiment Name: Zm_Drought_P Parameter: Plant Line Value: 35A19
  misc_feature: MA Experiment 108556 PARAMETER Experiment Name: Zm_Drought_P Parameter: Timepoint (hr) Value: 24
  misc_feature: MA Experiment 108556 PARAMETER Experiment Name: Zm_Drought_P Parameter: Tissue Value: Aerial
  misc_feature: MA Experiment 108556 PARAMETER Experiment Name: Zm_Drought_P Parameter: Treatment Value: Drought vs. No Drought
  misc_feature: MA Experiment ID: 108559 Result: Down-regulated in Transcription
  misc_feature: MA Experiment 108559 PARAMETER Experiment Name: Zm_5mM_NO_P Parameter: Age (day) Value: 8
  misc_feature: MA Experiment 108559 PARAMETER Experiment Name: Zm_5mM_NO_P Parameter: Organism Value: Zea mays
  misc_feature: MA Experiment 108559 PARAMETER Experiment Name: Zm_5mM_NO_P Parameter: Plant Line Value: 35A19
  misc_feature: MA Experiment 108559 PARAMETER Experiment Name: Zm_5mM_NO_P Parameter: Timepoint (hr) Value: 12
  misc_feature: MA Experiment 108559 PARAMETER Experiment Name: Zm_5mM_NO_P Parameter: Tissue Value: Aerial
  misc_feature: MA Experiment 108559 PARAMETER Experiment Name: Zm_5mM_NO_P Parameter: Treatment Value: 5mM NO vs. No Treatment
  misc_feature: MA Experiment ID: 108687 Result: Down-regulated in Transcription
  misc_feature: MA Experiment 108687 PARAMETER Experiment Name: Zm_Embryos-Flowers__P Parameter: Tissue Value: Embryo vs. Aerial+
  misc_feature: MA Experiment ID: 108688 Result: Down-regulated in Transcription
  misc_feature: MA Experiment 108688 PARAMETER Experiment Name: Zm_Embryos-Flowers__P Parameter: Tissue Value: Immature Flowers vs. Aerial+
  misc_feature: MA Experiment ID: 20000480 Result: Down-regulated in Transcription
  misc_feature: MA Experiment 20000480 PARAMETER Experiment Name: Zm_Drought_P Parameter: Age (day) Value: 11
  misc_feature: MA Experiment 20000480 PARAMETER Experiment Name: Zm_Drought_P Parameter: Organism Value: Zea mays
  misc_feature: MA Experiment 20000480 PARAMETER Experiment Name: Zm_Drought_P Parameter: Plant Line Value: 35A19
  misc_feature: MA Experiment 20000480 PARAMETER Experiment Name: Zm_Drought_P Parameter: Timepoint (hr) Value: 72
  misc_feature: MA Experiment 20000480 PARAMETER Experiment Name: Zm_Drought_P Parameter: Tissue Value: Aerial
  misc_feature: MA Experiment 20000480 PARAMETER Experiment Name: Zm_Drought_P Parameter: Treatment Value: Drought vs. No Drought
  misc_feature: MA Experiment ID: 20000492 Result: Up-regulated in Transcription
  misc_feature: MA Experiment 20000492 PARAMETER Experiment Name: Zm_Hybrid_Seed_Dev_P Parameter: DAP Value: 12
  misc_feature: MA Experiment 20000492 PARAMETER Experiment Name: Zm_Hybrid_Seed_Dev_P Parameter: Organism Value: Zea mays
  misc_feature: MA Experiment 20000492 PARAMETER Experiment Name: Zm_Hybrid_Seed_Dev_P Parameter: Plant Line Value: 35A19
  misc_feature: MA Experiment 20000492 PARAMETER Experiment Name: Zm_Hybrid_Seed_Dev_P Parameter: Tissue Value: Fert Kernel vs. Unfert Floret
acgacaaatcgacgatcgccgcttctcttggccattgtagagggagagagagagcgcgagcgacctaggtcagtcggtttcggttttgggcgtcagcttcagctatccgcgaccgcgacgatgggtctgcgcgtggccgccaccgcgccagctccggccggcgtgcgcgtgctcggcaggggcgccgcgcgcgtgacgccgcgaccgtgggcggctgtcggcggcaggagacgcttctccgtgcggatgtccgtcgcgaccaccgaggccaccaccaccatcgccgtgggcgcctcggaggaccaggcgctggaggctaggaactccaagacggtggtggcggtcatcctcggcggtggcgccgggaccaggctcttcccgcttaccagacgcagggccaagcccgcggtgccaattggcggcgcgtacaggctcatcgacgtgccgatgagcaactgcataaacagcgggatcaacaaggtctacatcctcacgcagttcaactcgcaatccctcaatcgccacctctccagagcctacgatttcagcaatggcgtggccatcggagacggattcgtcgaggttctagcagcaacccagaggcctggaacggaggggaaaaggtggtttcagggtactgctgatgcagttcggcagttcgactggcttttcgatgatgcaaaatctaaagacattgaagatgtgctgattctttctggtgaccatctctaccgtatggactacatggactttgttcagagtcatcggcaaagaggtgcaggcatcagcatctgttgtttgccaattgatggcagccgggcatctgattttggcctaatgaagatagacgacactggaagggtaatttcattcagtgagaaaccaaaaggagacgaattaaaggcaatgcaagttgacaccacagtgcttggcttatcaaaggaggaagcagaaaacaaaccttatatagcttcaatggggatctatatttttaagaaagacatactcctaaaccttctaagatggcgttttcccactgcaaatgattttggttctgaaataattcctgcttcagcaaaagaaatcgatgtaaaggcttatcttttcaatgattactgggaagatattggaactattaagtccttctttgaggcaaaccttgctcttgctgaacagcctccaaggttcagtttctacgatgctgacaaaccaatgtatacatcacggagaaacctaccaccatctatggtcaacaatagtaagatcactgattcaatcatttcccacggatgtttcttggataactgcaggatagaacatagtgttgttggagttcgttctcggataggctccaatgtgcacctcaaggatactgtaatgcttggcgctgattattatgaaactgccgtggaaagaggagagctgcttgcagaaggaaaagttcctattgggattggagagaatacaacgattcaaaagtgtatcatagacaagaatgcgaggatagggaagaaagtggtaatctccaactctgaaggtgtagatgaagctgatagaacttccgaaggcttctacattcgatctggcatcactgtcgtactgaagaacgcgataattgctgatggattggtcatatgagctgaaaaggtctcacaggacgggtatttgccgcacaaaatatcaataggagttctttgttagttttacaataagatgctgtatagcagtcaacaggttattcttgtctatacaagatacctttgtctacaaatcttgtctcaccatgttgtattcgactcaaacaatgttgcagtcatggacattgtccgttcc

SEQ ID NO: 17599 - protein, 545 aa, Zea mays subsp. mays
  peptide (1)..(545): Ceres Seq. ID no. 12379199
  misc_feature (113)..(392): Pfam Name: Nucleotidyl transferase Pfam Description: Nucleotidyl transferase
  misc_feature (492)..(545): Homolog of NCBI NO: 13487711 NR Description: ADP-glucose pyrophosphorylase large subunit
  misc_feature (77)..(270): Homolog of NCBI NO: 13487711 NR Description: ADP-glucose pyrophosphorylase large subunit
  misc_feature (269)..(491): Homolog of NCBI NO: 13487711 NR Description: ADP-glucose pyrophosphorylase large subunit
  misc_feature (78)..(545): Homolog of NCBI NO: 1707932 NR Description: Glucose-1-phosphate adenylyltransferase large
  misc_feature (81)..(545): Homolog of NCBI NO: 13487783 NR Description: ADP-glucose pyrophosphorylase [Cicer arietinum]
  misc_feature (76)..(545): Homolog of NCBI NO: 4586350 NR Description: glucose-1-phosphate adenylyltransferase
  misc_feature (76)..(545): Homolog of NCBI NO: 22347636 NR Description: ADP-glucose pyrophosphorylase large subunit
  misc_feature (76)..(545): Homolog of NCBI NO: 15239684 NR Description: Glucose-1-phosphate adenylyltransferase
  misc_feature (78)..(545): Homolog of NCBI NO: 7434883 NR Description: glucose-1-phosphate adenylyltransferase (EC
  misc_feature (41)..(545): Homolog of NCBI NO: 7434885 NR Description: glucose-1-phosphate adenylyltransferase (EC
TTNRRSPLLLAIVEGERERERPRSVGFGFGRQLQLSATATMGLRVAATAPAPAGVRVLGRGAARVTPRPWAAVGGRRRFSVRMSVATTEATTTIAVGASEDQALEARNSKTVVAVILGGGAGTRLFPLTRRRAKPAVPIGGAYRLIDVPMSNCINSGINKVYILTQFNSQSLNRHLSRAYDFSNGVAIGDGFVEVLAATQRPGTEGKRWFQGTADAVRQFDWLFDDAKSKDIEDVLILSGDHLYRMDYMDFVQSHRQRGAGISICCLPIDGSRASDFGLMKIDDTGRVISFSEKPKGDELKAMQVDTTVLGLSKEEAENKPYIASMGIYIFKKDILLNLLRWRFPTANDFGSEIIPASAKEIDVKAYLFNDYWEDIGTIKSFFEANLALAEQPPRFSFYDADKPMYTSRRNLPPSMVNNSKITDSIISHGCFLDNCRIEHSVVGVRSRIGSNVHLKDTVMLGADYYETAVERGELLAEGKVPIGIGENTTIQKCIIDKNARIGKKVVISNSEGVDEADRTSEGFYIRSGITVVLKNAIIADGLVI

SEQ ID NO: 17600 - protein, 505 aa, Zea mays subsp. mays
  peptide (1)..(505): Ceres Seq. ID no. 12379200
  misc_feature (73)..(352): Pfam Name: Nucleotidyl transferase Pfam Description: Nucleotidyl transferase
  misc_feature (452)..(505): Homolog of NCBI NO: 13487711 NR Description: ADP-glucose pyrophosphorylase large subunit
  misc_feature (37)..(230): Homolog of NCBI NO: 13487711 NR Description: ADP-glucose pyrophosphorylase large subunit
  misc_feature (229)..(451): Homolog of NCBI NO: 13487711 NR Description: ADP-glucose pyrophosphorylase large subunit
  misc_feature (38)..(505): Homolog of NCBI NO: 1707932 NR Description: Glucose-1-phosphate adenylyltransferase large
  misc_feature (41)..(505): Homolog of NCBI NO: 13487783 NR Description: ADP-glucose pyrophosphorylase [Cicer arietinum]
  misc_feature (36)..(505): Homolog of NCBI NO: 4586350 NR Description: glucose-1-phosphate adenylyltransferase
  misc_feature (36)..(505): Homolog of NCBI NO: 22347636 NR Description: ADP-glucose pyrophosphorylase large subunit
  misc_feature (36)..(505): Homolog of NCBI NO: 15239684 NR Description: Glucose-1-phosphate adenylyltransferase
  misc_feature (38)..(505): Homolog of NCBI NO: 7434883 NR Description: glucose-1-phosphate adenylyltransferase (EC
  misc_feature (1)..(505): Homolog of NCBI NO: 7434885 NR Description: glucose-1-phosphate adenylyltransferase (EC
MGLRVAATAPAPAGVRVLGRGAARVTPRPWAAVGGRRRFSVRMSVATTEATTTIAVGASEDQALEARNSKTVVAVILGGGAGTRLFPLTRRRAKPAVPIGGAYRLIDVPMSNCINSGINKVYILTQFNSQSLNRHLSRAYDFSNGVAIGDGFVEVLAATQRPGTEGKRWFQGTADAVRQFDWLFDDAKSKDIEDVLILSGDHLYRMDYMDFVQSHRQRGAGISICCLPIDGSRASDFGLMKIDDTGRVISFSEKPKGDELKAMQVDTTVLGLSKEEAENKPYIASMGIYIFKKDILLNLLRWRFPTANDFGSEIIPASAKEIDVKAYLFNDYWEDIGTIKSFFEANLALAEQPPRFSFYDADKPMYTSRRNLPPSMVNNSKITDSIISHGCFLDNCRIEHSVVGVRSRIGSNVHLKDTVMLGADYYETAVERGELLAEGKVPIGIGENTTIQKCIIDKNARIGKKVVISNSEGVDEADRTSEGFYIRSGITVVLKNAIIADGLVI

SEQ ID NO: 17601 - protein, 463 aa, Zea mays subsp. mays
  peptide (1)..(463): Ceres Seq. ID no. 12379201
  misc_feature (31)..(310): Pfam Name: Nucleotidyl transferase Pfam Description: Nucleotidyl transferase
  misc_feature (410)..(463): Homolog of NCBI NO: 13487711 NR Description: ADP-glucose pyrophosphorylase large subunit
  misc_feature (1)..(188): Homolog of NCBI NO: 13487711 NR Description: ADP-glucose pyrophosphorylase large subunit
  misc_feature (187)..(409): Homolog of NCBI NO: 13487711 NR Description: ADP-glucose pyrophosphorylase large subunit
  misc_feature (1)..(463): Homolog of NCBI NO: 1707932 NR Description: Glucose-1-phosphate adenylyltransferase large
  misc_feature (1)..(463): Homolog of NCBI NO: 13487783 NR Description: ADP-glucose pyrophosphorylase [Cicer arietinum]
  misc_feature (1)..(463): Homolog of NCBI NO: 4586350 NR Description: glucose-1-phosphate adenylyltransferase
  misc_feature (1)..(463): Homolog of NCBI NO: 22347636 NR Description: ADP-glucose pyrophosphorylase large subunit
  misc_feature (1)..(463): Homolog of NCBI NO: 15239684 NR Description: Glucose-1-phosphate adenylyltransferase
  misc_feature (1)..(463): Homolog of NCBI NO: 7434883 NR Description: glucose-1-phosphate adenylyltransferase (EC
  misc_feature (1)..(463): Homolog of NCBI NO: 7434885 NR Description: glucose-1-phosphate adenylyltransferase (EC
MSVATTEATTTIAVGASEDQALEARNSKTVVAVILGGGAGTRLFPLTRRRAKPAVPIGGAYRLIDVPMSNCINSGINKVYILTQFNSQSLNRHLSRAYDFSNGVAIGDGFVEVLAATQRPGTEGKRWFQGTADAVRQFDWLFDDAKSKDIEDVLILSGDHLYRMDYMDFVQSHRQRGAGISICCLPIDGSRASDFGLMKIDDTGRVISFSEKPKGDELKAMQVDTTVLGLSKEEAENKPYIASMGIYIFKKDILLNLLRWRFPTANDFGSEIIPASAKEIDVKAYLFNDYWEDIGTIKSFFEANLALAEQPPRFSFYDADKPMYTSRRNLPPSMVNNSKITDSIISHGCFLDNCRIEHSVVGVRSRIGSNVHLKDTVMLGADYYETAVERGELLAEGKVPIGIGENTTIQKCIIDKNARIGKKVVISNSEGVDEADRTSEGFYIRSGITVVLKNAIIADGLVI

SEQ ID NO: 17602 - DNA, 1182 bp, Zea mays subsp. mays
  misc_feature (1)..(1182): Ceres Seq. ID no. 13499256
  misc_feature: MA Experiment ID: 108536 Result: Up-regulated in Transcription
  misc_feature: MA Experiment 108536 PARAMETER Experiment Name: Zm_Meristem_P Parameter: Age (day) Value: 8
  misc_feature: MA Experiment 108536 PARAMETER Experiment Name: Zm_Meristem_P Parameter: Organism Value: Zea mays
  misc_feature: MA Experiment 108536 PARAMETER Experiment Name: Zm_Meristem_P Parameter: Plant Line Value: 35A19
  misc_feature: MA Experiment 108536 PARAMETER Experiment Name: Zm_Meristem_P Parameter: Tissue Value: Shoot Meristem vs. Above Shoot Meristem
  misc_feature: MA Experiment ID: 108543 Result: Down-regulated in Transcription
  misc_feature: MA Experiment ID: 108689 Result: Up-regulated in Transcription
  misc_feature: MA Experiment 108689 PARAMETER Experiment Name: Zm_Drought_Roots_P Parameter: Age (day) Value: 9
  misc_feature: MA Experiment 108689 PARAMETER Experiment Name: Zm_Drought_Roots_P Parameter: Organism Value: Zea mays
  misc_feature: MA Experiment 108689 PARAMETER Experiment Name: Zm_Drought_Roots_P Parameter: Plant Line Value: 35A19
  misc_feature: MA Experiment 108689 PARAMETER Experiment Name: Zm_Drought_Roots_P Parameter: Timepoint (hr) Value: 24
  misc_feature: MA Experiment 108689 PARAMETER Experiment Name: Zm_Drought_Roots_P Parameter: Tissue Value: Roots
  misc_feature: MA Experiment 108689 PARAMETER Experiment Name: Zm_Drought_Roots_P Parameter: Treatment Value: Drought vs. No Drought
gcacgagaccattacctagaacatcctaatcaaaaaatctctagccagcgtcgtcggctgacctcctaccgtcgtcatggcttctcttcacccgttgatcgctgctgcgctcgtagtcgcggcggcctccacggcagcggcggcggcgagctgggcggcaccgtcgtcgccagcacgccctctgttccgcgagtacatcggcgcggagggcaagaacgtgacgttcgcggacgtgccggtgcacccgggcgtggacttccacttcatcctctccttcgccatcgactacgccgcgaacgccaccaacgcctccgcgccgccggtgcccacggacggccgcttcgccgtgttctgggacgaggcgaacctcaccccggccgccgtggccgccctcaagtgcccctcctcccacgcccgcgtcgcgctcagcctcggcggcgacaccgtgttcggcgccaacgccacgttccgcgcgtcctccgtcgacgcctgggtcggcaacgccgtggcgtcgctcgcggccatcctcacccgctacggcctcgacggggtggacgtggactacgagcacttcggggagcgcgagacgcccgaggtgttcgccgagtgcgtcggccgcctcgtgcgcgcgctccgggcccgcggcgtcatctccttcgcctccatcgcgcccttcgccaacccggacgtgcaggcgcactacgccgagctctggcgacgctacggccgcgacttcgactacgtcaacttccagttctacgcgtacccgtccaacaccacggtgccggagttcctggcccactatgacgagcagagcgcccggtacgccggcgccagcggaggggggaaggtgcttgtcagcttcgggacggaccccgccagcggcggcctgcgccccgggaagggcttcttcagggcgtgccgggagctgcgccgccaagggaggttgcatggaattttttgtctgggccgcggataactccgccgccgacgggtttcgcgacgagcgcctcgcgcagacgttcctcgccggcaacgccccgggtttcccctgacgcatgcatgcgttaagctccccgtgtctccgttccatatttccgttccttgtgtacgtcttgttatgttttgtcgcgtccatatgatttgtaattggtccagttcattgattatttgcgtgcatcc

SEQ ID NO: 17603 - protein, 300 aa, Zea mays subsp. mays
  peptide (1)..(300): Ceres Seq. ID no. 13499257
  misc_feature (53)..(295): Pfam Name: Glycosyl hydrolases family 18 Pfam Description: Glycosyl hydrolases family 18
  misc_feature (36)..(225): Homolog of NCBI NO: 730692 NR Description: RuBisCO-associated protein
  misc_feature (36)..(295): Homolog of NCBI NO: 27462188 NR Description: chitinase [Oryza sativa]
  misc_feature (8)..(295): Homolog of NCBI NO: 37534348 NR Description: putative class III chitinase RCB4
  misc_feature (36)..(295): Homolog of NCBI NO: 37534362 NR Description: putative class III chitinase
  misc_feature (36)..(295): Homolog of NCBI NO: 37534356 NR Description: putative class III chitinase
  misc_feature (36)..(294): Homolog of NCBI NO: 7434970 NR Description: chitinase (EC 3.2.1.14) a - Gladiolus gandavensis
  misc_feature (36)..(295): Homolog of NCBI NO: 7434972 NR Description: chitinase (EC 3.2.1.14) 2 - cone shell (Conus
  misc_feature (36)..(295): Homolog of NCBI NO: 7434971 NR Description: chitinase (EC 3.2.1.14) 1 - cone shell (Conus
  misc_feature (14)..(295): Homolog of NCBI NO: 11262118 NR Description: chitinase (EC 3.2.1.14) 1 - cone shell (Conus
MASLHPLIAAALVVAAASTAAAAASWAAPSSPARPLFREYIGAEGKNVTFADVPVHPGVDFHFILSFAIDYAANATNASAPPVPTDGRFAVFWDEANLTPAAVAALKCPSSHARVALSLGGDTVFGANATFRASSVDAWVGNAVASLAAILTRYGLDGVDVDYEHFGERETPEVFAECVGRLVRALRARGVISFASIAPFANPDVQAHYAELWRRYGRDFDYVNFQFYAYPSNTTVPEFLAHYDEQSARYAGASGGGKVLVSFGTDPASGGLRPGKGFFRACRELRRQGRLHGIFCLGRG

SEQ ID NO: 17604 - protein, 268 aa, Zea mays subsp. mays
  peptide (1)..(268): Ceres Seq. ID no. 13499258
  misc_feature (63)..(248): Pfam Name: HlyD family secretion protein Pfam Description: HlyD family secretion protein
  misc_feature (33)..(268): Homolog of NCBI NO: 29247944 NR Description: GLP_26_54603_52153 [Giardia lamblia ATCC 50803]
ARDHYLEHPNQKISSQRRRLTSYRRHGFSSPVDRCCARSRGGLHGSGGGELGGTVVASTPSVPRVHRRGGQERDVRGRAGAPGRGLPLHPLLRHRLRRERHQRLRAAGAHGRPLRRVLGRGEPHPGRRGRPQVPLLPRPRRAQPRRRHRVRRQRHVPRVLRRRLGRQRRGVARGHPHPLRPRRGGRGLRALRGARDARGVRRVRRPPRARAPGPRRHLLRLHRALRQPGRAGALRRALATLRPRLRLRQLPVLRVPVQHHGAGVPGPL

SEQ ID NO: 17605 - DNA, 461 bp, Zea mays subsp. mays
  misc_feature (1)..(461): Ceres Seq. ID no. 13635148
  misc_feature: MA Experiment ID: 108522 Result: Down-regulated in Transcription
  misc_feature: MA Experiment 108522 PARAMETER Experiment Name: Zm_42deg_Heat_P Parameter: Age (day) Value: 8
  misc_feature: MA Experiment 108522 PARAMETER Experiment Name: Zm_42deg_Heat_P Parameter: Organism Value: Zea mays
  misc_feature: MA Experiment 108522 PARAMETER Experiment Name: Zm_42deg_Heat_P Parameter: Plant Line Value: 35A19
  misc_feature: MA Experiment 108522 PARAMETER Experiment Name: Zm_42deg_Heat_P Parameter: Temperature (deg C) Value: 42 vs. 22
  misc_feature: MA Experiment 108522 PARAMETER Experiment Name: Zm_42deg_Heat_P Parameter: Timepoint (hr) Value: 1
  misc_feature: MA Experiment 108522 PARAMETER Experiment Name: Zm_42deg_Heat_P Parameter: Tissue Value: Aerial
  misc_feature: MA Experiment ID: 108528 Result: Down-regulated in Transcription
  misc_feature: MA Experiment 108528 PARAMETER Experiment Name: Zm_Imbibed_Seeds_P Parameter: Age (day) Value: 5 vs. 2
  misc_feature: MA Experiment 108528 PARAMETER Experiment Name: Zm_Imbibed_Seeds_P Parameter: Organism Value: Zea mays
  misc_feature: MA Experiment 108528 PARAMETER Experiment Name: Zm_Imbibed_Seeds_P Parameter: Plant Line Value: 35A19
  misc_feature: MA Experiment 108528 PARAMETER Experiment Name: Zm_Imbibed_Seeds_P Parameter: Tissue Value: Aerial vs. Embryo
  misc_feature: MA Experiment ID: 108529 Result: Down-regulated in Transcription
  misc_feature: MA Experiment 108529 PARAMETER Experiment Name: Zm_Imbibed_Seeds_P Parameter: Age (day) Value: 5 vs. 2
  misc_feature: MA Experiment 108529 PARAMETER Experiment Name: Zm_Imbibed_Seeds_P Parameter: Organism Value: Zea mays
  misc_feature: MA Experiment 108529 PARAMETER Experiment Name: Zm_Imbibed_Seeds_P Parameter: Plant Line Value: 35A19
  misc_feature: MA Experiment 108529 PARAMETER Experiment Name: Zm_Imbibed_Seeds_P Parameter: Tissue Value: Roots vs. Embryo
  misc_feature: MA Experiment ID: 108530 Result: Down-regulated in Transcription
  misc_feature: MA Experiment 108530 PARAMETER Experiment Name: Zm_Imbibed_Seeds_P Parameter: Age (day) Value: 6 vs. 2
  misc_feature: MA Experiment 108530 PARAMETER Experiment Name: Zm_Imbibed_Seeds_P Parameter: Organism Value: Zea mays
  misc_feature: MA Experiment 108530 PARAMETER Experiment Name: Zm_Imbibed_Seeds_P Parameter: Plant Line Value: 35A19
  misc_feature: MA Experiment 108530 PARAMETER Experiment Name: Zm_Imbibed_Seeds_P Parameter: Tissue Value: Aerial vs. Embryo
  misc_feature: MA Experiment ID: 108535 Result: Up-regulated in Transcription
  misc_feature: MA Experiment 108535 PARAMETER Experiment Name: Zm_Meristem_P Parameter: Age (day) Value: 8
  misc_feature: MA Experiment 108535 PARAMETER Experiment Name: Zm_Meristem_P Parameter: Organism Value: Zea mays
  misc_feature: MA Experiment 108535 PARAMETER Experiment Name: Zm_Meristem_P Parameter: Plant Line Value: 35A19
  misc_feature: MA Experiment 108535 PARAMETER Experiment Name: Zm_Meristem_P Parameter: Tissue Value: Root Meristem vs. Above Root Meristem
  misc_feature: MA Experiment ID: 108544 Result: Down-regulated in Transcription
  misc_feature: MA Experiment ID: 108556 Result: Down-regulated in Transcription
  misc_feature: MA Experiment 108556 PARAMETER Experiment Name: Zm_Drought_P Parameter: Age (day) Value: 9
  misc_feature: MA Experiment 108556 PARAMETER Experiment Name: Zm_Drought_P Parameter: Organism Value: Zea mays
  misc_feature: MA Experiment 108556 PARAMETER Experiment Name: Zm_Drought_P Parameter: Plant Line Value: 35A19
  misc_feature: MA Experiment 108556 PARAMETER Experiment Name: Zm_Drought_P Parameter: Timepoint (hr) Value: 24
  misc_feature: MA Experiment 108556 PARAMETER Experiment Name: Zm_Drought_P Parameter: Tissue Value: Aerial
  misc_feature: MA Experiment 108556 PARAMETER Experiment Name: Zm_Drought_P Parameter: Treatment Value: Drought vs. No Drought
  misc_feature: MA Experiment ID: 20000108 Result: Up-regulated in Transcription
  misc_feature: MA Experiment 20000108 PARAMETER Experiment Name: Zm_Root-Tips_P Parameter: Age (day) Value: 12
  misc_feature: MA Experiment 20000108 PARAMETER Experiment Name: Zm_Root-Tips_P Parameter: Organism Value: Zea mays
  misc_feature: MA Experiment 20000108 PARAMETER Experiment Name: Zm_Root-Tips_P Parameter: Tissue Value: Root tips vs. Root mid region    35
  misc_feature: MA Experiment 20000108 PARAMETER Experiment Name: Zm_Root-Tips_P Parameter: Tissue Value: Root tips vs. Root mid region   Sequence Listing-Misc Features (4)
  misc_feature: MA Experiment ID: 20000487 Result: Up-regulated in Transcription
  misc_feature: MA Experiment 20000487 PARAMETER Experiment Name: Zm_50mM_NH4NO3_L_to_H_P Parameter: Organism Value: Zea mays
  misc_feature: MA Experiment 20000487 PARAMETER Experiment Name: Zm_50mM_NH4NO3_L_to_H_P Parameter: Timepoint (hr) Value: 4
  misc_feature: MA Experiment 20000487 PARAMETER Experiment Name: Zm_50mM_NH4NO3_L_to_H_P Parameter: Tissue Value: Leaves
  misc_feature: MA Experiment 20000487 PARAMETER Experiment Name: Zm_50mM_NH4NO3_L_to_H_P Parameter: Treatment Value: 50mM NH4NO3 vs. 100mM Mannitol
  misc_feature: MA Experiment ID: 20000488 Result: Up-regulated in Transcription
  misc_feature: MA Experiment 20000488 PARAMETER Experiment Name: Zm_50mM_NH4NO3_L_to_H_P Parameter: Organism Value: Zea mays
  misc_feature: MA Experiment 20000488 PARAMETER Experiment Name: Zm_50mM_NH4NO3_L_to_H_P Parameter: Timepoint (hr) Value: 8
  misc_feature: MA Experiment 20000488 PARAMETER Experiment Name: Zm_50mM_NH4NO3_L_to_H_P Parameter: Tissue Value: Leaves
  misc_feature: MA Experiment 20000488 PARAMETER Experiment Name: Zm_50mM_NH4NO3_L_to_H_P Parameter: Treatment Value: 50mM NH4NO3 vs. 100mM Mannitol
  misc_feature: MA Experiment ID: 20000535 Result: Up-regulated in Transcription
  misc_feature: MA Experiment 20000535 PARAMETER Experiment Name: Zm_Hybrid_Seed_Dev_P Parameter: DAP Value: 30 vs. 12
  misc_feature: MA Experiment 20000535 PARAMETER Experiment Name: Zm_Hybrid_Seed_Dev_P Parameter: Organism Value: Zea mays
  misc_feature: MA Experiment 20000535 PARAMETER Experiment Name: Zm_Hybrid_Seed_Dev_P Parameter: Plant Line Value: 35A19
  misc_feature: MA Experiment 20000535 PARAMETER Experiment Name: Zm_Hybrid_Seed_Dev_P Parameter: Tissue Value: Embryo vs. Unfert Floret
  misc_feature: MA Experiment ID: 20001606 Result: Up-regulated in Transcription
  misc_feature: MA Experiment 20001606 PARAMETER Experiment Name: Zm_50ppm_KNO3_L-to-H_P Parameter: Age (day) Value: 19
  misc_feature: MA Experiment 20001606 PARAMETER Experiment Name: Zm_50ppm_KNO3_L-to-H_P Parameter: Organism Value: Zea mays
  misc_feature: MA Experiment 20001606 PARAMETER Experiment Name: Zm_50ppm_KNO3_L-to-H_P Parameter: Plant Line Value: 35A19
  misc_feature: MA Experiment 20001606 PARAMETER Experiment Name: Zm_50ppm_KNO3_L-to-H_P Parameter: Timepoint (hr) Value: 8
  misc_feature: MA Experiment 20001606 PARAMETER Experiment Name: Zm_50ppm_KNO3_L-to-H_P Parameter: Tissue Value: Shoots
  misc_feature: MA Experiment 20001606 PARAMETER Experiment Name: Zm_50ppm_KNO3_L-to-H_P Parameter: Treatment Value: 50ppm KNO3 vs. 50ppm KCl
gacttgtgcgccatcacacacaagacacaaccccactcacccggcagggaggccctcttcgtcggcggaggccatggtttccctcaagccgcagaagaggctcgccgcgggagtcctaaaatgtggcaaggggaaggtgtggcttgaccccaacgaggtctacgagatctcgatggctaactcgcgtcagaacattcgtaagctggtgaaggatggattcataattaagaagccacagaaaatccactcaaggtcccgggcaaggagggcccatgaggccaagcagaaggggaggcactctggttacggtaagcgcaggggtaccagggaggctaggctccccaccaagatcctttggatgcgcaggatgcgtgtcctttttttttcaggcgtctgctgcgcaagtatcgtgaagcaaagaaaatcgacaaacacatgtaccacgatatgtatatgaaagt

SEQ ID NO: 17606 - protein, 151 aa, Zea mays subsp. mays
  peptide (1)..(151): Ceres Seq. ID no. 13635149
  misc_feature (26)..(126): Pfam Name: Ribosomal protein L19e Pfam Description: Ribosomal protein L19e
  misc_feature (25)..(126): Homolog of NCBI NO: 28630352 NR Description: ribosomal protein L19 [Branchiostoma lanceolatum]
  misc_feature (25)..(126): Homolog of NCBI NO: 28200276 NR Description: ribosomal protein L19 [Branchiostoma belcheri
  misc_feature (25)..(126): Homolog of NCBI NO: 15235290 NR Description: 60S ribosomal protein L19 (RPL19C) [Arabidopsis
  misc_feature (25)..(126): Homolog of NCBI NO: 7440943 NR Description: ribosomal protein L19.T2H3.3 - Arabidopsis
  misc_feature (25)..(126): Homolog of NCBI NO: 18087585 NR Description: At1g02780/T14P4_3 [Arabidopsis thaliana]
  misc_feature (25)..(126): Homolog of NCBI NO: 15218602 NR Description: 60S ribosomal protein L19 (RPL19A) [Arabidopsis
  misc_feature (25)..(126): Homolog of NCBI NO: 15228314 NR Description: 60S ribosomal protein L19 (RPL19B) [Arabidopsis
  misc_feature (25)..(126): Homolog of NCBI NO: 40287526 NR Description: 60S ribosomal protein L19 [Capsicum annuum]
  misc_feature (25)..(126): Homolog of NCBI NO: 32401377 NR Description: ribosomal protein L19 [Triticum aestivum]
  misc_feature (25)..(126): Homolog of NCBI NO: 29837764 NR Description: putative ribosomal protein L19
TCAPSHTRHNPTHPAGRPSSSAEAMVSLKPQKRLAAGVLKCGKGKVWLDPNEVYEISMANSRQNIRKLVKDGFIIKKPQKIHSRSRARRAHEAKQKGRHSGYGKRRGTREARLPTKILWMRRMRVLFFSGVCCASIVKQRKSTNTCTTICI

SEQ ID NO: 17607 - protein, 127 aa, Zea mays subsp. mays
  peptide (1)..(127): Ceres Seq. ID no. 13635150
  misc_feature (2)..(102): Pfam Name: Ribosomal protein L19e Pfam Description: Ribosomal protein L19e
  misc_feature (1)..(102): Homolog of NCBI NO: 28630352 NR Description: ribosomal protein L19 [Branchiostoma lanceolatum]
  misc_feature (1)..(102): Homolog of NCBI NO: 28200276 NR Description: ribosomal protein L19 [Branchiostoma belcheri
  misc_feature (1)..(102): Homolog of NCBI NO: 15235290 NR Description: 60S ribosomal protein L19 (RPL19C) [Arabidopsis
  misc_feature (1)..(102): Homolog of NCBI NO: 7440943 NR Description: ribosomal protein L19.T2H3.3 - Arabidopsis
  misc_feature (1)..(102): Homolog of NCBI NO: 18087585 NR Description: At1g02780/T14P4_3 [Arabidopsis thaliana]
  misc_feature (1)..(102): Homolog of NCBI NO: 15218602 NR Description: 60S ribosomal protein L19 (RPL19A) [Arabidopsis
  misc_feature (1)..(102): Homolog of NCBI NO: 15228314 NR Description: 60S ribosomal protein L19 (RPL19B) [Arabidopsis
  misc_feature (1)..(102): Homolog of NCBI NO: 40287526 NR Description: 60S ribosomal protein L19 [Capsicum annuum]
  misc_feature (1)..(102): Homolog of NCBI NO: 32401377 NR Description: ribosomal protein L19 [Triticum aestivum]
  misc_feature (1)..(102): Homolog of NCBI NO: 29837764 NR Description: putative ribosomal protein L19
MVSLKPQKRLAAGVLKCGKGKVWLDPNEVYEISMANSRQNIRKLVKDGFIIKKPQKIHSRSRARRAHEAKQKGRHSGYGKRRGTREARLPTKILWMRRMRVLFFSGVCCASIVKQRKSTNTCTTICI

SEQ ID NO: 17608 - protein, 94 aa, Zea mays subsp. mays
  peptide (1)..(94): Ceres Seq. ID no. 13635151
  misc_feature (1)..(69): Pfam Name: Ribosomal protein L19e Pfam Description: Ribosomal protein L19e
  misc_feature (1)..(69): Homolog of NCBI NO: 28630352 NR Description: ribosomal protein L19 [Branchiostoma lanceolatum]
  misc_feature (1)..(69): Homolog of NCBI NO: 28200276 NR Description: ribosomal protein L19 [Branchiostoma belcheri
  misc_feature (1)..(69): Homolog of NCBI NO: 15235290 NR Description: 60S ribosomal protein L19 (RPL19C) [Arabidopsis
  misc_feature (1)..(69): Homolog of NCBI NO: 7440943 NR Description: ribosomal protein L19.T2H3.3 - Arabidopsis
  misc_feature (1)..(69): Homolog of NCBI NO: 18087585 NR Description: At1g02780/T14P4_3 [Arabidopsis thaliana]
  misc_feature (1)..(69): Homolog of NCBI NO: 15218602 NR Description: 60S ribosomal protein L19 (RPL19A) [Arabidopsis
  misc_feature (1)..(69): Homolog of NCBI NO: 15228314 NR Description: 60S ribosomal protein L19 (RPL19B) [Arabidopsis
  misc_feature (1)..(69): Homolog of NCBI NO: 40287526 NR Description: 60S ribosomal protein L19 [Capsicum annuum]
  misc_feature (1)..(69): Homolog of NCBI NO: 32401377 NR Description: ribosomal protein L19 [Triticum aestivum]
  misc_feature (1)..(69): Homolog of NCBI NO: 29837764 NR Description: putative ribosomal protein L19
MANSRQNIRKLVKDGFIIKKPQKIHSRSRARRAHEAKQKGRHSGYGKRRGTREARLPTKILWMRRMRVLFFSGVCCASIVKQRKSTNTCTTICI

SEQ ID NO: 17609 - DNA, 533 bp, Zea mays subsp. mays
  misc_feature (1)..(533): Ceres Seq. ID no. 1674907
  misc_feature: MA Experiment ID: 108527 Result: Down-regulated in Transcription
  misc_feature: MA Experiment 108527 PARAMETER Experiment Name: Zm_5mM_NO_P Parameter: Age (day) Value: 8
  misc_feature: MA Experiment 108527 PARAMETER Experiment Name: Zm_5mM_NO_P Parameter: Organism Value: Zea mays
  misc_feature: MA Experiment 108527 PARAMETER Experiment Name: Zm_5mM_NO_P Parameter: Plant Line Value: 35A19
  misc_feature: MA Experiment 108527 PARAMETER Experiment Name: Zm_5mM_NO_P Parameter: Timepoint (hr) Value: 6
  misc_feature: MA Experiment 108527 PARAMETER Experiment Name: Zm_5mM_NO_P Parameter: Tissue Value: Aerial
  misc_feature: MA Experiment 108527 PARAMETER Experiment Name: Zm_5mM_NO_P Parameter: Treatment Value: 5mM NO vs. No Treatment
  misc_feature: MA Experiment ID: 108528 Result: Up-regulated in Transcription
  misc_feature: MA Experiment 108528 PARAMETER Experiment Name: Zm_Imbibed_Seeds_P Parameter: Age (day) Value: 5 vs. 2
  misc_feature: MA Experiment 108528 PARAMETER Experiment Name: Zm_Imbibed_Seeds_P Parameter: Organism Value: Zea mays
  misc_feature: MA Experiment 108528 PARAMETER Experiment Name: Zm_Imbibed_Seeds_P Parameter: Plant Line Value: 35A19
  misc_feature: MA Experiment 108528 PARAMETER Experiment Name: Zm_Imbibed_Seeds_P Parameter: Tissue Value: Aerial vs. Embryo
  misc_feature: MA Experiment ID: 108530 Result: Up-regulated in Transcription
  misc_feature: MA Experiment 108530 PARAMETER Experiment Name: Zm_Imbibed_Seeds_P Parameter: Age (day) Value: 6 vs. 2
  misc_feature: MA Experiment 108530 PARAMETER Experiment Name: Zm_Imbibed_Seeds_P Parameter: Organism Value: Zea mays
  misc_feature: MA Experiment 108530 PARAMETER Experiment Name: Zm_Imbibed_Seeds_P Parameter: Plant Line Value: 35A19
  misc_feature: MA Experiment 108530 PARAMETER Experiment Name: Zm_Imbibed_Seeds_P Parameter: Tissue Value: Aerial vs. Embryo
  misc_feature: MA Experiment ID: 108547 Result: Up-regulated in Transcription
  misc_feature: MA Experiment 108547 PARAMETER Experiment Name: Zm_Imbibed_Seeds_P Parameter: Age (day) Value: 4 vs. 2
  misc_feature: MA Experiment 108547 PARAMETER Experiment Name: Zm_Imbibed_Seeds_P Parameter: Organism Value: Zea mays
  misc_feature: MA Experiment 108547 PARAMETER Experiment Name: Zm_Imbibed_Seeds_P Parameter: Plant Line Value: 35A19
  misc_feature: MA Experiment 108547 PARAMETER Experiment Name: Zm_Imbibed_Seeds_P Parameter: Tissue Value: Aerial vs. Embryo
  misc_feature: MA Experiment ID: 20000487 Result: Up-regulated in Transcription
  misc_feature: MA Experiment 20000487 PARAMETER Experiment Name: Zm_50mM_NH4NO3_L_to_H_P Parameter: Organism Value: Zea mays
  misc_feature: MA Experiment 20000487 PARAMETER Experiment Name: Zm_50mM_NH4NO3_L_to_H_P Parameter: Timepoint (hr) Value: 4
  misc_feature: MA Experiment 20000487 PARAMETER Experiment Name: Zm_50mM_NH4NO3_L_to_H_P Parameter: Tissue Value: Leaves
  misc_feature: MA Experiment 20000487 PARAMETER Experiment Name: Zm_50mM_NH4NO3_L_to_H_P Parameter: Treatment Value: 50mM NH4NO3 vs. 100mM Mannitol
  misc_feature: MA Experiment ID: 20000535 Result: Up-regulated in Transcription
  misc_feature: MA Experiment 20000535 PARAMETER Experiment Name: Zm_Hybrid_Seed_Dev_P Parameter: DAP Value: 30 vs. 12
  misc_feature: MA Experiment 20000535 PARAMETER Experiment Name: Zm_Hybrid_Seed_Dev_P Parameter: Organism Value: Zea mays
  misc_feature: MA Experiment 20000535 PARAMETER Experiment Name: Zm_Hybrid_Seed_Dev_P Parameter: Plant Line Value: 35A19
  misc_feature: MA Experiment 20000535 PARAMETER Experiment Name: Zm_Hybrid_Seed_Dev_P Parameter: Tissue Value: Embryo vs. Unfert Floret
aacaggctccccgccgtgagctcttcggccacgcgggcgtcttgcctccctcgtccttcctcaccgcaggaggatggccgcgatagcctcagcttcgcccaggaccctgatccctccgcggccgcgccaccacggcgccgcgccctccccatccacctccgacgtctcctcgctccgactcctccgcgcgcacccgcgccacgtccgacgcagccgcggagtgtccatctcgatgcccgtggcgcggagccggtcgttcgtcttctccccgcgcgcggtggctgactccaagagctcccagacctgcctggaccccgacgccagcacgagtgttcttggaatcattctgggaggtggtgctgggactagattgtaccccttgacaaagaagcgtgccaagcctgcagtgccattgggtgccaactatagactgattgatattcctgtcagcaattgtctcaacagcaacatatccaagatctatgtgctaacgcaatttaactctgcttccctcaaccgtcactctcaagagc

SEQ ID NO: 17610 - protein, 94 aa, Zea mays subsp. mays
  peptide (1)..(94): Ceres Seq. ID no. 1674908
NRLPAVSSSATRASCLPRPSSPQEDGRDSLSFAQDPDPSAAAPPRRRALPIHLRRLLAPTPPRAPAPRPTQPRSVHLDARGAEPVVRLLPARGG

SEQ ID NO: 17611 - protein, 153 aa, Zea mays subsp. mays
  peptide (1)..(153): Ceres Seq. ID no. 1674909
  misc_feature (88)..(150): Pfam Name: Nucleotidyl transferase Pfam Description: Nucleotidyl transferase
  misc_feature (1)..(150): Homolog of NCBI NO: 14582768 NR Description: ADP-glucose pyrophosphorylase small subunit [Zea
  misc_feature (5)..(150): Homolog of NCBI NO: 232164 NR Description: Glucose-1-phosphate adenylyltransferase small chloroplast precursor (ADP-glucose synthase) (ADP-glucose
  misc_feature (27)..(150): Homolog of NCBI NO: 7434881 NR Description: glucose-1-phosphate adenylyltransferase (EC
  misc_feature (13)..(150): Homolog of NCBI NO: 1707944 NR Description: Glucose-1-phosphate adenylyltransferase small
  misc_feature (5)..(150): Homolog of NCBI NO: 27819107 NR Description: ADP-glucose pyrophosphorylase small subunit
  misc_feature (45)..(150): Homolog of NCBI NO: 13508485 NR Description: ADP-glucose pyrophosphorylase small subunit
  misc_feature (55)..(150): Homolog of NCBI NO: 13892040 NR Description: ADP-glucose pyrophosphorylase small subunit [Zea
  misc_feature (1)..(150): Homolog of NCBI NO: 27464770 NR Description: ADP-glucose pyrophosphorylase small subunit
  misc_feature (19)..(150): Homolog of NCBI NO: 38423972 NR Description: putative glucose-1-phosphate adenylyltransferase
  misc_feature (1)..(150): Homolog of NCBI NO: 1707940 NR Description: Glucose-1-phosphate adenylyltransferase small chloroplast precursor (ADP-glucose synthase) (ADP-glucose
MAAIASASPRTLIPPRPRHHGAAPSPSTSDVSSLRLLRAHPRHVRRSRGVSISMPVARSRSFVFSPRAVADSKSSQTCLDPDASTSVLGIILGGGAGTRLYPLTKKRAKPAVPLGANYRLIDIPVSNCLNSNISKIYVLTQFNSASLNRHSQE

SEQ ID NO: 17612 - protein, 100 aa, Zea mays subsp. mays
  peptide (1)..(100): Ceres Seq. ID no. 1674910
  misc_feature (35)..(97): Pfam Name: Nucleotidyl transferase Pfam Description: Nucleotidyl transferase
  misc_feature (1)..(97): Homolog of NCBI NO: 232164 NR Description: Glucose-1-phosphate adenylyltransferase small chloroplast precursor (ADP-glucose synthase) (ADP-glucose
  misc_feature (1)..(97): Homolog of NCBI NO: 7434881 NR Description: glucose-1-phosphate adenylyltransferase (EC
  misc_feature (1)..(97): Homolog of NCBI NO: 1707944 NR Description: Glucose-1-phosphate adenylyltransferase small
  misc_feature (1)..(97): Homolog of NCBI NO: 27819107 NR Description: ADP-glucose pyrophosphorylase small subunit
  misc_feature (1)..(97): Homolog of NCBI NO: 13508485 NR Description: ADP-glucose pyrophosphorylase small subunit
  misc_feature (2)..(97): Homolog of NCBI NO: 13892040 NR Description: ADP-glucose pyrophosphorylase small subunit [Zea
  misc_feature (1)..(97): Homolog of NCBI NO: 27464770 NR Description: ADP-glucose pyrophosphorylase small subunit
  misc_feature (1)..(97): Homolog of NCBI NO: 38423972 NR Description: putative glucose-1-phosphate adenylyltransferase
  misc_feature (1)..(97): Homolog of NCBI NO: 1707940 NR Description: Glucose-1-phosphate adenylyltransferase small chloroplast precursor (ADP-glucose synthase) (ADP-glucose
  misc_feature (1)..(97): Homolog of NCBI NO: 14582768 NR Description: ADP-glucose pyrophosphorylase small subunit [Zea
MPVARSRSFVFSPRAVADSKSSQTCLDPDASTSVLGIILGGGAGTRLYPLTKKRAKPAVPLGANYRLIDIPVSNCLNSNISKIYVLTQFNSASLNRHSQE

SEQ ID NO: 17613 - DNA, 2297 bp, Zea mays subsp. mays
  misc_feature (1)..(2297): Ceres Seq. ID no. 12375193
  misc_feature: MA Experiment ID: 108522 Result: Down-regulated in Transcription
  misc_feature: MA Experiment 108522 PARAMETER Experiment Name: Zm_42deg_Heat_P Parameter: Age (day) Value: 8
  misc_feature: MA Experiment 108522 PARAMETER Experiment Name: Zm_42deg_Heat_P Parameter: Organism Value: Zea mays
  misc_feature: MA Experiment 108522 PARAMETER Experiment Name: Zm_42deg_Heat_P Parameter: Plant Line Value: 35A19
  misc_feature: MA Experiment 108522 PARAMETER Experiment Name: Zm_42deg_Heat_P Parameter: Temperature (deg C) Value: 42 vs. 22
  misc_feature: MA Experiment 108522 PARAMETER Experiment Name: Zm_42deg_Heat_P Parameter: Timepoint (hr) Value: 1
  misc_feature: MA Experiment 108522 PARAMETER Experiment Name: Zm_42deg_Heat_P Parameter: Tissue Value: Aerial
  misc_feature: MA Experiment ID: 108535 Result: Up-regulated in Transcription
  misc_feature: MA Experiment 108535 PARAMETER Experiment Name: Zm_Meristem_P Parameter: Age (day) Value: 8
  misc_feature: MA Experiment 108535 PARAMETER Experiment Name: Zm_Meristem_P Parameter: Organism Value: Zea mays
  misc_feature: MA Experiment 108535 PARAMETER Experiment Name: Zm_Meristem_P Parameter: Plant Line Value: 35A19
  misc_feature: MA Experiment 108535 PARAMETER Experiment Name: Zm_Meristem_P Parameter: Tissue Value: Root Meristem vs. Above Root Meristem
  misc_feature: MA Experiment ID: 108543 Result: Up-regulated in Transcription
  misc_feature: MA Experiment ID: 108545 Result: Up-regulated in Transcription
  misc_feature: MA Experiment 108545 PARAMETER Experiment Name: Zm_Imbibed_Seeds_P Parameter: Age (day) Value: 3 vs. 2
  misc_feature: MA Experiment 108545 PARAMETER Experiment Name: Zm_Imbibed_Seeds_P Parameter: Organism Value: Zea mays
  misc_feature: MA Experiment 108545 PARAMETER Experiment Name: Zm_Imbibed_Seeds_P Parameter: Plant Line Value: 35A19
  misc_feature: MA Experiment 108545 PARAMETER Experiment Name: Zm_Imbibed_Seeds_P Parameter: Tissue Value: Aerial vs. Embryo
  misc_feature: MA Experiment ID: 108547 Result: Up-regulated in Transcription
  misc_feature: MA Experiment 108547 PARAMETER Experiment Name: Zm_Imbibed_Seeds_P Parameter: Age (day) Value: 4 vs. 2
  misc_feature: MA Experiment 108547 PARAMETER Experiment Name: Zm_Imbibed_Seeds_P Parameter: Organism Value: Zea mays
  misc_feature: MA Experiment 108547 PARAMETER Experiment Name: Zm_Imbibed_Seeds_P Parameter: Plant Line Value: 35A19
  misc_feature: MA Experiment 108547 PARAMETER Experiment Name: Zm_Imbibed_Seeds_P Parameter: Tissue Value: Aerial vs. Embryo
  misc_feature: MA Experiment ID: 108556 Result: Down-regulated in Transcription
  misc_feature: MA Experiment 108556 PARAMETER Experiment Name: Zm_Drought_P Parameter: Age (day) Value: 9
  misc_feature: MA Experiment 108556 PARAMETER Experiment Name: Zm_Drought_P Parameter: Organism Value: Zea mays
  misc_feature: MA Experiment 108556 PARAMETER Experiment Name: Zm_Drought_P Parameter: Plant Line Value: 35A19
  misc_feature: MA Experiment 108556 PARAMETER Experiment Name: Zm_Drought_P Parameter: Timepoint (hr) Value: 24
  misc_feature: MA Experiment 108556 PARAMETER Experiment Name: Zm_Drought_P Parameter: Tissue Value: Aerial
  misc_feature: MA Experiment 108556 PARAMETER Experiment Name: Zm_Drought_P Parameter: Treatment Value: Drought vs. No Drought
  misc_feature: MA Experiment ID: 108597 Result: Down-regulated in Transcription
  misc_feature: MA Experiment 108597 PARAMETER Experiment Name: Zm_100uM_ABA_P Parameter: Age (day) Value: 9
  misc_feature: MA Experiment 108597 PARAMETER Experiment Name: Zm_100uM_ABA_P Parameter: Organism Value: Zea mays
  misc_feature: MA Experiment 108597 PARAMETER Experiment Name: Zm_100uM_ABA_P Parameter: Plant Line Value: 35A19
  misc_feature: MA Experiment 108597 PARAMETER Experiment Name: Zm_100uM_ABA_P Parameter: Timepoint (hr) Value: 24
  misc_feature: MA Experiment 108597 PARAMETER Experiment Name: Zm_100uM_ABA_P Parameter: Tissue Value: Aerial
  misc_feature: MA Experiment 108597 PARAMETER Experiment Name: Zm_100uM_ABA_P Parameter: Treatment Value: 100uM ABA vs. No Treatment
  misc_feature: MA Experiment ID: 108687 Result: Down-regulated in Transcription
  misc_feature: MA Experiment 108687 PARAMETER Experiment Name: Zm_Embryos-Flowers__P Parameter: Tissue Value: Embryo vs. Aerial+
  misc_feature: MA Experiment ID: 20000478 Result: Down-regulated in Transcription
  misc_feature: MA Experiment 20000478 PARAMETER Experiment Name: Zm_5mM_SA_P Parameter: Age (day) Value: 11
  misc_feature: MA Experiment 20000478 PARAMETER Experiment Name: Zm_5mM_SA_P Parameter: Organism Value: Zea mays
  misc_feature: MA Experiment 20000478 PARAMETER Experiment Name: Zm_5mM_SA_P Parameter: Plant Line Value: 35A19
  misc_feature: MA Experiment 20000478 PARAMETER Experiment Name: Zm_5mM_SA_P Parameter: Timepoint (hr) Value: 72
  misc_feature: MA Experiment 20000478 PARAMETER Experiment Name: Zm_5mM_SA_P Parameter: Tissue Value: Aerial
  misc_feature: MA Experiment 20000478 PARAMETER Experiment Name: Zm_5mM_SA_P Parameter: Treatment Value: 5mM SA vs. No Treatment
  misc_feature: MA Experiment ID: 20000487 Result: Down-regulated in Transcription
  misc_feature: MA Experiment 20000487 PARAMETER Experiment Name: Zm_50mM_NH4NO3_L_to_H_P Parameter: Organism Value: Zea mays
  misc_feature: MA Experiment 20000487 PARAMETER Experiment Name: Zm_50mM_NH4NO3_L_to_H_P Parameter: Timepoint (hr) Value: 4
  misc_feature: MA Experiment 20000487 PARAMETER Experiment Name: Zm_50mM_NH4NO3_L_to_H_P Parameter: Tissue Value: Leaves
  misc_feature: MA Experiment 20000487 PARAMETER Experiment Name: Zm_50mM_NH4NO3_L_to_H_P Parameter: Treatment Value: 50mM NH4NO3 vs. 100mM Mannitol
  misc_feature: MA Experiment ID: 20000626 Result: Down-regulated in Transcription
  misc_feature: MA Experiment 20000626 PARAMETER Experiment Name: Zm_Herbicide-Treatments_P Parameter: Timepoint (hr) Value: 12
  misc_feature: MA Experiment 20000626 PARAMETER Experiment Name: Zm_Herbicide-Treatments_P Parameter: Tissue Value: Aerial
  misc_feature: MA Experiment 20000626 PARAMETER Experiment Name: Zm_Herbicide-Treatments_P Parameter: Treatment Value: Roundup vs. No Treatment
  misc_feature: MA Experiment ID: 20000632 Result: Down-regulated in Transcription
  misc_feature: MA Experiment 20000632 PARAMETER Experiment Name: Zm_Herbicide-Treatments_P Parameter: Timepoint (hr) Value: 4
  misc_feature: MA Experiment 20000632 PARAMETER Experiment Name: Zm_Herbicide-Treatments_P Parameter: Tissue Value: Aerial
  misc_feature: MA Experiment 20000632 PARAMETER Experiment Name: Zm_Herbicide-Treatments_P Parameter: Treatment Value: Glean vs. No Treatment
gcacgagaccattacctagaacatcntaatcgaaaaactcgtcacaagctctctttcatcgcatccaccattccacttccaccccacgaggatccagcctgcctgtccctctcgccgcacgccacaaccgtagtcgctcgccggcgtatctagcctagccggggcctgggcctccgcgctcgtgctcccgggaaacaacgaccgacgcgtcctcatagtcatagaggcagctaaggcagccacgcattcgtcactcgctcgaccggcgatggcgagaggtggcacggcgggcgcgggcgcgggcggggaggggagggcggctagcgaggcgctgacggcggactcagccgacgaggaggggcgccgcgggagcagctccagcgccagctccgacgccgcctccagcttctcctgcacgtactccccggccccgcccgacgagtggcacaaggtggccatcatcaagacctgcgtgtctgtgtcggccgacgccgcgggcggcggcggcggcaaggaccagaagccgcgcggcgtcgtcgccgcggccgacaggcacggaggagcatcagagatggagatgatgaaggagcggttctccaagctgctgctcggcgaggacatgtccgggagcggcaagggcgtctgcaccgcgctcgccatctccaacgccgtcaccaacctctgcgcgacggtgttcggccagctctggaggctggagccgctgccgccggagaagaaggccatgtggcggcgcgagttggactgcctgctctgcgtcagcgaccacatcgtggagctggtgcccacgtggcagacattcccggatggtacaaggcttgagatcatgacaagcaggccgcggtctgatctgtacatcaacctgccggcgcttcggaagctagacaacatgctcctcgaaatcctggaaggtttcagggacgtcgagttctggtacgtggaccagggcatctgtgcgccggactgcgacagctccgcgtcctaccggagaacgttccaccgccgcgacgacaagtggtggctgccggtgccgcacgtgccccacggcggtctccgcgaggccacgcggaggcagctggagcaccgtcgcgactgcgccagccagatcctcaaggccgccatggccatcaacagcaacgcactggccgagatggccgtgccggtctcctacctcgactcgctgccaaagaacgggcgcgcggcgctgggcgacgtcatctaccggtacatcacctcggaccagttctcccaggactgcctcctcgactgcctcgacctgtcgtcggaataccaggcgctggagatcgccaaccgcgtcgaggcctccatctacgtgtggcgccggaaggggggcggcggcgccagatcgtcctggggcatcgtgaaggacatggtcatggacacggagaagagggacctgctcgccgagcgcgcggaggcgctgctcatgtccctcaagcagcggttccccgggctcactcagacgagcttggacatgagcaagatccagtacaacaaggacgtgggcaaatcgatcctcgagagctactcgagggtcctggagagcctggcctccaacatcatcgcgcggatcgacgacctgctcaacgtcgacgagctgagcaagcaaccagctgacagcatcccgtccgccggagcggacgcgaaggttgcgtgcaagagcaacggcagcaagcaggccacggcggtgcctgcctcgggcacgccgtacgcgacggcgtacgccacgccgagcttctcgccggcgcagctgtcgagcccgtccaagatcgggagggccctgctggtcgaccgccggtcgcaccacgttgccggagctaagagggcaacggcgtccgcggctgatcgcgctggcgtggaggtggtcaagggaatggtggtcgacggcagcagcgccatattcgatatcatcccgatagctgtcccagcaaagatatgaagagtccgctcgtctgtgcggaccagatacgtcatacgtgttgtgttggcgtgaagtagtgggtttactgtagcatccgagggcgatttctcttgttgccgatggcagccctccgcttgcgactgtaatgcttttggtgcggtgtcgtgtagtatgttacacgtagagttttctgtatctgtcagatgttcgttggatgaaagcaccgccgacactggtcgtcggctgtcgcggagtaagattatgtcaccacactcacgatctcactcctatttcaaactactacactttacaaaaaaaaaaaaaaaaaaaaagaaaa

SEQ ID NO: 17614 - protein, 569 aa, Zea mays subsp. mays
  peptide (1)..(569): Ceres Seq. ID no. 12375194
  misc_feature (100)..(459): Pfam Name: Domain of unknown function (DUF315) Pfam Description: Domain of unknown function (DUF315)
  misc_feature (101)..(455): Homolog of NCBI NO: 33146611 NR Description: hypothetical protein [Oryza sativa (japonica
  misc_feature (101)..(456): Homolog of NCBI NO: 15236138 NR Description: putative protein; protein id: At4g00460.1
  misc_feature (25)..(460): Homolog of NCBI NO: 38345761 NR Description: OSJNBa0065O17.14 [Oryza sativa (japonica
  misc_feature (11)..(460): Homolog of NCBI NO: 37536670 NR Description: hypothetical protein [Oryza sativa (japonica
  misc_feature (20)..(518): Homolog of NCBI NO: 15228166 NR Description: putative protein; protein id: At3g55660.1
  misc_feature (100)..(542): Homolog of NCBI NO: 15810309 NR Description: unknown protein [Arabidopsis thaliana]
  misc_feature (100)..(542): Homolog of NCBI NO: 15233845 NR Description: putative protein
  misc_feature (101)..(513): Homolog of NCBI NO: 15239292 NR Description: putative protein; protein id: At5g05940.1
  misc_feature (100)..(514): Homolog of NCBI NO: 15241663 NR Description: putative protein; protein id: At5g02010.1
  misc_feature (29)..(553): Homolog of NCBI NO: 34908302 NR Description: P0005H10.23 [Oryza sativa (japonica
MARGGTAGAGAGGEGRAASEALTADSADEEGRRGSSSSASSDAASSFSCTYSPAPPDEWHKVAIIKTCVSVSADAAGGGGGKDQKPRGVVAAADRHGGASEMEMMKERFSKLLLGEDMSGSGKGVCTALAISNAVTNLCATVFGQLWRLEPLPPEKKAMWRRELDCLLCVSDHIVELVPTWQTFPDGTRLEIMTSRPRSDLYINLPALRKLDNMLLEILEGFRDVEFWYVDQGICAPDCDSSASYRRTFHRRDDKWWLPVPHVPHGGLREATRRQLEHRRDCASQILKAAMAINSNALAEMAVPVSYLDSLPKNGRAALGDVIYRYITSDQFSQDCLLDCLDLSSEYQALEIANRVEASIYVWRRKGGGGARSSWGIVKDMVMDTEKRDLLAERAEALLMSLKQRFPGLTQTSLDMSKIQYNKDVGKSILESYSRVLESLASNIIARIDDLLNVDELSKQPADSIPSAGADAKVACKSNGSKQATAVPASGTPYATAYATPSFSPAQLSSPSKIGRALLVDRRSHHVAGAKRATASAADRAGVEVVKGMVVDGSSAIFDIIPIAVPAKI

SEQ ID NO: 17615 - protein, 468 aa, Zea mays subsp. mays
  peptide (1)..(468): Ceres Seq. ID no. 12375195
  misc_feature (1)..(358): Pfam Name: Domain of unknown function (DUF315) Pfam Description: Domain of unknown function (DUF315)
  misc_feature (1)..(354): Homolog of NCBI NO: 33146611 NR Description: hypothetical protein [Oryza sativa (japonica
  misc_feature (1)..(355): Homolog of NCBI NO: 15236138 NR Description: putative protein; protein id: At4g00460.1
  misc_feature (1)..(359): Homolog of NCBI NO: 38345761 NR Description: OSJNBa0065O17.14 [Oryza sativa (japonica
  misc_feature (1)..(359): Homolog of NCBI NO: 37536670 NR Description: hypothetical protein [Oryza sativa (japonica
  misc_feature (1)..(417): Homolog of NCBI NO: 15228166 NR Description: putative protein; protein id: At3g55660.1
  misc_feature (1)..(441): Homolog of NCBI NO: 15810309 NR Description: unknown protein [Arabidopsis thaliana]
  misc_feature (1)..(441): Homolog of NCBI NO: 15233845 NR Description: putative protein
  misc_feature (1)..(412): Homolog of NCBI NO: 15239292 NR Description: putative protein; protein id: At5g05940.1
  misc_feature (1)..(413): Homolog of NCBI NO: 15241663 NR Description: putative protein; protein id: At5g02010.1
  misc_feature (1)..(452): Homolog of NCBI NO: 34908302 NR Description: P0005H10.23 [Oryza sativa (japonica
MEMMKERFSKLLLGEDMSGSGKGVCTALAISNAVTNLCATVFGQLWRLEPLPPEKKAMWRRELDCLLCVSDHIVELVPTWQTFPDGTRLEIMTSRPRSDLYINLPALRKLDNMLLEILEGFRDVEFWYVDQGICAPDCDSSASYRRTFHRRDDKWWLPVPHVPHGGLREATRRQLEHRRDCASQILKAAMAINSNALAEMAVPVSYLDSLPKNGRAALGDVIYRYITSDQFSQDCLLDCLDLSSEYQALEIANRVEASIYVWRRKGGGGARSSWGIVKDMVMDTEKRDLLAERAEALLMSLKQRFPGLTQTSLDMSKIQYNKDVGKSILESYSRVLESLASNIIARIDDLLNVDELSKQPADSIPSAGADAKVACKSNGSKQATAVPASGTPYATAYATPSFSPAQLSSPSKIGRALLVDRRSHHVAGAKRATASAADRAGVEVVKGMVVDGSSAIFDIIPIAVPAKI

SEQ ID NO: 17616 - protein, 466 aa, Zea mays subsp. mays
  peptide (1)..(466): Ceres Seq. ID no. 12375196
  misc_feature (1)..(356): Pfam Name: Domain of unknown function (DUF315) Pfam Description: Domain of unknown function (DUF315)
  misc_feature (1)..(352): Homolog of NCBI NO: 33146611 NR Description: hypothetical protein [Oryza sativa (japonica
  misc_feature (1)..(353): Homolog of NCBI NO: 15236138 NR Description: putative protein; protein id: At4g00460.1
  misc_feature (1)..(357): Homolog of NCBI NO: 38345761 NR Description: OSJNBa0065O17.14 [Oryza sativa (japonica
  misc_feature (1)..(357): Homolog of NCBI NO: 37536670 NR Description: hypothetical protein [Oryza sativa (japonica
  misc_feature (1)..(415): Homolog of NCBI NO: 15228166 NR Description: putative protein; protein id: At3g55660.1
  misc_feature (1)..(439): Homolog of NCBI NO: 15810309 NR Description: unknown protein [Arabidopsis thaliana]
  misc_feature (1)..(439): Homolog of NCBI NO: 15233845 NR Description: putative protein
  misc_feature (1)..(410): Homolog of NCBI NO: 15239292 NR Description: putative protein; protein id: At5g05940.1
  misc_feature (1)..(411): Homolog of NCBI NO: 15241663 NR Description: putative protein; protein id: At5g02010.1
  misc_feature (1)..(450): Homolog of NCBI NO: 34908302 NR Description: P0005H10.23 [Oryza sativa (japonica
MMKERFSKLLLGEDMSGSGKGVCTALAISNAVTNLCATVFGQLWRLEPLPPEKKAMWRRELDCLLCVSDHIVELVPTWQTFPDGTRLEIMTSRPRSDLYINLPALRKLDNMLLEILEGFRDVEFWYVDQGICAPDCDSSASYRRTFHRRDDKWWLPVPHVPHGGLREATRRQLEHRRDCASQILKAAMAINSNALAEMAVPVSYLDSLPKNGRAALGDVIYRYITSDQFSQDCLLDCLDLSSEYQALEIANRVEASIYVWRRKGGGGARSSWGIVKDMVMDTEKRDLLAERAEALLMSLKQRFPGLTQTSLDMSKIQYNKDVGKSILESYSRVLESLASNIIARIDDLLNVDELSKQPADSIPSAGADAKVACKSNGSKQATAVPASGTPYATAYATPSFSPAQLSSPSKIGRALLVDRRSHHVAGAKRATASAADRAGVEVVKGMVVDGSSAIFDIIPIAVPAKI

SEQ ID NO: 17617 - DNA, 2429 bp, Zea mays subsp. mays
  misc_feature (1)..(2429): Ceres Seq. ID no. 12366265
  misc_feature: MA Experiment ID: 108556 Result: Down-regulated in Transcription
  misc_feature: MA Experiment 108556 PARAMETER Experiment Name: Zm_Drought_P Parameter: Age (day) Value: 9
  misc_feature: MA Experiment 108556 PARAMETER Experiment Name: Zm_Drought_P Parameter: Organism Value: Zea mays
  misc_feature: MA Experiment 108556 PARAMETER Experiment Name: Zm_Drought_P Parameter: Plant Line Value: 35A19
  misc_feature: MA Experiment 108556 PARAMETER Experiment Name: Zm_Drought_P Parameter: Timepoint (hr) Value: 24
  misc_feature: MA Experiment 108556 PARAMETER Experiment Name: Zm_Drought_P Parameter: Tissue Value: Aerial
  misc_feature: MA Experiment 108556 PARAMETER Experiment Name: Zm_Drought_P Parameter: Treatment Value: Drought vs. No Drought
gcacgagaccattacctagaacatcctaatcgaaaaaagacaagaccataaagattactcatagattaaagtagggtttggacgtctgcctgtccatttcggcgtctgttcttagcggccgacaagcggaatctggatcaagtcccctgcttcaacccatcccctctcatcgattcattgccacaaggcagctgattgctcacagcgttggatgtgagaattggattcggacccaccgatcgatatgccgttcggccacacgcggctcgatgtccggcgtccgccgcagtcgtcctacctctgctgctccacaaccaccgtcgccgtattcgtcgcgctctgcctggtggctgtgtggatggcgtcgtccatgctcgtcacccctgccgagttccctccatttcagtccaaagtgcgtccactgaggcctcatgactctcctcctgccaccggaagcttaaccagtgctgatcagggcgatggcatcaccacccatgatgatccaccacctgctacacaacaattgcctcctgtaacagacagcatggatggtgaaaatcagcaacaagaacttttcactacagagcgcggaccatggtcaaccaaggctgaacaatctaacaaggacgctaaagagcaaaccttgacgtccagtagcccactgagcttccgttgggcgttatgcaacgtcgatgctggagcagattatatttccatgcctcgacaacgtagcagctatcaagaagctccgttccaccaagcactacgaacaccgagaaaggcattgccccgagaaatctcctacctgccttgttcctctaccagagggctacaggaatccaattaggtggccaaagagcagagatcagatatggtacaataacgttcctcatactaagctggttgaatacaagggacaccaaaactgggttaaggtttctggagaatacctcaccttccccggaggcgggactcagtttaaacatggtgcgttgcgctacattgattttattcaggaggcaaagaaggatgtagcatggggaaaacgaagccgtgtagtgttagatgttggttgtggagtagctagctttggaggatatctatttgacagagatgtgattactatgtcatttgcacctaaagatgagcacgaagctcaggttcagtttgctcttgaaagaggaatacctgctatatcagctgtcatgggtacaaaaaggctcccatttcccagtagggtgtttgatgttgttcattgtgcacgatgtagggtaccgtggcatattgaaggcggtaaactcttgcttgaactggacagactgttacgtcctggtggttactttgtgtggtctgctacacccgtataccagaagctgcctgaagatgttgagatatggcaagccatgtctgctctaaccagttcaatgtgctggaaaatggtcaacaaagtaaaggatagggtgaatagagtgggtatagcaatttacagaaagccaacagacaacagctgctacgaagcaagatctgaaacaaaccctccactctgtggagagtacgacgatcctgatgctgcctggaacatatcgttgggggcttgtatgcataagttgcctgtagatcctaccgttcgtggttcacagtggcctgagttatggccattgagactggagaaaccaccttattggctgagaggttctgaggctggagtatatgggaaacctgccccggaggattttcaagcagactatgaacactggaagcgagtcgtgagcaattcatacatgaatggtttgggtattgactggtctactgttagaaatgttatggatatgaaagccgtatatgcagggttcgcagcagctttgcgcgatctcaaggtgtgggtcatgaatgtggttccaattgattcacctgacacgcttccaattatatatgagcgcgggctgtttggactgtaccatgactggtgtgagtcgtttagcacctatccgagaacttatgatcttgtgcacgccaaccatctgttctccaaggttaagaagaggtgcgagctattacctgttatcgtggaggtggaccgggtgttgaggccacaaggccggctaattgtcagagacaacattgaaacaacaagtgaggtggagaacattctgaaatctctccactgggaggtccgcatgtcttacttccaggagaaagaaggcttgctgttggtgcagaagacgacatggcggccaaatgaaactgaagctaagctatgatgcagagcccttgccccttggaaggaggaaaggaagatctagtgtttgcaaggtcctctacttttgtgaggcatcttttatttatgtagaatttgtagagctatatgattggtagatgtggaggaatctggtggtttccagcatatccatattcatctgtggaagtcg

SEQ ID NO: 17618 - protein, 522 aa, Zea mays subsp. mays
  peptide (1)..(522): Ceres Seq. ID no. 12366266
  misc_feature (8)..(510): Pfam Name: Putative methyltransferase Pfam Description: Putative methyltransferase
  misc_feature (8)..(496): Homolog of NCBI NO: 25408683 NR Description: hypothetical protein At2g40280 [imported] -
  misc_feature (8)..(496): Homolog of NCBI NO: 18405331 NR Description: expressed protein
  misc_feature (8)..(519): Homolog of NCBI NO: 15226271 NR Description: unknown protein; protein id: At2g34300.1
  misc_feature (8)..(519): Homolog of NCBI NO: 30690755 NR Description: dehydration-induced protein-related [Arabidopsis
  misc_feature (8)..(519): Homolog of NCBI NO: 25403070 NR Description: unknown protein, 55790-52851 [imported] -
  misc_feature (8)..(519): Homolog of NCBI NO: 15230391 NR Description: putative protein; protein id: At3g51070.1
  misc_feature (8)..(519): Homolog of NCBI NO: 30697941 NR Description: dehydration-induced protein-related [Arabidopsis
  misc_feature (8)..(522): Homolog of NCBI NO: 20161455 NR Description: ankyrin-like protein [Oryza sativa (japonica
  misc_feature (452)..(522): Homolog of NCBI NO: 38567836 NR Description: OSJNBb0020J19.14 [Oryza sativa (japonica
  misc_feature (8)..(491): Homolog of NCBI NO: 38567836 NR Description: OSJNBb0020J19.14 [Oryza sativa (japonica
MLEQIIFPCLDNVAAIKKLRSTKHYEHRERHCPEKSPTCLVPLPEGYRNPIRWPKSRDQIWYNNVPHTKLVEYKGHQNWVKVSGEYLTFPGGGTQFKHGALRYIDFIQEAKKDVAWGKRSRVVLDVGCGVASFGGYLFDRDVITMSFAPKDEHEAQVQFALERGIPAISAVMGTKRLPFPSRVFDVVHCARCRVPWHIEGGKLLLELDRLLRPGGYFVWSATPVYQKLPEDVEIWQAMSALTSSMCWKMVNKVKDRVNRVGIAIYRKPTDNSCYEARSETNPPLCGEYDDPDAAWNISLGACMHKLPVDPTVRGSQWPELWPLRLEKPPYWLRGSEAGVYGKPAPEDFQADYEHWKRVVSNSYMNGLGIDWSTVRNVMDMKAVYAGFAAALRDLKVWVMNVVPIDSPDTLPIIYERGLFGLYHDWCESFSTYPRTYDLVHANHLFSKVKKRCELLPVIVEVDRVLRPQGRLIVRDNIETTSEVENILKSLHWEVRMSYFQEKEGLLLVQKTTWRPNETEAKL

SEQ ID NO: 17619 - protein, 378 aa, Zea mays subsp. mays
  peptide (1)..(378): Ceres Seq. ID no. 12366267
  misc_feature (1)..(366): Pfam Name: Putative methyltransferase Pfam Description: Putative methyltransferase
  misc_feature (1)..(352): Homolog of NCBI NO: 25408683 NR Description: hypothetical protein At2g40280 [imported] -
  misc_feature (1)..(352): Homolog of NCBI NO: 18405331 NR Description: expressed protein
  misc_feature (1)..(375): Homolog of NCBI NO: 15226271 NR Description: unknown protein; protein id: At2g34300.1
  misc_feature (1)..(375): Homolog of NCBI NO: 30690755 NR Description: dehydration-induced protein-related [Arabidopsis
  misc_feature (1)..(375): Homolog of NCBI NO: 25403070 NR Description: unknown protein, 55790-52851 [imported] -
  misc_feature (1)..(375): Homolog of NCBI NO: 15230391 NR Description: putative protein; protein id: At3g51070.1
  misc_feature (1)..(375): Homolog of NCBI NO: 30697941 NR Description: dehydration-induced protein-related [Arabidopsis
  misc_feature (1)..(378): Homolog of NCBI NO: 20161455 NR Description: ankyrin-like protein [Oryza sativa (japonica
  misc_feature (308)..(378): Homolog of NCBI NO: 38567836 NR Description: OSJNBb0020J19.14 [Oryza sativa (japonica
  misc_feature (1)..(347): Homolog of NCBI NO: 38567836 NR Description: OSJNBb0020J19.14 [Oryza sativa (japonica
MSFAPKDEHEAQVQFALERGIPAISAVMGTKRLPFPSRVFDVVHCARCRVPWHIEGGKLLLELDRLLRPGGYFVWSATPVYQKLPEDVEIWQAMSALTSSMCWKMVNKVKDRVNRVGIAIYRKPTDNSCYEARSETNPPLCGEYDDPDAAWNISLGACMHKLPVDPTVRGSQWPELWPLRLEKPPYWLRGSEAGVYGKPAPEDFQADYEHWKRVVSNSYMNGLGIDWSTVRNVMDMKAVYAGFAAALRDLKVWVMNVVPIDSPDTLPIIYERGLFGLYHDWCESFSTYPRTYDLVHANHLFSKVKKRCELLPVIVEVDRVLRPQGRLIVRDNIETTSEVENILKSLHWEVRMSYFQEKEGLLLVQKTTWRPNETEAKL

SEQ ID NO: 17620 - protein, 351 aa, Zea mays subsp. mays
  peptide (1)..(351): Ceres Seq. ID no. 12366268
  misc_feature (1)..(339): Pfam Name: Putative methyltransferase Pfam Description: Putative methyltransferase
  misc_feature (1)..(325): Homolog of NCBI NO: 25408683 NR Description: hypothetical protein At2g40280 [imported] -
  misc_feature (1)..(325): Homolog of NCBI NO: 18405331 NR Description: expressed protein
  misc_feature (1)..(348): Homolog of NCBI NO: 15226271 NR Description: unknown protein; protein id: At2g34300.1
  misc_feature (1)..(348): Homolog of NCBI NO: 30690755 NR Description: dehydration-induced protein-related [Arabidopsis
  misc_feature (1)..(348): Homolog of NCBI NO: 25403070 NR Description: unknown protein, 55790-52851 [imported] -
  misc_feature (1)..(348): Homolog of NCBI NO: 15230391 NR Description: putative protein; protein id: At3g51070.1
  misc_feature (1)..(348): Homolog of NCBI NO: 30697941 NR Description: dehydration-induced protein-related [Arabidopsis
  misc_feature (1)..(351): Homolog of NCBI NO: 20161455 NR Description: ankyrin-like protein [Oryza sativa (japonica
  misc_feature (281)..(351): Homolog of NCBI NO: 38567836 NR Description: OSJNBb0020J19.14 [Oryza sativa (japonica
  misc_feature (1)..(320): Homolog of NCBI NO: 38567836 NR Description: OSJNBb0020J19.14 [Oryza sativa (japonica
MGTKRLPFPSRVFDVVHCARCRVPWHIEGGKLLLELDRLLRPGGYFVWSATPVYQKLPEDVEIWQAMSALTSSMCWKMVNKVKDRVNRVGIAIYRKPTDNSCYEARSETNPPLCGEYDDPDAAWNISLGACMHKLPVDPTVRGSQWPELWPLRLEKPPYWLRGSEAGVYGKPAPEDFQADYEHWKRVVSNSYMNGLGIDWSTVRNVMDMKAVYAGFAAALRDLKVWVMNVVPIDSPDTLPIIYERGLFGLYHDWCESFSTYPRTYDLVHANHLFSKVKKRCELLPVIVEVDRVLRPQGRLIVRDNIETTSEVENILKSLHWEVRMSYFQEKEGLLLVQKTTWRPNETEAKL

SEQ ID NO: 17621 - DNA, 1872 bp, Zea mays subsp. mays
  misc_feature (1)..(1872): Ceres Seq. ID no. 12366269
  misc_feature: MA Experiment ID: 108522 Result: Down-regulated in Transcription
  misc_feature: MA Experiment 108522 PARAMETER Experiment Name: Zm_42deg_Heat_P Parameter: Age (day) Value: 8
  misc_feature: MA Experiment 108522 PARAMETER Experiment Name: Zm_42deg_Heat_P Parameter: Organism Value: Zea mays
  misc_feature: MA Experiment 108522 PARAMETER Experiment Name: Zm_42deg_Heat_P Parameter: Plant Line Value: 35A19
  misc_feature: MA Experiment 108522 PARAMETER Experiment Name: Zm_42deg_Heat_P Parameter: Temperature (deg C) Value: 42 vs. 22
  misc_feature: MA Experiment 108522 PARAMETER Experiment Name: Zm_42deg_Heat_P Parameter: Timepoint (hr) Value: 1
  misc_feature: MA Experiment 108522 PARAMETER Experiment Name: Zm_42deg_Heat_P Parameter: Tissue Value: Aerial
  misc_feature: MA Experiment ID: 108527 Result: Down-regulated in Transcription
  misc_feature: MA Experiment 108527 PARAMETER Experiment Name: Zm_5mM_NO_P Parameter: Age (day) Value: 8
  misc_feature: MA Experiment 108527 PARAMETER Experiment Name: Zm_5mM_NO_P Parameter: Organism Value: Zea mays
  misc_feature: MA Experiment 108527 PARAMETER Experiment Name: Zm_5mM_NO_P Parameter: Plant Line Value: 35A19
  misc_feature: MA Experiment 108527 PARAMETER Experiment Name: Zm_5mM_NO_P Parameter: Timepoint (hr) Value: 6
  misc_feature: MA Experiment 108527 PARAMETER Experiment Name: Zm_5mM_NO_P Parameter: Tissue Value: Aerial
  misc_feature: MA Experiment 108527 PARAMETER Experiment Name: Zm_5mM_NO_P Parameter: Treatment Value: 5mM NO vs. No Treatment
  misc_feature: MA Experiment ID: 108544 Result: Down-regulated in Transcription
  misc_feature: MA Experiment ID: 108556 Result: Down-regulated in Transcription
  misc_feature: MA Experiment 108556 PARAMETER Experiment Name: Zm_Drought_P Parameter: Age (day) Value: 9
  misc_feature: MA Experiment 108556 PARAMETER Experiment Name: Zm_Drought_P Parameter: Organism Value: Zea mays
  misc_feature: MA Experiment 108556 PARAMETER Experiment Name: Zm_Drought_P Parameter: Plant Line Value: 35A19
  misc_feature: MA Experiment 108556 PARAMETER Experiment Name: Zm_Drought_P Parameter: Timepoint (hr) Value: 24
  misc_feature: MA Experiment 108556 PARAMETER Experiment Name: Zm_Drought_P Parameter: Tissue Value: Aerial
  misc_feature: MA Experiment 108556 PARAMETER Experiment Name: Zm_Drought_P Parameter: Treatment Value: Drought vs. No Drought
  misc_feature: MA Experiment ID: 20000477 Result: Down-regulated in Transcription
  misc_feature: MA Experiment 20000477 PARAMETER Experiment Name: Zm_5mM_SA_P Parameter: Age (day) Value: 10
  misc_feature: MA Experiment 20000477 PARAMETER Experiment Name: Zm_5mM_SA_P Parameter: Organism Value: Zea mays
  misc_feature: MA Experiment 20000477 PARAMETER Experiment Name: Zm_5mM_SA_P Parameter: Plant Line Value: 35A19
  misc_feature: MA Experiment 20000477 PARAMETER Experiment Name: Zm_5mM_SA_P Parameter: Timepoint (hr) Value: 48
  misc_feature: MA Experiment 20000477 PARAMETER Experiment Name: Zm_5mM_SA_P Parameter: Tissue Value: Aerial
  misc_feature: MA Experiment 20000477 PARAMETER Experiment Name: Zm_5mM_SA_P Parameter: Treatment Value: 5mM SA vs. No Treatment
  misc_feature: MA Experiment ID: 20000534 Result: Down-regulated in Transcription
  misc_feature: MA Experiment 20000534 PARAMETER Experiment Name: Zm_Hybrid_Pollen_P Parameter: Age (day) Value: 8
  misc_feature: MA Experiment 20000534 PARAMETER Experiment Name: Zm_Hybrid_Pollen_P Parameter: Organism Value: Zea mays
  misc_feature: MA Experiment 20000534 PARAMETER Experiment Name: Zm_Hybrid_Pollen_P Parameter: Plant Line Value: 35A19
  misc_feature: MA Experiment 20000534 PARAMETER Experiment Name: Zm_Hybrid_Pollen_P Parameter: Tissue Value: Pollen vs. Aerial
  misc_feature: MA Experiment ID: 20000535 Result: Down-regulated in Transcription
  misc_feature: MA Experiment 20000535 PARAMETER Experiment Name: Zm_Hybrid_Seed_Dev_P Parameter: DAP Value: 30 vs. 12
  misc_feature: MA Experiment 20000535 PARAMETER Experiment Name: Zm_Hybrid_Seed_Dev_P Parameter: Organism Value: Zea mays
  misc_feature: MA Experiment 20000535 PARAMETER Experiment Name: Zm_Hybrid_Seed_Dev_P Parameter: Plant Line Value: 35A19
  misc_feature: MA Experiment 20000535 PARAMETER Experiment Name: Zm_Hybrid_Seed_Dev_P Parameter: Tissue Value: Embryo vs. Unfert Floret
  misc_feature: MA Experiment ID: 20000629 Result: Up-regulated in Transcription
  misc_feature: MA Experiment 20000629 PARAMETER Experiment Name: Zm_Herbicide-Treatments_P Parameter: Timepoint (hr) Value: 12
  misc_feature: MA Experiment 20000629 PARAMETER Experiment Name: Zm_Herbicide-Treatments_P Parameter: Tissue Value: Aerial
  misc_feature: MA Experiment 20000629 PARAMETER Experiment Name: Zm_Herbicide-Treatments_P Parameter: Treatment Value: Trimec vs. No Treatment
cttttcccctctcgaaacgcaccctgcatttactgcacgtcgctcgccctccggccatccgcgatcttcaaatcttccactgtaaaaagcgggcggagacgggaaggccgtgcgctcaaggatggcgcgcgagcagctggaggagtccatcgtggccgacggcaacggcaaggaggaagaggtcggggtcatgggcatcggcgccgcggacggcgccgacgaccagcacggcggcggcaagctcagcatgaagagcctgctgtggcacggcggctccgtctgggacgcgtggttcagctgcgcctccaaccaggtggcgcaggtgctcctgacgctgccgtactccttctcccagctggggatgctgtccggcgtgctgctgcagatcttctacggcttcctgggcagctggaccgcgtacctcatcagcgtcctctacgtcgagtaccgctcccgcaaggagaaggagggcgtcagcttcaagaaccacgtcatccagtggttcgaggtgctggacgggttgctgggcccctactggaaggcggcgggtctggccttcaactgcacgttcctgctgttcggctccgtcatccagctgatcgcctgcgcgagcaacatctactacatcaacgatcggctggacaagcggacatggacgtacatcttcggcgcctgctgcgccaccacggtgttcatcccgtccttccacaactaccggatctggtccttcctgggcctcggcatgaccacctacaccgcgtggtacctcgccatcgccgcgctcctcaacggccaggccgaaggcgtggcgcactccggcccgaccaagctcgtgctctacttcaccggcgccaccaacatcctctacaccttcggcggccacgccgtcacagtcgagatcatgcacgcgatgtggaagcccgccaagttcaagtacatctacctgctggcgacgctgtacgtgttcacgctgacgctgccgtcggcggcggccatgtactgggcgttcggcgacgagctgctgacccactcgaacgccttctcgctgctgcccaagacccggtggcgcgacgcggcggtgatcctgatgctgatccaccagttcatcaccttcggcttcgcgtgcacgccgctctacttcgtgtgggagaaggtgatcgggatgcacgacgccaagagcatcttcaagcgcgcgctggcgaggctgcccatcgtcgtgcccatctggttcctcgccatcatcttcccccttcttcgggcccatcaactccgccgtcggcgcgctgctcgtcagcttcaccgtctacatcatcccggccctggcgcacgtcctcacctaccgcacggcgtccgcgcgcatgaacgccgcggagaagccgcccttcttcctgccgagctggacggggatgttcgtcctcaacatgttcatcgtggtgtgggtgctggtggtcggcttcgggctgggcggctgggccagcatggtcaacttcgtgaggcagatcgacacgttcgggctgttcgccaagtgctaccagtgcccgaagccgccggtcccggcggccgcgcagtcgccggcgccgctgccgcaccactagggcgcgcaggcatggagctagcgtcgctgcttgcattgcagccggtgttaattgctactaggttttggtcgccttgtaatatacaagcctcctctagggtcgtagaactcgatcacagcagagtcacgcaaaggcggctcgtgccgtgccgccgccgcgttgctttcccgcccaccctcctctgcctgatcggtccgtcggcattggtgtcgttttgttttcgtttggcttgccaccggtattaaaaagttgagtgatggtcatggcttcttaatcc

SEQ ID NO: 17622 - protein, 572 aa, Zea mays subsp. mays
  peptide (1)..(572): Ceres Seq. ID no. 12366270
  misc_feature (1)..(376): Homolog of NCBI NO: 10800920 NR Description: putative AUX1-like permease [Medicago truncatula]
  misc_feature (33)..(376): Homolog of NCBI NO: 10800918 NR Description: putative AUX1-like permease [Medicago truncatula]
  misc_feature (1)..(378): Homolog of NCBI NO: 25956260 NR Description: AUX1-like auxin transport protein [Cucumis
  misc_feature (4)..(376): Homolog of NCBI NO: 5881784 NR Description: putative AUX1-like permease [Arabidopsis thaliana]
  misc_feature (7)..(376): Homolog of NCBI NO: 10441742 NR Description: putative AUX1-like permease
  misc_feature (1)..(376): Homolog of NCBI NO: 6650716 NR Description: AUX1-like protein [Populus tremula x Populus
  misc_feature (1)..(376): Homolog of NCBI NO: 21586468 NR Description: auxin influx carrier protein [Medicago truncatula]
  misc_feature (8)..(376): Homolog of NCBI NO: 18404642 NR Description: expressed protein
  misc_feature (4)..(376): Homolog of NCBI NO: 15240927 NR Description: LAX1 / AUX1 -like permease; protein id:
MAREQLEESIVADGNGKEEEVGVMGIGAADGADDQHGGGKLSMKSLLWHGGSVWDAWFSCASNQVAQVLLTLPYSFSQLGMLSGVLLQIFYGFLGSWTAYLISVLYVEYRSRKEKEGVSFKNHVIQWFEVLDGLLGPYWKAAGLAFNCTFLLFGSVIQLIACASNIYYINDRLDKRTWTYIFGACCATTVFIPSFHNYRIWSFLGLGMTTYTAWYLAIAALLNGQAEGVAHSGPTKLVLYFTGATNILYTFGGHAVTVEIMHAMWKPAKFKYIYLLATLYVFTLTLPSAAAMYWAFGDELLTHSNAFSLLPKTRWRDAAVILMLIHQFITFGFACTPLYFVWEKVIGMHDAKSIFKRALARLPIVVPIWFLAIIFPLLRAHQLRRRRAARQLHRLHHPGPGARPHLPHGVRAHERRGEAALLPAELDGDVRPQHVHRGVGAGGRLRAGRLGQHGQLREADRHVRAVRQVLPVPEAAGPGGRAVAGAAAAPLGRAGMELASLLALQPVLIATRFWSPCNIQASSRVVELDHSRVTQRRLVPCRRRVAFPPTLLCLIGPSALVSFCFRLACHRY

SEQ ID NO: 17623 - protein, 549 aa, Zea mays subsp. mays
  peptide (1)..(549): Ceres Seq. ID no. 12366271
  misc_feature (10)..(353): Homolog of NCBI NO: 10800918 NR Description: putative AUX1-like permease [Medicago truncatula]
  misc_feature (1)..(355): Homolog of NCBI NO: 25956260 NR Description: AUX1-like auxin transport protein [Cucumis
  misc_feature (1)..(353): Homolog of NCBI NO: 5881784 NR Description: putative AUX1-like permease [Arabidopsis thaliana]
  misc_feature (1)..(353): Homolog of NCBI NO: 10441742 NR Description: putative AUX1-like permease
  misc_feature (1)..(353): Homolog of NCBI NO: 6650716 NR Description: AUX1-like protein [Populus tremula x Populus
  misc_feature (1)..(353): Homolog of NCBI NO: 21586468 NR Description: auxin influx carrier protein [Medicago truncatula]
  misc_feature (1)..(353): Homolog of NCBI NO: 18404642 NR Description: expressed protein
  misc_feature (1)..(353): Homolog of NCBI NO: 15240927 NR Description: LAX1 / AUX1 -like permease; protein id:
  misc_feature (1)..(353): Homolog of NCBI NO: 10800920 NR Description: putative AUX1-like permease [Medicago truncatula]
MGIGAADGADDQHGGGKLSMKSLLWHGGSVWDAWFSCASNQVAQVLLTLPYSFSQLGMLSGVLLQIFYGFLGSWTAYLISVLYVEYRSRKEKEGVSFKNHVIQWFEVLDGLLGPYWKAAGLAFNCTFLLFGSVIQLIACASNIYYINDRLDKRTWTYIFGACCATTVFIPSFHNYRIWSFLGLGMTTYTAWYLAIAALLNGQAEGVAHSGPTKLVLYFTGATNILYTFGGHAVTVEIMHAMWKPAKFKYIYLLATLYVFTLTLPSAAAMYWAFGDELLTHSNAFSLLPKTRWRDAAVILMLIHQFITFGFACTPLYFVWEKVIGMHDAKSIFKRALARLPIVVPIWFLAIIFPLLRAHQLRRRRAARQLHRLHHPGPGARPHLPHGVRAHERRGEAALLPAELDGDVRPQHVHRGVGAGGRLRAGRLGQHGQLREADRHVRAVRQVLPVPEAAGPGGRAVAGAAAAPLGRAGMELASLLALQPVLIATRFWSPCNIQASSRVVELDHSRVTQRRLVPCRRRVAFPPTLLCLIGPSALVSFCFRLACHRY

SEQ ID NO: 17624 - protein, 530 aa, Zea mays subsp. mays
  peptide (1)..(530): Ceres Seq. ID no. 12366272
  misc_feature (1)..(334): Homolog of NCBI NO: 10800918 NR Description: putative AUX1-like permease [Medicago truncatula]
  misc_feature (1)..(336): Homolog of NCBI NO: 25956260 NR Description: AUX1-like auxin transport protein [Cucumis
  misc_feature (1)..(334): Homolog of NCBI NO: 5881784 NR Description: putative AUX1-like permease [Arabidopsis thaliana]
  misc_feature (1)..(334): Homolog of NCBI NO: 10441742 NR Description: putative AUX1-like permease
  misc_feature (1)..(334): Homolog of NCBI NO: 6650716 NR Description: AUX1-like protein [Populus tremula x Populus
  misc_feature (1)..(334): Homolog of NCBI NO: 21586468 NR Description: auxin influx carrier protein [Medicago truncatula]
  misc_feature (1)..(334): Homolog of NCBI NO: 18404642 NR Description: expressed protein
  misc_feature (1)..(334): Homolog of NCBI NO: 15240927 NR Description: LAX1 / AUX1 -like permease; protein id:
  misc_feature (1)..(334): Homolog of NCBI NO: 10800920 NR Description: putative AUX1-like permease [Medicago truncatula]
MKSLLWHGGSVWDAWFSCASNQVAQVLLTLPYSFSQLGMLSGVLLQIFYGFLGSWTAYLISVLYVEYRSRKEKEGVSFKNHVIQWFEVLDGLLGPYWKAAGLAFNCTFLLFGSVIQLIACASNIYYINDRLDKRTWTYIFGACCATTVFIPSFHNYRIWSFLGLGMTTYTAWYLAIAALLNGQAEGVAHSGPTKLVLYFTGATNILYTFGGHAVTVEIMHAMWKPAKFKYIYLLATLYVFTLTLPSAAAMYWAFGDELLTHSNAFSLLPKTRWRDAAVILMLIHQFITFGFACTPLYFVWEKVIGMHDAKSIFKRALARLPIVVPIWFLAIIFPLLRAHQLRRRRAARQLHRLHHPGPGARPHLPHGVRAHERRGEAALLPAELDGDVRPQHVHRGVGAGGRLRAGRLGQHGQLREADRHVRAVRQVLPVPEAAGPGGRAVAGAAAAPLGRAGMELASLLALQPVLIATRFWSPCNIQASSRVVELDHSRVTQRRLVPCRRRVAFPPTLLCLIGPSALVSFCFRLACHRY

SEQ ID NO: 17625 - DNA, 727 bp, Zea mays subsp. mays
  misc_feature (1)..(727): Ceres Seq. ID no. 12417192
  misc_feature: MA Experiment ID: 20000488 Result: Up-regulated in Transcription
  misc_feature: MA Experiment 20000488 PARAMETER Experiment Name: Zm_50mM_NH4NO3_L_to_H_P Parameter: Organism Value: Zea mays
  misc_feature: MA Experiment 20000488 PARAMETER Experiment Name: Zm_50mM_NH4NO3_L_to_H_P Parameter: Timepoint (hr) Value: 8
  misc_feature: MA Experiment 20000488 PARAMETER Experiment Name: Zm_50mM_NH4NO3_L_to_H_P Parameter: Tissue Value: Leaves
  misc_feature: MA Experiment 20000488 PARAMETER Experiment Name: Zm_50mM_NH4NO3_L_to_H_P Parameter: Treatment Value: 50mM NH4NO3 vs. 100mM Mannitol
gaactcaagattgcaacagggtcgtccgccgccaccaattgctagcgcaatcctagccctagcccagcgccccctccggccctccctgcttcgtgcttggtagcgatggcgtcgttttctgaagcgcccccggggaacccaactgctggcgagaagatcttcaagaccaagtgcgcgcagtgccacaccgtcgacaagggcgccggccacaagcaaggtcctaatttgaatggtctgtttgggaggcagtctggtacaacacctggctactcttactcttcggctaacaagaacatggctgtgatttgggaggagaacactttgtatgactacttgcttaatcccaagaagtacattcctggaaccaagatggtattccctggactgaaaaagccacaggaacgtgctgatctcattgcatacctgaagaatgccactgtctgacgaggatgctgctgtggctctaaagatgaagagcagcgattctctttttttgcagttaaaataatgacacgaatttactttaatttgacagactggataatcaagaaagctaagaactccaggtagttctgtaacggttttgtctattgctgggggtaaacaccacccttgaagagcttttgattagtggttgaaatgtgacatcaccataatacgtttgacctgacgagcatttaaacacacgtttgggaagcttttgattagtgttttaatgttcgttttt

SEQ ID NO: 17626 - protein, 112 aa, Zea mays subsp. mays
  peptide (1)..(112): Ceres Seq. ID no. 12417193
  misc_feature (2)..(111): Homolog of NCBI NO: 118004 NR Description: CYTOCHROME C
  misc_feature (1)..(111): Homolog of NCBI NO: 2506328 NR Description: Cytochrome c
  misc_feature (2)..(111): Homolog of NCBI NO: 350295 NR Description: cytochrome c
  misc_feature (2)..(111): Homolog of NCBI NO: 118023 NR Description: CYTOCHROME C
  misc_feature (2)..(111): Homolog of NCBI NO: 118022 NR Description: CYTOCHROME C
  misc_feature (2)..(111): Homolog of NCBI NO: 117976 NR Description: Cytochrome c
  misc_feature (2)..(111): Homolog of NCBI NO: 476417 NR Description: cytochrome c - cuckoopint
  misc_feature (2)..(111): Homolog of NCBI NO: 476418 NR Description: cytochrome c - maize
  misc_feature (2)..(111): Homolog of NCBI NO: 229737 NR Description: Cytochrome c
  misc_feature (1)..(111): Homolog of NCBI NO: 118011 NR Description: Cytochrome c
MASFSEAPPGNPTAGEKIFKTKCAQCHTVDKGAGHKQGPNLNGLFGRQSGTTPGYSYSSANKNMAVIWEENTLYDYLLNPKKYIPGTKMVFPGLKKPQERADLIAYLKNATV

SEQ ID NO: 17627 - DNA, 1787 bp, Zea mays subsp. mays
  misc_feature (1)..(1787): Ceres Seq. ID no. 13498188
  misc_feature: MA Experiment ID: 108522 Result: Up-regulated in Transcription
  misc_feature: MA Experiment 108522 PARAMETER Experiment Name: Zm_42deg_Heat_P Parameter: Age (day) Value: 8
  misc_feature: MA Experiment 108522 PARAMETER Experiment Name: Zm_42deg_Heat_P Parameter: Organism Value: Zea mays
  misc_feature: MA Experiment 108522 PARAMETER Experiment Name: Zm_42deg_Heat_P Parameter: Plant Line Value: 35A19
  misc_feature: MA Experiment 108522 PARAMETER Experiment Name: Zm_42deg_Heat_P Parameter: Temperature (deg C) Value: 42 vs. 22
  misc_feature: MA Experiment 108522 PARAMETER Experiment Name: Zm_42deg_Heat_P Parameter: Timepoint (hr) Value: 1
  misc_feature: MA Experiment 108522 PARAMETER Experiment Name: Zm_42deg_Heat_P Parameter: Tissue Value: Aerial
cctcccctcccctccctgctcctctaccccttcctctcccggcgaccagctggcctctcctttgttgaggcgagagacccccacccgatccggcgatggacgccgcgtccaggccgcctccgccccacggagcaggggtccgcgtccgcgccccgctggtggagtctgtctcctgctactgcagattagatacaggccttaaaactgttgttgaggccaggaagtttgttcctggcgcgaaaatgtgcatgcaacctgaagtcaaacaaaacaagcgcaagtcaaggggctcaaaaaaggaaaggtgcaggactcaagcaccacttttacctggccttcctgatgatcttgctattgcctgccttatacgagttcctcgacttgaacagcccaaactcaggatggtttgcaaaagatggaaccgtcttttgtctgggaattacttttactccttgcgtaagaaaattggagtggcagaagaatgggtgtatgtctttaaaagggaccgtgaagggaagatatcctggtatgcctttgatccactccaccagctatggaagtcactcccaccagttccacaagagtattcagaagcattgggctttgggtgtgccgttctgagtggttgctatctgtacttgtttggcgggaaagatcctttgaggggttctatgaggcgtgttgtattctacaatgctcgtacaaacaaatggcaccgggctccggatatgatgaggaaacgtcacttttttggttcttgtgtaataaacaattgtctctatgttgctggaggagagtgtgaaggaatacagagaacactgcagtctgcggaagtttatgatccaaataggaacagatgggcctgtgttactgaaatgaacaatgggatggtgcctttcattggagttgtatatgatggcaagtggttcttaaaggggctagattcccatcgccaagtaactagtgaggtctacttaccatcatccaatacatggtcagcaattgatgatgagatggtcacaggctggcggaacccaagtatttctttcaatggccgtctctattcagctgactgccgggatggctgcaagcttagagtctatgatgagaacacaggaacatggacaaggttcatggacagcaagcaccacttgggcagctcacgtgcctttgaagctgcagctttggtgtcactaaatgggaaactctgtgtcatcaggaacaacatgagcataactcttgttgatgtctccaacccaacaatgagtgttgagacagatagtgcgcgcatgtgggaaactgttgttcggaagggccagcacaggtcgtttgtggcgaacttatggtcgagcattgcaggacggaacttaaagagtcacattatccattgccatgtgctgcaagtttgagggcaggttttgttagtgggaacatgatcaagttttttaagaagcaaaaggttcagatcagtgacagaaccctccatttcgaaggtagtaaggtttcattgcagaatcgcggggaaaaaggtcattggcgtgccactgctgcccccaaagtcccaaatagttatttgctctcttccagaactgaaaattccaattactttctggcaacatttgaagactcttatcattaatggataaggtttttcagattttgagtgcaaaccagaaagtgagtaggaacttccctagtgtaatgacattttccccttgctggcaggctgggaaatgtgtttggtggatatattggtctcttatcatatttatctatctttgcattgt

SEQ ID NO: 17628 - protein, 437 aa, Zea mays subsp. mays
  peptide (1)..(437): Ceres Seq. ID no. 13498189
  misc_feature (167)..(213): Pfam Name: Kelch motif Pfam Description: Kelch motif
  misc_feature (167)..(213): Pfam Name: Kelch motif Pfam Description: Kelch motif
  misc_feature (73)..(344): Homolog of NCBI NO: 15223520 NR Description: Kelch repeat containing F-box protein family
  misc_feature (64)..(403): Homolog of NCBI NO: 18397351 NR Description: Kelch repeat containing F-box protein family
  misc_feature (65)..(371): Homolog of NCBI NO: 15220452 NR Description: Kelch repeat containing F-box protein family
  misc_feature (65)..(371): Homolog of NCBI NO: 7487225 NR Description: hypothetical protein T1F15.5 - Arabidopsis
  misc_feature (73)..(387): Homolog of NCBI NO: 26453288 NR Description: putative SKP1 interacting partner 4 SKIP4
  misc_feature (73)..(344): Homolog of NCBI NO: 15223520 NR Description: Kelch repeat containing F-box protein family
  misc_feature (65)..(371): Homolog of NCBI NO: 15220452 NR Description: Kelch repeat containing F-box protein family
  misc_feature (73)..(387): Homolog of NCBI NO: 26453288 NR Description: putative SKP1 interacting partner 4 SKIP4
  misc_feature (1)..(437): Homolog of NCBI NO: 37534254 NR Description: unknown protein [Oryza sativa (japonica
  misc_feature (22)..(437): Homolog of NCBI NO: 19071626 NR Description: putative Kelch motif containing protein
  misc_feature (1)..(436): Homolog of NCBI NO: 18405298 NR Description: Kelch repeat containing F-box protein family
  misc_feature (1)..(403): Homolog of NCBI NO: 25405811 NR Description: unknown protein, 58496-60308 [imported] -
  misc_feature (73)..(387): Homolog of NCBI NO: 18411974 NR Description: SKP1 interacting partner 4 (SKIP4), putative
  misc_feature (65)..(371): Homolog of NCBI NO: 7487225 NR Description: hypothetical protein T1F15.5 - Arabidopsis
  misc_feature (64)..(403): Homolog of NCBI NO: 18397351 NR Description: Kelch repeat containing F-box protein family
  misc_feature (73)..(387): Homolog of NCBI NO: 18411974 NR Description: SKP1 interacting partner 4 (SKIP4), putative
  misc_feature (1)..(403): Homolog of NCBI NO: 25405811 NR Description: unknown protein, 58496-60308 [imported] -
  misc_feature (1)..(436): Homolog of NCBI NO: 18405298 NR Description: Kelch repeat containing F-box protein family
  misc_feature (22)..(437): Homolog of NCBI NO: 19071626 NR Description: putative Kelch motif containing protein
  misc_feature (1)..(437): Homolog of NCBI NO: 37534254 NR Description: unknown protein [Oryza sativa (japonica
MDAASRPPPPHGAGVRVRAPLVESVSCYCRLDTGLKTVVEARKFVPGAKMCMQPEVKQNKRKSRGSKKERCRTQAPLLPGLPDDLAIACLIRVPRLEQPKLRMVCKRWNRLLSGNYFYSLRKKIGVAEEWVYVFKRDREGKISWYAFDPLHQLWKSLPPVPQEYSEALGFGCAVLSGCYLYLFGGKDPLRGSMRRVVFYNARTNKWHRAPDMMRKRHFFGSCVINNCLYVAGGECEGIQRTLQSAEVYDPNRNRWACVTEMNNGMVPFIGVVYDGKWFLKGLDSHRQVTSEVYLPSSNTWSAIDDEMVTGWRNPSISFNGRLYSADCRDGCKLRVYDENTGTWTRFMDSKHHLGSSRAFEAAALVSLNGKLCVIRNNMSITLVDVSNPTMSVETDSARMWETVVRKGQHRSFVANLWSSIAGRNLKSHIIHCHVLQV

SEQ ID NO: 17629 - protein, 388 aa, Zea mays subsp. mays
  peptide (1)..(388): Ceres Seq. ID no. 13498190
  misc_feature (118)..(164): Pfam Name: Kelch motif Pfam Description: Kelch motif
  misc_feature (118)..(164): Pfam Name: Kelch motif Pfam Description: Kelch motif
  misc_feature (24)..(295): Homolog of NCBI NO: 15223520 NR Description: Kelch repeat containing F-box protein family
  misc_feature (15)..(354): Homolog of NCBI NO: 18397351 NR Description: Kelch repeat containing F-box protein family
  misc_feature (16)..(322): Homolog of NCBI NO: 15220452 NR Description: Kelch repeat containing F-box protein family
  misc_feature (16)..(322): Homolog of NCBI NO: 7487225 NR Description: hypothetical protein T1F15.5 - Arabidopsis
  misc_feature (24)..(338): Homolog of NCBI NO: 26453288 NR Description: putative SKP1 interacting partner 4 SKIP4
  misc_feature (24)..(295): Homolog of NCBI NO: 15223520 NR Description: Kelch repeat containing F-box protein family
  misc_feature (16)..(322): Homolog of NCBI NO: 15220452 NR Description: Kelch repeat containing F-box protein family
  misc_feature (24)..(338): Homolog of NCBI NO: 26453288 NR Description: putative SKP1 interacting partner 4 SKIP4
  misc_feature (1)..(388): Homolog of NCBI NO: 37534254 NR Description: unknown protein [Oryza sativa (japonica
  misc_feature (1)..(388): Homolog of NCBI NO: 19071626 NR Description: putative Kelch motif containing protein
  misc_feature (1)..(387): Homolog of NCBI NO: 18405298 NR Description: Kelch repeat containing F-box protein family
  misc_feature (1)..(354): Homolog of NCBI NO: 25405811 NR Description: unknown protein, 58496-60308 [imported] -
  misc_feature (24)..(338): Homolog of NCBI NO: 18411974 NR Description: SKP1 interacting partner 4 (SKIP4), putative
  misc_feature (16)..(322): Homolog of NCBI NO: 7487225 NR Description: hypothetical protein T1F15.5 - Arabidopsis
  misc_feature (15)..(354): Homolog of NCBI NO: 18397351 NR Description: Kelch repeat containing F-box protein family
  misc_feature (24)..(338): Homolog of NCBI NO: 18411974 NR Description: SKP1 interacting partner 4 (SKIP4), putative
  misc_feature (1)..(354): Homolog of NCBI NO: 25405811 NR Description: unknown protein, 58496-60308 [imported] -
  misc_feature (1)..(387): Homolog of NCBI NO: 18405298 NR Description: Kelch repeat containing F-box protein family
  misc_feature (1)..(388): Homolog of NCBI NO: 19071626 NR Description: putative Kelch motif containing protein
  misc_feature (1)..(388): Homolog of NCBI NO: 37534254 NR Description: unknown protein [Oryza sativa (japonica
MCMQPEVKQNKRKSRGSKKERCRTQAPLLPGLPDDLAIACLIRVPRLEQPKLRMVCKRWNRLLSGNYFYSLRKKIGVAEEWVYVFKRDREGKISWYAFDPLHQLWKSLPPVPQEYSEALGFGCAVLSGCYLYLFGGKDPLRGSMRRVVFYNARTNKWHRAPDMMRKRHFFGSCVINNCLYVAGGECEGIQRTLQSAEVYDPNRNRWACVTEMNNGMVPFIGVVYDGKWFLKGLDSHRQVTSEVYLPSSNTWSAIDDEMVTGWRNPSISFNGRLYSADCRDGCKLRVYDENTGTWTRFMDSKHHLGSSRAFEAAALVSLNGKLCVIRNNMSITLVDVSNPTMSVETDSARMWETVVRKGQHRSFVANLWSSIAGRNLKSHIIHCHVLQV

SEQ ID NO: 17630 - protein, 386 aa, Zea mays subsp. mays
  peptide (1)..(386): Ceres Seq. ID no. 13498191
  misc_feature (116)..(162): Pfam Name: Kelch motif Pfam Description: Kelch motif
  misc_feature (116)..(162): Pfam Name: Kelch motif Pfam Description: Kelch motif
  misc_feature (22)..(293): Homolog of NCBI NO: 15223520 NR Description: Kelch repeat containing F-box protein family
  misc_feature (13)..(352): Homolog of NCBI NO: 18397351 NR Description: Kelch repeat containing F-box protein family
  misc_feature (14)..(320): Homolog of NCBI NO: 15220452 NR Description: Kelch repeat containing F-box protein family
  misc_feature (14)..(320): Homolog of NCBI NO: 7487225 NR Description: hypothetical protein T1F15.5 - Arabidopsis
  misc_feature (22)..(336): Homolog of NCBI NO: 26453288 NR Description: putative SKP1 interacting partner 4 SKIP4
  misc_feature (22)..(293): Homolog of NCBI NO: 15223520 NR Description: Kelch repeat containing F-box protein family
  misc_feature (14)..(320): Homolog of NCBI NO: 15220452 NR Description: Kelch repeat containing F-box protein family
  misc_feature (22)..(336): Homolog of NCBI NO: 26453288 NR Description: putative SKP1 interacting partner 4 SKIP4
  misc_feature (1)..(386): Homolog of NCBI NO: 37534254 NR Description: unknown protein [Oryza sativa (japonica
  misc_feature (1)..(386): Homolog of NCBI NO: 19071626 NR Description: putative Kelch motif containing protein
  misc_feature (1)..(385): Homolog of NCBI NO: 18405298 NR Description: Kelch repeat containing F-box protein family
  misc_feature (1)..(352): Homolog of NCBI NO: 25405811 NR Description: unknown protein, 58496-60308 [imported] -
  misc_feature (22)..(336): Homolog of NCBI NO: 18411974 NR Description: SKP1 interacting partner 4 (SKIP4), putative
  misc_feature (14)..(320): Homolog of NCBI NO: 7487225 NR Description: hypothetical protein T1F15.5 - Arabidopsis
  misc_feature (13)..(352): Homolog of NCBI NO: 18397351 NR Description: Kelch repeat containing F-box protein family
  misc_feature (22)..(336): Homolog of NCBI NO: 18411974 NR Description: SKP1 interacting partner 4 (SKIP4), putative
  misc_feature (1)..(352): Homolog of NCBI NO: 25405811 NR Description: unknown protein, 58496-60308 [imported] -
  misc_feature (1)..(385): Homolog of NCBI NO: 18405298 NR Description: Kelch repeat containing F-box protein family
  misc_feature (1)..(386): Homolog of NCBI NO: 19071626 NR Description: putative Kelch motif containing protein
  misc_feature (1)..(386): Homolog of NCBI NO: 37534254 NR Description: unknown protein [Oryza sativa (japonica
MQPEVKQNKRKSRGSKKERCRTQAPLLPGLPDDLAIACLIRVPRLEQPKLRMVCKRWNRLLSGNYFYSLRKKIGVAEEWVYVFKRDREGKISWYAFDPLHQLWKSLPPVPQEYSEALGFGCAVLSGCYLYLFGGKDPLRGSMRRVVFYNARTNKWHRAPDMMRKRHFFGSCVINNCLYVAGGECEGIQRTLQSAEVYDPNRNRWACVTEMNNGMVPFIGVVYDGKWFLKGLDSHRQVTSEVYLPSSNTWSAIDDEMVTGWRNPSISFNGRLYSADCRDGCKLRVYDENTGTWTRFMDSKHHLGSSRAFEAAALVSLNGKLCVIRNNMSITLVDVSNPTMSVETDSARMWETVVRKGQHRSFVANLWSSIAGRNLKSHIIHCHVLQV

SEQ ID NO: 17631 - DNA, 1974 bp, Zea mays subsp. mays
  misc_feature (1)..(1974): Ceres Seq. ID no. 12366224
  misc_feature: MA Experiment ID: 108522 Result: Up-regulated in Transcription
  misc_feature: MA Experiment 108522 PARAMETER Experiment Name: Zm_42deg_Heat_P Parameter: Age (day) Value: 8
  misc_feature: MA Experiment 108522 PARAMETER Experiment Name: Zm_42deg_Heat_P Parameter: Organism Value: Zea mays
  misc_feature: MA Experiment 108522 PARAMETER Experiment Name: Zm_42deg_Heat_P Parameter: Plant Line Value: 35A19
  misc_feature: MA Experiment 108522 PARAMETER Experiment Name: Zm_42deg_Heat_P Parameter: Temperature (deg C) Value: 42 vs. 22
  misc_feature: MA Experiment 108522 PARAMETER Experiment Name: Zm_42deg_Heat_P Parameter: Timepoint (hr) Value: 1
  misc_feature: MA Experiment 108522 PARAMETER Experiment Name: Zm_42deg_Heat_P Parameter: Tissue Value: Aerial
  misc_feature: MA Experiment ID: 108689 Result: Up-regulated in Transcription
  misc_feature: MA Experiment 108689 PARAMETER Experiment Name: Zm_Drought_Roots_P Parameter: Age (day) Value: 9
  misc_feature: MA Experiment 108689 PARAMETER Experiment Name: Zm_Drought_Roots_P Parameter: Organism Value: Zea mays
  misc_feature: MA Experiment 108689 PARAMETER Experiment Name: Zm_Drought_Roots_P Parameter: Plant Line Value: 35A19
  misc_feature: MA Experiment 108689 PARAMETER Experiment Name: Zm_Drought_Roots_P Parameter: Timepoint (hr) Value: 24
  misc_feature: MA Experiment 108689 PARAMETER Experiment Name: Zm_Drought_Roots_P Parameter: Tissue Value: Roots
  misc_feature: MA Experiment 108689 PARAMETER Experiment Name: Zm_Drought_Roots_P Parameter: Treatment Value: Drought vs. No Drought
  misc_feature: MA Experiment ID: 20000535 Result: Down-regulated in Transcription
  misc_feature: MA Experiment 20000535 PARAMETER Experiment Name: Zm_Hybrid_Seed_Dev_P Parameter: DAP Value: 30 vs. 12
  misc_feature: MA Experiment 20000535 PARAMETER Experiment Name: Zm_Hybrid_Seed_Dev_P Parameter: Organism Value: Zea mays
  misc_feature: MA Experiment 20000535 PARAMETER Experiment Name: Zm_Hybrid_Seed_Dev_P Parameter: Plant Line Value: 35A19
  misc_feature: MA Experiment 20000535 PARAMETER Experiment Name: Zm_Hybrid_Seed_Dev_P Parameter: Tissue Value: Embryo vs. Unfert Floret
gcacgagaccattacctagaacatcctaatcgaaaacttcgtcttctgtcactgtcccacactcctatcattctcgccttcgacttcccaggagcgcccagcgccgcggagcttctagaacacgcgactggggcgagctagacgaagctaaggaggcgcgaggggtgacgatgcggggcaggtgacggtgcggcgtggtggaggcgggacagaggccgggggatggtggcggcggagggtgggcccgtcgaggagggcgtcggggagagctcgtccccgccgcgcgtagacgcagccccagcgccctctggctccgttgggagcgggggcagaggaggcgccagcgacatctgcgccgaggtgctcgagcgcctcgtcgccgacggccacgcggaggcgtccgaccccgagttccgcgacaggctcgccgcacatttcgggcggctcccgcacagctatcagctggatatcaatgttgacaaagcaaccgatgtcttggtccaccagaatgtcttagcggaagcaaaggatcctgataggcgccctgcattctatgttcgtttcttgaggattgaagatattgatcctgcaaacgactccgatgcatctgaagaaggggatggtgatggtgatgatctctctgtaaggcaggacacaccatatactcacattcatgaggtagtattctccacaatcgacaagccaaagctccttagtcagctatctgcattgctatctgacattggattgaacatcagagaagcacatgttttctctactcatgatggctattctcttgatgttttcgttgttgatggctggcccattaaggatactgatggtttgcacaaagcactggaagcatccattttaagaaatgagggttcatggtctggttcatctcattcgtcagcagctgaaagaacactgcccttccaagttaaaggtggtgaatgggaaatcgataaacgacttctgaagatgggagggttgattgcttctggttcttgtggggacttgtatcacgggacttacctcggtgaggatgtagctgttaaagttctaagagctgagcatttgaataagaatgtttggaacgaatttactcaagaagtatatatactaagagaagttcaacatacaaatgttgtgcgattcattggtgcttgcacaaaaccaccacaattttgcataattacagaatacatgtctggaggaagcttatatgactttgtgcacaagcagcataacgttctaaacctcacgactctattgaagtttgcagttgatgtatgccgagggatgtgctacttgcatgaaaggggtatcatccatagagacttaaagactgccaaccttctaatggacaacgatcatgctgtgaaagtggctgattttggcgtagctcggttccaggatcaaggaggtatcatgacagctgaaactggaacatacagatggatggcgcctgaggttataaaccaccaaccctatgatagcaaagcagatgtgttcagctttgccattgttctctgggagctgataacgtccaagatcccatatgataccatgacccctctccaagcggctgtaggtgtgagacaggggttgcgcccaggacttccgaagaagacgcacccaaagctgttggacttgatgcagagatgttgggaagcagatccatccgaccggcctgctttctcggacattttagccgaactggaggatcttttggcacaagctcagggaacatcgggaaagacggtccaagatccatcaaactcgaacgcgaaagattaacccccatgccatgcacatacctgacattttttctcaatccagtgatttgccacatctaggattcgagttgccaattatgaggaaatttgttttgcttgtgtacattcgaacaatcttcttggggcctattttttatgggcacctcattattcttatacaaaagaaattgggccc

SEQ ID NO: 17632 - protein, 525 aa, Zea mays subsp. mays
  peptide (1)..(525): Ceres Seq. ID no. 12366225
  misc_feature (252)..(500): Pfam Name: Protein kinase domain Pfam Description: Protein kinase domain
  misc_feature (14)..(516): Homolog of NCBI NO: 34901608 NR Description: P0571D04.18 [Oryza sativa (japonica
  misc_feature (59)..(513): Homolog of NCBI NO: 18420244 NR Description: protein kinase like protein; protein id:
  misc_feature (461)..(513): Homolog of NCBI NO: 7485889 NR Description: hypothetical protein F20M13.30 - Arabidopsis
  misc_feature (23)..(116): Homolog of NCBI NO: 7485889 NR Description: hypothetical protein F20M13.30 - Arabidopsis
  misc_feature (128)..(220): Homolog of NCBI NO: 7485889 NR Description: hypothetical protein F20M13.30 - Arabidopsis
  misc_feature (267)..(444): Homolog of NCBI NO: 7485889 NR Description: hypothetical protein F20M13.30 - Arabidopsis
  misc_feature (42)..(144): Homolog of NCBI NO: 7486654 NR Description: hypothetical protein F8D20.290 - Arabidopsis
  misc_feature (137)..(506): Homolog of NCBI NO: 7486654 NR Description: hypothetical protein F8D20.290 - Arabidopsis
  misc_feature (42)..(144): Homolog of NCBI NO: 22329194 NR Description: putative protein
  misc_feature (137)..(506): Homolog of NCBI NO: 22329194 NR Description: putative protein
MVAAEGGPVEEGVGESSSPPRVDAAPAPSGSVGSGGRGGASDICAEVLERLVADGHAEASDPEFRDRLAAHFGRLPHSYQLDINVDKATDVLVHQNVLAEAKDPDRRPAFYVRFLRIEDIDPANDSDASEEGDGDGDDLSVRQDTPYTHIHEVVFSTIDKPKLLSQLSALLSDIGLNIREAHVFSTHDGYSLDVFVVDGWPIKDTDGLHKALEASILRNEGSWSGSSHSSAAERTLPFQVKGGEWEIDKRLLKMGGLIASGSCGDLYHGTYLGEDVAVKVLRAEHLNKNVWNEFTQEVYILREVQHTNVVRFIGACTKPPQFCIITEYMSGGSLYDFVHKQHNVLNLTTLLKFAVDVCRGMCYLHERGIIHRDLKTANLLMDNDHAVKVADFGVARFQDQGGIMTAETGTYRWMAPEVINHQPYDSKADVFSFAIVLWELITSKIPYDTMTPLQAAVGVRQGLRPGLPKKTHPKLLDLMQRCWEADPSDRPAFSDILAELEDLLAQAQGTSGKTVQDPSNSNAKD

SEQ ID NO: 17633 - protein, 272 aa, Zea mays subsp. mays
  peptide (1)..(272): Ceres Seq. ID no. 12366226
  misc_feature (1)..(247): Pfam Name: Protein kinase domain Pfam Description: Protein kinase domain
  misc_feature (1)..(93): Homolog of NCBI NO: 7486398 NR Description: hypothetical protein F4B14.50 - Arabidopsis
  misc_feature (1)..(263): Homolog of NCBI NO: 34901608 NR Description: P0571D04.18 [Oryza sativa (japonica
  misc_feature (1)..(260): Homolog of NCBI NO: 18420244 NR Description: protein kinase like protein; protein id:
  misc_feature (208)..(260): Homolog of NCBI NO: 7485889 NR Description: hypothetical protein F20M13.30 - Arabidopsis
  misc_feature (97)..(196): Homolog of NCBI NO: 7486398 NR Description: hypothetical protein F4B14.50 - Arabidopsis
  misc_feature (1)..(253): Homolog of NCBI NO: 15227883 NR Description: putative protein kinase
  misc_feature (208)..(253): Homolog of NCBI NO: 7486398 NR Description: hypothetical protein F4B14.50 - Arabidopsis
  misc_feature (14)..(191): Homolog of NCBI NO: 7485889 NR Description: hypothetical protein F20M13.30 - Arabidopsis
  misc_feature (1)..(253): Homolog of NCBI NO: 7486654 NR Description: hypothetical protein F8D20.290 - Arabidopsis
  misc_feature (1)..(253): Homolog of NCBI NO: 22329194 NR Description: putative protein
MGGLIASGSCGDLYHGTYLGEDVAVKVLRAEHLNKNVWNEFTQEVYILREVQHTNVVRFIGACTKPPQFCIITEYMSGGSLYDFVHKQHNVLNLTTLLKFAVDVCRGMCYLHERGIIHRDLKTANLLMDNDHAVKVADFGVARFQDQGGIMTAETGTYRWMAPEVINHQPYDSKADVFSFAIVLWELITSKIPYDTMTPLQAAVGVRQGLRPGLPKKTHPKLLDLMQRCWEADPSDRPAFSDILAELEDLLAQAQGTSGKTVQDPSNSNAKD

SEQ ID NO: 17634 - DNA, 437 bp, Zea mays subsp. mays
  misc_feature (1)..(437): Ceres Seq. ID no. 2790081
  misc_feature: MA Experiment ID: 108527 Result: Down-regulated in Transcription
  misc_feature: MA Experiment 108527 PARAMETER Experiment Name: Zm_5mM_NO_P Parameter: Age (day) Value: 8
  misc_feature: MA Experiment 108527 PARAMETER Experiment Name: Zm_5mM_NO_P Parameter: Organism Value: Zea mays
  misc_feature: MA Experiment 108527 PARAMETER Experiment Name: Zm_5mM_NO_P Parameter: Plant Line Value: 35A19
  misc_feature: MA Experiment 108527 PARAMETER Experiment Name: Zm_5mM_NO_P Parameter: Timepoint (hr) Value: 6
  misc_feature: MA Experiment 108527 PARAMETER Experiment Name: Zm_5mM_NO_P Parameter: Tissue Value: Aerial
  misc_feature: MA Experiment 108527 PARAMETER Experiment Name: Zm_5mM_NO_P Parameter: Treatment Value: 5mM NO vs. No Treatment
  misc_feature: MA Experiment ID: 108535 Result: Up-regulated in Transcription
  misc_feature: MA Experiment 108535 PARAMETER Experiment Name: Zm_Meristem_P Parameter: Age (day) Value: 8
  misc_feature: MA Experiment 108535 PARAMETER Experiment Name: Zm_Meristem_P Parameter: Organism Value: Zea mays
  misc_feature: MA Experiment 108535 PARAMETER Experiment Name: Zm_Meristem_P Parameter: Plant Line Value: 35A19
  misc_feature: MA Experiment 108535 PARAMETER Experiment Name: Zm_Meristem_P Parameter: Tissue Value: Root Meristem vs. Above Root Meristem
  misc_feature: MA Experiment ID: 20000487 Result: Up-regulated in Transcription
  misc_feature: MA Experiment 20000487 PARAMETER Experiment Name: Zm_50mM_NH4NO3_L_to_H_P Parameter: Organism Value: Zea mays
  misc_feature: MA Experiment 20000487 PARAMETER Experiment Name: Zm_50mM_NH4NO3_L_to_H_P Parameter: Timepoint (hr) Value: 4
  misc_feature: MA Experiment 20000487 PARAMETER Experiment Name: Zm_50mM_NH4NO3_L_to_H_P Parameter: Tissue Value: Leaves
  misc_feature: MA Experiment 20000487 PARAMETER Experiment Name: Zm_50mM_NH4NO3_L_to_H_P Parameter: Treatment Value: 50mM NH4NO3 vs. 100mM Mannitol
  misc_feature: MA Experiment ID: 20000535 Result: Up-regulated in Transcription
  misc_feature: MA Experiment 20000535 PARAMETER Experiment Name: Zm_Hybrid_Seed_Dev_P Parameter: DAP Value: 30 vs. 12
  misc_feature: MA Experiment 20000535 PARAMETER Experiment Name: Zm_Hybrid_Seed_Dev_P Parameter: Organism Value: Zea mays
  misc_feature: MA Experiment 20000535 PARAMETER Experiment Name: Zm_Hybrid_Seed_Dev_P Parameter: Plant Line Value: 35A19
  misc_feature: MA Experiment 20000535 PARAMETER Experiment Name: Zm_Hybrid_Seed_Dev_P Parameter: Tissue Value: Embryo vs. Unfert Floret
aaccttaaaagtggaattggttccaatctcacccccccgcgcgctgcagtgtgcaggccctgccgtctgccgcaaaagagagcactaggaaaagaagtgctgcggcgttgcgaggtgggggacgaggacgaggccagaacgccccaaaaccaaaaacccccagaaccccgacctagggttacgccatcgccatgggatctgttgcctccgccgctgtgccaccacctcctcctcaatcagcgctgcctcaggcgggcgcgccgccctacgggcccgggctcgccgggatcctcccgcagatgtcgaagggggaggagaagaaggatgagaaggtggactacctcaacctcccctgccccgtgcccttcgaggagatccagcgcgaggctctcatgtctttgaagcctgaactttttgaaggattgaggtttgacttc

SEQ ID NO: 17635 - protein, 133 aa, Zea mays subsp. mays
  peptide (1)..(133): Ceres Seq. ID no. 2790082
NLKSGIGSNLTPPRAAVCRPCRLPQKRALGKEVLRRCEVGDEDEARTPQNQKPPEPRPRVTPSPWDLLPPPLCHHLLLNQRCLRRARRPTGPGSPGSSRRCRRGRRRRMRRWTTSTSPAPCPSRRSSARLSCL

SEQ ID NO: 17636 - protein, 82 aa, Zea mays subsp. mays
  peptide (1)..(82): Ceres Seq. ID no. 2790083
  misc_feature (43)..(81): Homolog of NCBI NO: 15222963 NR Description: hypothetical protein; protein id: At1g50400.1
  misc_feature (43)..(81): Homolog of NCBI NO: 13162531 NR Description: Hypothetical protein [Arabidopsis thaliana]
  misc_feature (30)..(81): Homolog of NCBI NO: 15231008 NR Description: membrane import protein, putative
  misc_feature (30)..(81): Homolog of NCBI NO: 11994775 NR Description: membrane import protein-like [Arabidopsis
  misc_feature (1)..(81): Homolog of NCBI NO: 34903264 NR Description: unnamed protein product [Oryza sativa (japonica
MGSVASAAVPPPPPQSALPQAGAPPYGPGLAGILPQMSKGEEKKDEKVDYLNLPCPVPFEEIQREALMSLKPELFEGLRFDF

SEQ ID NO: 17637 - DNA, 1529 bp, Zea mays subsp. mays
  misc_feature (1)..(1529): Ceres Seq. ID no. 12366273
  misc_feature: MA Experiment ID: 108556 Result: Down-regulated in Transcription
  misc_feature: MA Experiment 108556 PARAMETER Experiment Name: Zm_Drought_P Parameter: Age (day) Value: 9
  misc_feature: MA Experiment 108556 PARAMETER Experiment Name: Zm_Drought_P Parameter: Organism Value: Zea mays
  misc_feature: MA Experiment 108556 PARAMETER Experiment Name: Zm_Drought_P Parameter: Plant Line Value: 35A19
  misc_feature: MA Experiment 108556 PARAMETER Experiment Name: Zm_Drought_P Parameter: Timepoint (hr) Value: 24
  misc_feature: MA Experiment 108556 PARAMETER Experiment Name: Zm_Drought_P Parameter: Tissue Value: Aerial
  misc_feature: MA Experiment 108556 PARAMETER Experiment Name: Zm_Drought_P Parameter: Treatment Value: Drought vs. No Drought
  misc_feature: MA Experiment ID: 20000477 Result: Down-regulated in Transcription
  misc_feature: MA Experiment 20000477 PARAMETER Experiment Name: Zm_5mM_SA_P Parameter: Age (day) Value: 10
  misc_feature: MA Experiment 20000477 PARAMETER Experiment Name: Zm_5mM_SA_P Parameter: Organism Value: Zea mays
  misc_feature: MA Experiment 20000477 PARAMETER Experiment Name: Zm_5mM_SA_P Parameter: Plant Line Value: 35A19
  misc_feature: MA Experiment 20000477 PARAMETER Experiment Name: Zm_5mM_SA_P Parameter: Timepoint (hr) Value: 48
  misc_feature: MA Experiment 20000477 PARAMETER Experiment Name: Zm_5mM_SA_P Parameter: Tissue Value: Aerial
  misc_feature: MA Experiment 20000477 PARAMETER Experiment Name: Zm_5mM_SA_P Parameter: Treatment Value: 5mM SA vs. No Treatment
  misc_feature: MA Experiment ID: 20000479 Result: Down-regulated in Transcription
  misc_feature: MA Experiment 20000479 PARAMETER Experiment Name: Zm_Drought_P Parameter: Age (day) Value: 10
  misc_feature: MA Experiment 20000479 PARAMETER Experiment Name: Zm_Drought_P Parameter: Organism Value: Zea mays
  misc_feature: MA Experiment 20000479 PARAMETER Experiment Name: Zm_Drought_P Parameter: Plant Line Value: 35A19
  misc_feature: MA Experiment 20000479 PARAMETER Experiment Name: Zm_Drought_P Parameter: Timepoint (hr) Value: 48
  misc_feature: MA Experiment 20000479 PARAMETER Experiment Name: Zm_Drought_P Parameter: Tissue Value: Aerial
  misc_feature: MA Experiment 20000479 PARAMETER Experiment Name: Zm_Drought_P Parameter: Treatment Value: Drought vs. No Drought
  misc_feature: MA Experiment ID: 20000480 Result: Down-regulated in Transcription
  misc_feature: MA Experiment 20000480 PARAMETER Experiment Name: Zm_Drought_P Parameter: Age (day) Value: 11
  misc_feature: MA Experiment 20000480 PARAMETER Experiment Name: Zm_Drought_P Parameter: Organism Value: Zea mays
  misc_feature: MA Experiment 20000480 PARAMETER Experiment Name: Zm_Drought_P Parameter: Plant Line Value: 35A19
  misc_feature: MA Experiment 20000480 PARAMETER Experiment Name: Zm_Drought_P Parameter: Timepoint (hr) Value: 72
  misc_feature: MA Experiment 20000480 PARAMETER Experiment Name: Zm_Drought_P Parameter: Tissue Value: Aerial
  misc_feature: MA Experiment 20000480 PARAMETER Experiment Name: Zm_Drought_P Parameter: Treatment Value: Drought vs. No Drought
cactccgtaaaaccacaggaaacctcacacgtcttcctccgtccagcctgtctccggccggccccccgccttccttaactccgcatcatccccttccaatctcgtcttcccagcacccgaaccgatcaaattcacttccgctcgattctccgggagggggagggtagctgaaggacatcccggggacgcaatgcgcgtcctcgccgtgttcctcctcggcgcagcgttcgcggcggcggccggaggcggcggggagcttccggagttccgggaagctccggcgttccgcaacggcgcagcctgcgcggacgcgccgacgatccacatcgcgatgacgctggacggcacctacctgcggggctccctcgccggcgtcctctccgtgctccgccacgccgcctgtccggagtccgtcgccttccacttcgtcgcctcctcggcctccccggcgcgccgcctcgcctcgctccgccgtgcgctggcggctgccttccccacgctcccggccaccgtgcatcgcttcgacgcacgcctcgtccggggcaagatctcctcatccgtccggcgcgcgctcgaccagcccctcaactacgcccgcatctacctcgcggacctcctgccgcgctccgtctcccgcgtgctctacctcgactccgacctcctcgtggtcgacgacgtggcccgcctctgggcgaccgacctcggccccgacgccgccctcgntgcccccgagtactgccacgccaactttacctcctatttcaccgacgcgttctggagccaccccgagtacaccgccgtcttcgccaaccggacgcgcgtcccctgctacttcaacaccggggtaatggtcatcgacctggacaggtggcgctccggtgggtacaccgcgaagctggaatactggatggaggtgcagaagcaggaggccaggatttacgagctgggctccctcccgccgtttctcctggtgttcgccggcgaggtgaaagccgtggagcaccggtggaaccagcacgggctcggcggcgacaacgtggcggggcagtgccggcagctgcaccccggtccggttagcctgctgcactggagtgggaaggggaagccgtggctgcggctggacgccgggcggccgtgcccgctcgacgcgctctggatgccctacgacctccttcgccgccgcggcgctcgggacgatctcctcgccgccgtctcctgacaatgctgtccgcgcatcgctgcagggcgatcgatttgctcgcgtccgatcggatcatatgccacggcgcttggctgctccgctcgttccgtcgtcccacgggtcggcgtcggtcaccaagtcacagacacgttggacccacctggacactctcctctccgcatgggtccatgcgcaatggcgttagttggtgtggccctgtcggtactgaagtccgtcggccccactcgttggtggcggatggggatttttggggtgggggccaaggtgaaattcagacatggggctgtgtacagctgttgtttttggc

SEQ ID NO: 17638 - protein, 342 aa, Zea mays subsp. mays
  peptide (1)..(342): Ceres Seq. ID no. 12366274
  misc_feature (15)..(329): Homolog of NCBI NO: 21554300 NR Description: putative glycosyl transferase [Arabidopsis
  misc_feature (23)..(329): Homolog of NCBI NO: 15230679 NR Description: putative glycosyl transferase; protein id:
  misc_feature (15)..(329): Homolog of NCBI NO: 15235247 NR Description: predicted glycosyl transferase
  misc_feature (23)..(335): Homolog of NCBI NO: 21537193 NR Description: Avr9/Cf-9 rapidly elicited protein 231
  misc_feature (23)..(335): Homolog of NCBI NO: 20466660 NR Description: unknown protein [Arabidopsis thaliana]
  misc_feature (23)..(335): Homolog of NCBI NO: 18394719 NR Description: glycosyltransferase family
  misc_feature (24)..(329): Homolog of NCBI NO: 34898906 NR Description: putative glycosyl transferase
  misc_feature (1)..(329): Homolog of NCBI NO: 21536997 NR Description: putative glycosyl transferase [Arabidopsis
  misc_feature (1)..(329): Homolog of NCBI NO: 18391493 NR Description: glycosyltransferase family
  misc_feature (1)..(342): Homolog of NCBI NO: 38346630 NR Description: OSJNBa0074L08.24 [Oryza sativa (japonica
  misc_feature (178)..(178): Xaa is any aa, unknown or other
MRVLAVFLLGAAFAAAAGGGGELPEFREAPAFRNGAACADAPTIHIAMTLDGTYLRGSLAGVLSVLRHAACPESVAFHFVASSASPARRLASLRRALAAAFPTLPATVHRFDARLVRGKISSSVRRALDQPLNYARIYLADLLPRSVSRVLYLDSDLLVVDDVARLWATDLGPDAALXAPEYCHANFTSYFTDAFWSHPEYTAVFANRTRVPCYFNTGVMVIDLDRWRSGGYTAKLEYWMEVQKQEARIYELGSLPPFLLVFAGEVKAVEHRWNQHGLGGDNVAGQCRQLHPGPVSLLHWSGKGKPWLRLDAGRPCPLDALWMPYDLLRRRGARDDLLAAVS

SEQ ID NO: 17639 - protein, 295 aa, Zea mays subsp. mays
  peptide (1)..(295): Ceres Seq. ID no. 12366275
  misc_feature (1)..(282): Homolog of NCBI NO: 21554300 NR Description: putative glycosyl transferase [Arabidopsis
  misc_feature (1)..(282): Homolog of NCBI NO: 15230679 NR Description: putative glycosyl transferase; protein id:
  misc_feature (1)..(282): Homolog of NCBI NO: 15235247 NR Description: predicted glycosyl transferase
  misc_feature (1)..(288): Homolog of NCBI NO: 21537193 NR Description: Avr9/Cf-9 rapidly elicited protein 231
  misc_feature (1)..(288): Homolog of NCBI NO: 20466660 NR Description: unknown protein [Arabidopsis thaliana]
  misc_feature (1)..(288): Homolog of NCBI NO: 18394719 NR Description: glycosyltransferase family
  misc_feature (1)..(282): Homolog of NCBI NO: 34898906 NR Description: putative glycosyl transferase
  misc_feature (1)..(282): Homolog of NCBI NO: 21536997 NR Description: putative glycosyl transferase [Arabidopsis
  misc_feature (1)..(282): Homolog of NCBI NO: 18391493 NR Description: glycosyltransferase family
  misc_feature (1)..(295): Homolog of NCBI NO: 38346630 NR Description: OSJNBa0074L08.24 [Oryza sativa (japonica
  misc_feature (131)..(131): Xaa is any aa, unknown or other
MTLDGTYLRGSLAGVLSVLRHAACPESVAFHFVASSASPARRLASLRRALAAAFPTLPATVHRFDARLVRGKISSSVRRALDQPLNYARIYLADLLPRSVSRVLYLDSDLLVVDDVARLWATDLGPDAALXAPEYCHANFTSYFTDAFWSHPEYTAVFANRTRVPCYFNTGVMVIDLDRWRSGGYTAKLEYWMEVQKQEARIYELGSLPPFLLVFAGEVKAVEHRWNQHGLGGDNVAGQCRQLHPGPVSLLHWSGKGKPWLRLDAGRPCPLDALWMPYDLLRRRGARDDLLAAVS

SEQ ID NO: 17640 - DNA, 489 bp, Zea mays subsp. mays
  misc_feature (1)..(489): Ceres Seq. ID no. 1677695
  misc_feature: MA Experiment ID: 20000479 Result: Down-regulated in Transcription
  misc_feature: MA Experiment 20000479 PARAMETER Experiment Name: Zm_Drought_P Parameter: Age (day) Value: 10
  misc_feature: MA Experiment 20000479 PARAMETER Experiment Name: Zm_Drought_P Parameter: Organism Value: Zea mays
  misc_feature: MA Experiment 20000479 PARAMETER Experiment Name: Zm_Drought_P Parameter: Plant Line Value: 35A19
  misc_feature: MA Experiment 20000479 PARAMETER Experiment Name: Zm_Drought_P Parameter: Timepoint (hr) Value: 48
  misc_feature: MA Experiment 20000479 PARAMETER Experiment Name: Zm_Drought_P Parameter: Tissue Value: Aerial
  misc_feature: MA Experiment 20000479 PARAMETER Experiment Name: Zm_Drought_P Parameter: Treatment Value: Drought vs. No Drought
  misc_feature: MA Experiment ID: 20000480 Result: Down-regulated in Transcription
  misc_feature: MA Experiment 20000480 PARAMETER Experiment Name: Zm_Drought_P Parameter: Age (day) Value: 11
  misc_feature: MA Experiment 20000480 PARAMETER Experiment Name: Zm_Drought_P Parameter: Organism Value: Zea mays
  misc_feature: MA Experiment 20000480 PARAMETER Experiment Name: Zm_Drought_P Parameter: Plant Line Value: 35A19
  misc_feature: MA Experiment 20000480 PARAMETER Experiment Name: Zm_Drought_P Parameter: Timepoint (hr) Value: 72
  misc_feature: MA Experiment 20000480 PARAMETER Experiment Name: Zm_Drought_P Parameter: Tissue Value: Aerial
  misc_feature: MA Experiment 20000480 PARAMETER Experiment Name: Zm_Drought_P Parameter: Treatment Value: Drought vs. No Drought
acgaaaatctgacatctcatcttgatccatccagctttgcctcgatcgccggccggtagccatgtcccccacggaagaagccgctggtggtggtctcgacgactatgaccgcttgagcgagctgaaggcgttcgacgacagcaaggccggcgtcaagggcctcgtggacgctggcgtcacgaccatccctgccatcttccgcggccatctccttcaggaagggccgaagtcgcacgggaggaggtggtcgcccagtygaaggctgcagccgagacggtggggttcttccagctggtgaaccacggcgttcccagcgagctcctgtccgagatgctggcgtcggtgaggcggttcaacgaggagccccacgaggtgaagcggccctactacacgcgggacgcacgtcgcaaggtgcggttcaactccaacttcgatctgttccagtcgccggcggccaactggcgcgacacgctcttctgcgaggcagcg

SEQ ID NO: 17641 - protein, 78 aa, Zea mays subsp. mays
  peptide (1)..(78): Ceres Seq. ID no. 1677696
  misc_feature (15)..(50): Homolog of NCBI NO: 15224576 NR Description: putative dioxygenase; protein id: At2g30840.1
  misc_feature (13)..(46): Homolog of NCBI NO: 119640 NR Description: 1-AMINOCYCLOPROPANE-1-CARBOXYLATE OXIDASE HOMOLOG
  misc_feature (14)..(50): Homolog of NCBI NO: 5031283 NR Description: unknown [Prunus armeniaca]
  misc_feature (13)..(56): Homolog of NCBI NO: 15224730 NR Description: putative dioxygenase
  misc_feature (1)..(46): Homolog of NCBI NO: 29123084 NR Description: 2-oxoglutarate-dependent oxygenase [Zea mays]
  misc_feature (16)..(49): Homolog of NCBI NO: 40253427 NR Description: putative 2-oxoglutarate-dependent oxygenase
  misc_feature (16)..(49): Homolog of NCBI NO: 40253419 NR Description: putative 2-oxoglutarate-dependent oxygenase
  misc_feature (16)..(47): Homolog of NCBI NO: 40253423 NR Description: putative 2-oxoglutarate-dependent oxygenase
  misc_feature (10)..(51): Homolog of NCBI NO: 31193909 NR Description: putative dioxygenase [Oryza sativa (japonica
  misc_feature (16)..(49): Homolog of NCBI NO: 40253431 NR Description: putative 2-oxoglutarate-dependent oxygenase
  misc_feature (66)..(66): Xaa is any aa, unknown or other
MSPTEEAAGGGLDDYDRLSELKAFDDSKAGVKGLVDAGVTTIPAIFRGHLLQEGPKSHGRRWSPSXRLQPRRWGSSSW

SEQ ID NO: 17642 - protein, 53 aa, Zea mays subsp. mays
  peptide (1)..(53): Ceres Seq. ID no. 1677697
  misc_feature (1)..(50): Homolog of NCBI NO: 15224576 NR Description: putative dioxygenase; protein id: At2g30840.1
  misc_feature (1)..(52): Homolog of NCBI NO: 119640 NR Description: 1-AMINOCYCLOPROPANE-1-CARBOXYLATE OXIDASE HOMOLOG
  misc_feature (1)..(52): Homolog of NCBI NO: 5031283 NR Description: unknown [Prunus armeniaca]
  misc_feature (1)..(52): Homolog of NCBI NO: 15224730 NR Description: putative dioxygenase
  misc_feature (1)..(52): Homolog of NCBI NO: 29123084 NR Description: 2-oxoglutarate-dependent oxygenase [Zea mays]
  misc_feature (1)..(51): Homolog of NCBI NO: 40253427 NR Description: putative 2-oxoglutarate-dependent oxygenase
  misc_feature (1)..(51): Homolog of NCBI NO: 40253419 NR Description: putative 2-oxoglutarate-dependent oxygenase
  misc_feature (1)..(51): Homolog of NCBI NO: 40253423 NR Description: putative 2-oxoglutarate-dependent oxygenase
  misc_feature (1)..(51): Homolog of NCBI NO: 31193909 NR Description: putative dioxygenase [Oryza sativa (japonica
  misc_feature (1)..(51): Homolog of NCBI NO: 40253431 NR Description: putative 2-oxoglutarate-dependent oxygenase
MLASVRRFNEEPHEVKRPYYTRDARRKVRFNSNFDLFQSPAANWRDTLFCEAA

SEQ ID NO: 17643 - DNA, 2290 bp, Zea mays subsp. mays
  misc_feature (1)..(2290): Ceres Seq. ID no. 12375158
  misc_feature: MA Experiment ID: 108535 Result: Down-regulated in Transcription
  misc_feature: MA Experiment 108535 PARAMETER Experiment Name: Zm_Meristem_P Parameter: Age (day) Value: 8
  misc_feature: MA Experiment 108535 PARAMETER Experiment Name: Zm_Meristem_P Parameter: Organism Value: Zea mays
  misc_feature: MA Experiment 108535 PARAMETER Experiment Name: Zm_Meristem_P Parameter: Plant Line Value: 35A19
  misc_feature: MA Experiment 108535 PARAMETER Experiment Name: Zm_Meristem_P Parameter: Tissue Value: Root Meristem vs. Above Root Meristem
  misc_feature: MA Experiment ID: 108543 Result: Up-regulated in Transcription
  misc_feature: MA Experiment ID: 108556 Result: Down-regulated in Transcription
  misc_feature: MA Experiment 108556 PARAMETER Experiment Name: Zm_Drought_P Parameter: Age (day) Value: 9
  misc_feature: MA Experiment 108556 PARAMETER Experiment Name: Zm_Drought_P Parameter: Organism Value: Zea mays
  misc_feature: MA Experiment 108556 PARAMETER Experiment Name: Zm_Drought_P Parameter: Plant Line Value: 35A19
  misc_feature: MA Experiment 108556 PARAMETER Experiment Name: Zm_Drought_P Parameter: Timepoint (hr) Value: 24
  misc_feature: MA Experiment 108556 PARAMETER Experiment Name: Zm_Drought_P Parameter: Tissue Value: Aerial
  misc_feature: MA Experiment 108556 PARAMETER Experiment Name: Zm_Drought_P Parameter: Treatment Value: Drought vs. No Drought
  misc_feature: MA Experiment ID: 20000480 Result: Down-regulated in Transcription
  misc_feature: MA Experiment 20000480 PARAMETER Experiment Name: Zm_Drought_P Parameter: Age (day) Value: 11
  misc_feature: MA Experiment 20000480 PARAMETER Experiment Name: Zm_Drought_P Parameter: Organism Value: Zea mays
  misc_feature: MA Experiment 20000480 PARAMETER Experiment Name: Zm_Drought_P Parameter: Plant Line Value: 35A19
  misc_feature: MA Experiment 20000480 PARAMETER Experiment Name: Zm_Drought_P Parameter: Timepoint (hr) Value: 72
  misc_feature: MA Experiment 20000480 PARAMETER Experiment Name: Zm_Drought_P Parameter: Tissue Value: Aerial
  misc_feature: MA Experiment 20000480 PARAMETER Experiment Name: Zm_Drought_P Parameter: Treatment Value: Drought vs. No Drought
gcacgagaccattacctagaacatcctaatcgaaaaaccagtcagcactcagcacacagagtccgcctccgccgcggctccggcgcccgcatccgtctcaggagtcccttctccccgcgggtggagacatcttgatcatttctgagattaaactgatgatgctgatgctcgtttagttatcttggtttggagatatatcagatatgggtgatcggaatcatggacgctctctccctctactgctctatctacatcttttgctgccaatacttccgtttgctatggcagatatagcctccgagaagcaagcactccttgcttttgcctctgcagtctaccatggcaacaaactgaattggagccaaaatatcccagtgtgctcatggcatggtgtgacatgctcactggatcgatcgtgtatattggcccttagggtgccaggtgctggtttgattggtaccattcctgctgatactcttggcaggcttgtgtccctccaagttttaagcatgaggtctaaccgtttgagtggaagccttccgaacgatgttgtctcacttccttctttacaagccatatttgttcagcacaacgaactgtcaggagacttgcctccatttctctctccaaaccttaatacccttgatctctcttacaactcctttacaggacaaatcccatcaggtttgcagaatcttaccaaattgtctgtcttgaatttagcagaaaattccctgtccgggccgattccggatctcaaacttcctagcttaagacagctaaatctgagcaacaatgaactgaatggttcgattcctccctttttccaaatcttctcaaatagttccttcctagggaactctggattgtgtggaccgccgctaactgaatgttcttttctatcttcaccaacaccgtcgcaagtgccttcaccaccaaaattaccaaatcatgagaagaaggctggcaatggcttggtaatcgtggctgttgctgggagctttgtcatatttctgctagctgctgtgatgttcactatgtgcatttcaaagaggaaggagaagaaagacgaagcgggttacaacggtaaggttactgatggtggaaggattgagaagcgcaaagaggatctcagcagtggcgtccaaatggcgcataagaacaagttagttttcttggagggatgcagttacaactttgacttggaggacttgctgagagcttctgctgaagttctcgggaaagggagctatggaactgcctacaaggctatactcgaggatggctctactgtggtagtcaagaggctaaaggatgtcgtggcagggaagaaagaatttgagcagcagatggagctcatagggagggtaggtaaacatgcaaacatcgcgcctattcgtgcttactactactcgaaggatgagaagcttgttgtttatgagtatattggtagaggcagcttctcagctctgttgcatggtatcaagggcgtgtgtgagaagaccccattagattggaacacaaggatgaagattatactcggaacagcacgcggcctcgagcacatccattcagaaggcggctccaggctcgcacacggcaacatcaagtcaaccaacgttctgctcgacggagaccacaacccttacgtctcagactacgggctgagctcgttgacgagccttccgatcaccacttcccgagctgtcgctggctaccgagctcaggagaccttcgaatcgaggaagttcacccacaagtccgacgtgtacggtttcggcgtcctcctcatggagacgctgacgggcaaggccccgcttcagtcacagggtcaggacgacgccgtcgacctaccgaggtgggtgcattcggtggtccgcgaggagtggaccgctgaggtgtttgacgtccagctgatgaagtatcccaacatagaagacgagctggtccagatgctccgtatcgccatggcgtgcacggcgtggtctcccgaccggcgtccgacgatggcgcaggtggttaggatggtggaggagctccggcactctgcttccgggagtcgcgctctctccgttggcagtcccaaggaatccagccctctgtcagcctgaattgtggttctgattcagaattcgtgtatccatgacatcgatgatcgatggtatcctgcatgtggttcacggtgcacacgttgtctgcctcgtcagatacttcgtactgctgtaactttggttcaatggaatgcttaagaaacaaggtcggaataggcgaatagctattttcgtctttc

SEQ ID NO: 17644 - protein, 635 aa, Zea mays subsp. mays
  peptide (1)..(635): Ceres Seq. ID no. 12375159
  misc_feature (315)..(616): Homolog of NCBI NO: 13324792 NR Description: putative receptor kinase [Oryza sativa]
  misc_feature (14)..(634): Homolog of NCBI NO: 15236593 NR Description: leucine-rich repeat transmembrane protein kinase,
  misc_feature (10)..(626): Homolog of NCBI NO: 34904136 NR Description: unnamed protein product [Oryza sativa (japonica
  misc_feature (28)..(630): Homolog of NCBI NO: 15292873 NR Description: putative receptor protein kinase [Arabidopsis
  misc_feature (28)..(630): Homolog of NCBI NO: 15225780 NR Description: leucine-rich repeat transmembrane protein kinase,
  misc_feature (5)..(613): Homolog of NCBI NO: 15238453 NR Description: leucine-rich repeat transmembrane protein kinase,
  misc_feature (28)..(618): Homolog of NCBI NO: 15231955 NR Description: leucine-rich repeat transmembrane protein kinase,
  misc_feature (12)..(631): Homolog of NCBI NO: 15237162 NR Description: leucine-rich repeat transmembrane protein kinase,
  misc_feature (10)..(631): Homolog of NCBI NO: 34909286 NR Description: putative receptor-like protein kinase
  misc_feature (10)..(634): Homolog of NCBI NO: 33146664 NR Description: putative receptor-like protein kinase
MGDRNHGRSLPLLLYLHLLLPILPFAMADIASEKQALLAFASAVYHGNKLNWSQNIPVCSWHGVTCSLDRSCILALRVPGAGLIGTIPADTLGRLVSLQVLSMRSNRLSGSLPNDVVSLPSLQAIFVQHNELSGDLPPFLSPNLNTLDLSYNSFTGQIPSGLQNLTKLSVLNLAENSLSGPIPDLKLPSLRQLNLSNNELNGSIPPFFQIFSNSSFLGNSGLCGPPLTECSFLSSPTPSQVPSPPKLPNHEKKAGNGLVIVAVAGSFVIFLLAAVMFTMCISKRKEKKDEAGYNGKVTDGGRIEKRKEDLSSGVQMAHKNKLVFLEGCSYNFDLEDLLRASAEVLGKGSYGTAYKAILEDGSTVVVKRLKDVVAGKKEFEQQMELIGRVGKHANIAPIRAYYYSKDEKLVVYEYIGRGSFSALLHGIKGVCEKTPLDWNTRMKIILGTARGLEHIHSEGGSRLAHGNIKSTNVLLDGDHNPYVSDYGLSSLTSLPITTSRAVAGYRAQETFESRKFTHKSDVYGFGVLLMETLTGKAPLQSQGQDDAVDLPRWVHSVVREEWTAEVFDVQLMKYPNIEDELVQMLRIAMACTAWSPDRRPTMAQVVRMVEELRHSASGSRALSVGSPKESSPLSA

SEQ ID NO: 17645 - protein, 609 aa, Zea mays subsp. mays
  peptide (1)..(609): Ceres Seq. ID no. 12375160
  misc_feature (289)..(590): Homolog of NCBI NO: 13324792 NR Description: putative receptor kinase [Oryza sativa]
  misc_feature (1)..(608): Homolog of NCBI NO: 15236593 NR Description: leucine-rich repeat transmembrane protein kinase,
  misc_feature (1)..(600): Homolog of NCBI NO: 34904136 NR Description: unnamed protein product [Oryza sativa (japonica
  misc_feature (2)..(604): Homolog of NCBI NO: 15292873 NR Description: putative receptor protein kinase [Arabidopsis
  misc_feature (2)..(604): Homolog of NCBI NO: 15225780 NR Description: leucine-rich repeat transmembrane protein kinase,
  misc_feature (1)..(587): Homolog of NCBI NO: 15238453 NR Description: leucine-rich repeat transmembrane protein kinase,
  misc_feature (2)..(592): Homolog of NCBI NO: 15231955 NR Description: leucine-rich repeat transmembrane protein kinase,
  misc_feature (1)..(605): Homolog of NCBI NO: 15237162 NR Description: leucine-rich repeat transmembrane protein kinase,
  misc_feature (1)..(605): Homolog of NCBI NO: 34909286 NR Description: putative receptor-like protein kinase
  misc_feature (1)..(608): Homolog of NCBI NO: 33146664 NR Description: putative receptor-like protein kinase
MADIASEKQALLAFASAVYHGNKLNWSQNIPVCSWHGVTCSLDRSCILALRVPGAGLIGTIPADTLGRLVSLQVLSMRSNRLSGSLPNDVVSLPSLQAIFVQHNELSGDLPPFLSPNLNTLDLSYNSFTGQIPSGLQNLTKLSVLNLAENSLSGPIPDLKLPSLRQLNLSNNELNGSIPPFFQIFSNSSFLGNSGLCGPPLTECSFLSSPTPSQVPSPPKLPNHEKKAGNGLVIVAVAGSFVIFLLAAVMFTMCISKRKEKKDEAGYNGKVTDGGRIEKRKEDLSSGVQMAHKNKLVFLEGCSYNFDLEDLLRASAEVLGKGSYGTAYKAILEDGSTVVVKRLKDVVAGKKEFEQQMELIGRVGKHANIAPIRAYYYSKDEKLVVYEYIGRGSFSALLHGIKGVCEKTPLDWNTRMKIILGTARGLEHIHSEGGSRLAHGNIKSTNVLLDGDHNPYVSDYGLSSLTSLPITTSRAVAGYRAQETFESRKFTHKSDVYGFGVLLMETLTGKAPLQSQGQDDAVDLPRWVHSVVREEWTAEVFDVQLMKYPNIEDELVQMLRIAMACTAWSPDRRPTMAQVVRMVEELRHSASGSRALSVGSPKESSPLSA

SEQ ID NO: 17646 - protein, 533 aa, Zea mays subsp. mays
  peptide (1)..(533): Ceres Seq. ID no. 12375161
  misc_feature (213)..(514): Homolog of NCBI NO: 13324792 NR Description: putative receptor kinase [Oryza sativa]
  misc_feature (1)..(532): Homolog of NCBI NO: 15236593 NR Description: leucine-rich repeat transmembrane protein kinase,
  misc_feature (1)..(524): Homolog of NCBI NO: 34904136 NR Description: unnamed protein product [Oryza sativa (japonica
  misc_feature (1)..(528): Homolog of NCBI NO: 15292873 NR Description: putative receptor protein kinase [Arabidopsis
  misc_feature (1)..(528): Homolog of NCBI NO: 15225780 NR Description: leucine-rich repeat transmembrane protein kinase,
  misc_feature (1)..(511): Homolog of NCBI NO: 15238453 NR Description: leucine-rich repeat transmembrane protein kinase,
  misc_feature (1)..(516): Homolog of NCBI NO: 15231955 NR Description: leucine-rich repeat transmembrane protein kinase,
  misc_feature (1)..(529): Homolog of NCBI NO: 15237162 NR Description: leucine-rich repeat transmembrane protein kinase,
  misc_feature (1)..(529): Homolog of NCBI NO: 34909286 NR Description: putative receptor-like protein kinase
  misc_feature (1)..(532): Homolog of NCBI NO: 33146664 NR Description: putative receptor-like protein kinase
MRSNRLSGSLPNDVVSLPSLQAIFVQHNELSGDLPPFLSPNLNTLDLSYNSFTGQIPSGLQNLTKLSVLNLAENSLSGPIPDLKLPSLRQLNLSNNELNGSIPPFFQIFSNSSFLGNSGLCGPPLTECSFLSSPTPSQVPSPPKLPNHEKKAGNGLVIVAVAGSFVIFLLAAVMFTMCISKRKEKKDEAGYNGKVTDGGRIEKRKEDLSSGVQMAHKNKLVFLEGCSYNFDLEDLLRASAEVLGKGSYGTAYKAILEDGSTVVVKRLKDVVAGKKEFEQQMELIGRVGKHANIAPIRAYYYSKDEKLVVYEYIGRGSFSALLHGIKGVCEKTPLDWNTRMKIILGTARGLEHIHSEGGSRLAHGNIKSTNVLLDGDHNPYVSDYGLSSLTSLPITTSRAVAGYRAQETFESRKFTHKSDVYGFGVLLMETLTGKAPLQSQGQDDAVDLPRWVHSVVREEWTAEVFDVQLMKYPNIEDELVQMLRIAMACTAWSPDRRPTMAQVVRMVEELRHSASGSRALSVGSPKESSPLSA

SEQ ID NO: 17647 - DNA, 3580 bp, Zea mays subsp. mays
  misc_feature (1)..(3580): Ceres Seq. ID no. 12366227
  misc_feature: MA Experiment ID: 108504 Result: Down-regulated in Transcription
  misc_feature: MA Experiment 108504 PARAMETER Experiment Name: Zm_Drought_P Parameter: Age (day) Value: 8
  misc_feature: MA Experiment 108504 PARAMETER Experiment Name: Zm_Drought_P Parameter: Organism Value: Zea mays
  misc_feature: MA Experiment 108504 PARAMETER Experiment Name: Zm_Drought_P Parameter: Plant Line Value: 35A19
  misc_feature: MA Experiment 108504 PARAMETER Experiment Name: Zm_Drought_P Parameter: Timepoint (hr) Value: 12
  misc_feature: MA Experiment 108504 PARAMETER Experiment Name: Zm_Drought_P Parameter: Tissue Value: Aerial
  misc_feature: MA Experiment 108504 PARAMETER Experiment Name: Zm_Drought_P Parameter: Treatment Value: Drought vs. No Drought
  misc_feature: MA Experiment ID: 108515 Result: Down-regulated in Transcription
  misc_feature: MA Experiment 108515 PARAMETER Experiment Name: Zm_2mM_SA_P Parameter: Age (day) Value: 8
  misc_feature: MA Experiment 108515 PARAMETER Experiment Name: Zm_2mM_SA_P Parameter: Organism Value: Zea mays
  misc_feature: MA Experiment 108515 PARAMETER Experiment Name: Zm_2mM_SA_P Parameter: Plant Line Value: 35A19
  misc_feature: MA Experiment 108515 PARAMETER Experiment Name: Zm_2mM_SA_P Parameter: Timepoint (hr) Value: 12
  misc_feature: MA Experiment 108515 PARAMETER Experiment Name: Zm_2mM_SA_P Parameter: Tissue Value: Aerial
  misc_feature: MA Experiment 108515 PARAMETER Experiment Name: Zm_2mM_SA_P Parameter: Treatment Value: 2mM SA vs. No Treatment
  misc_feature: MA Experiment ID: 108522 Result: Down-regulated in Transcription
  misc_feature: MA Experiment 108522 PARAMETER Experiment Name: Zm_42deg_Heat_P Parameter: Age (day) Value: 8
  misc_feature: MA Experiment 108522 PARAMETER Experiment Name: Zm_42deg_Heat_P Parameter: Organism Value: Zea mays
  misc_feature: MA Experiment 108522 PARAMETER Experiment Name: Zm_42deg_Heat_P Parameter: Plant Line Value: 35A19
  misc_feature: MA Experiment 108522 PARAMETER Experiment Name: Zm_42deg_Heat_P Parameter: Temperature (deg C) Value: 42 vs. 22
  misc_feature: MA Experiment 108522 PARAMETER Experiment Name: Zm_42deg_Heat_P Parameter: Timepoint (hr) Value: 1
  misc_feature: MA Experiment 108522 PARAMETER Experiment Name: Zm_42deg_Heat_P Parameter: Tissue Value: Aerial
  misc_feature: MA Experiment ID: 108527 Result: Down-regulated in Transcription
  misc_feature: MA Experiment 108527 PARAMETER Experiment Name: Zm_5mM_NO_P Parameter: Age (day) Value: 8
  misc_feature: MA Experiment 108527 PARAMETER Experiment Name: Zm_5mM_NO_P Parameter: Organism Value: Zea mays
  misc_feature: MA Experiment 108527 PARAMETER Experiment Name: Zm_5mM_NO_P Parameter: Plant Line Value: 35A19
  misc_feature: MA Experiment 108527 PARAMETER Experiment Name: Zm_5mM_NO_P Parameter: Timepoint (hr) Value: 6
  misc_feature: MA Experiment 108527 PARAMETER Experiment Name: Zm_5mM_NO_P Parameter: Tissue Value: Aerial
  misc_feature: MA Experiment 108527 PARAMETER Experiment Name: Zm_5mM_NO_P Parameter: Treatment Value: 5mM NO vs. No Treatment
  misc_feature: MA Experiment ID: 108535 Result: Down-regulated in Transcription
  misc_feature: MA Experiment 108535 PARAMETER Experiment Name: Zm_Meristem_P Parameter: Age (day) Value: 8
  misc_feature: MA Experiment 108535 PARAMETER Experiment Name: Zm_Meristem_P Parameter: Organism Value: Zea mays
  misc_feature: MA Experiment 108535 PARAMETER Experiment Name: Zm_Meristem_P Parameter: Plant Line Value: 35A19
  misc_feature: MA Experiment 108535 PARAMETER Experiment Name: Zm_Meristem_P Parameter: Tissue Value: Root Meristem vs. Above Root Meristem
  misc_feature: MA Experiment ID: 108556 Result: Down-regulated in Transcription
  misc_feature: MA Experiment 108556 PARAMETER Experiment Name: Zm_Drought_P Parameter: Age (day) Value: 9
  misc_feature: MA Experiment 108556 PARAMETER Experiment Name: Zm_Drought_P Parameter: Organism Value: Zea mays
  misc_feature: MA Experiment 108556 PARAMETER Experiment Name: Zm_Drought_P Parameter: Plant Line Value: 35A19
  misc_feature: MA Experiment 108556 PARAMETER Experiment Name: Zm_Drought_P Parameter: Timepoint (hr) Value: 24
  misc_feature: MA Experiment 108556 PARAMETER Experiment Name: Zm_Drought_P Parameter: Tissue Value: Aerial
  misc_feature: MA Experiment 108556 PARAMETER Experiment Name: Zm_Drought_P Parameter: Treatment Value: Drought vs. No Drought
  misc_feature: MA Experiment ID: 108559 Result: Down-regulated in Transcription
  misc_feature: MA Experiment 108559 PARAMETER Experiment Name: Zm_5mM_NO_P Parameter: Age (day) Value: 8
  misc_feature: MA Experiment 108559 PARAMETER Experiment Name: Zm_5mM_NO_P Parameter: Organism Value: Zea mays
  misc_feature: MA Experiment 108559 PARAMETER Experiment Name: Zm_5mM_NO_P Parameter: Plant Line Value: 35A19
  misc_feature: MA Experiment 108559 PARAMETER Experiment Name: Zm_5mM_NO_P Parameter: Timepoint (hr) Value: 12
  misc_feature: MA Experiment 108559 PARAMETER Experiment Name: Zm_5mM_NO_P Parameter: Tissue Value: Aerial
  misc_feature: MA Experiment 108559 PARAMETER Experiment Name: Zm_5mM_NO_P Parameter: Treatment Value: 5mM NO vs. No Treatment
  misc_feature: MA Experiment ID: 20000629 Result: Up-regulated in Transcription
  misc_feature: MA Experiment 20000629 PARAMETER Experiment Name: Zm_Herbicide-Treatments_P Parameter: Timepoint (hr) Value: 12
  misc_feature: MA Experiment 20000629 PARAMETER Experiment Name: Zm_Herbicide-Treatments_P Parameter: Tissue Value: Aerial
  misc_feature: MA Experiment 20000629 PARAMETER Experiment Name: Zm_Herbicide-Treatments_P Parameter: Treatment Value: Trimec vs. No Treatment
gcacgagaccattacctagaacatcctaatcgaaaaatcaatctctttcgctgcttgctttccattgaaaatgatgtgttctcccacaccctgcaacctgaaggcaacatgcctagcacaaaattctcccaaggattcccatggtttcctagcccaagatgtgcatggagccttgcttcttgatctccagcagaacagaagtgaagcactgtggccttgcatgcccaagttttgttgttagcgttaccaagatcatagctaccactgatgcagtgcgttcgcgatgaactgtgtagagcaggttctgaagagagtgttacctgcatctgcatggaagagggaggagacccgcagcttccgagcatctccgtggcacgcaccacgtccgaaggcgcgggggccgtcgacttggatctccttgagcagctactgtccggcgacaacggttggctcgaggtggtctcgcgctcgcccaactcggtagcgtttcctccaccctcggccttcttctcggctgacgcgacggccaccacagtgacgacgacggcggcgccggccgcgaacgccagctggttgattcagacgggcggcgcgagcaccccctccgtgcgggagcggttcagccaggccctgtcctacatccgtgatacgcagagcgacggcgacgtcctcgtgcagctctgggtgccggtcaaccgcgatgacgggaagctggtgctgaccaccagcggtcagccgttcacgctcgaccaccgctccgacagcctcatccggttcagggaggtgtccaccaagtaccagttcccagccgacgttaggtcaggggagtcaccagggttgccagggagggtcttcatcggcaggctccctgagtggtcgccggacatcaggtgcttcaccagctacgagtacgccagggtgacagatgcaaagtacctcgatgtccacggcaccatggggctgccagtgttcgagaaaagaagttacagttgcctgggcgttatcgagctgatcatgacaaagcagaagctcaacttcacctctgagctcaacaccatctgcagtgctctacaggcagttaatctcagaagtacagaagtttcgagcattccacgcaaaaagtttagcactgcttcctacaaagatgctttaccagagatactggaggtcctgagggcagcctgcttgacccacaagctgccattagctcagacatgggtcacatgtactcaacaagggaaacgaggcagccgacattctgacgagaactacaggtactgcatttccaccatcgacgaagcatgctttgtgaatgaagccgagatgcggggcttccatgaggcctgctccgaacaccatctgctgcgtggcgagggggtggcagggaaggccctcacgacaaaccagccatgcttcctgccggacattggatcctcaactaaattggaataccccttgtctcaccatgctaagatcttcaggttaaaaggtgcagtggcgatccgactgcggtgcacacgcactgggatagcagacttcgtgctggaattctttcttccaacagattgtgaagcactggaggagcagaagacagtgctggactccttgtcaggcaccatgcgaagtgtttgccagaccctacgtgtggtcacagatagagagatggaaggcgaagcggcgctggaaatgaacgagctgaactcttttactcctcctgagaaggacaaagatgagttgtcctttggaggcaattcagcagatcgtagaggggcctcttggacaagtctggcaggaacttcacagcaagaacccgagttagctgcattgcggatgcatggaacgttctcacctgtggggcagggtccatctctatctggtgttcaggcaactgctgaaggcagtaagacaaaaaggcgcacaaaggccgagaagaccgttagtttgcaggttcttcggcagtacttcgctggtagcctcaaagatgcagcgagaagccttggagtgtgtcccacgaccctcaaaagaatatgcaggcaacatggtataacccgctggccatcacgaaagatcaagaaggtagaccactctctaagaaagctccaacagatcattgattcggttcatggtgcagagacagctttccagctaaacaccctgtacaaggatctcacagacacctcaatatcatctgacaacaatttgtcaggaagtgtcacggttcctccaactaaccagagcaatctcaccgacttcaacaagcaccaaccccacaagtcaagtagcaatatgccatcaacttcacactcacactcctcatgcagccacggttctcagtcaagcccctcgtgtagcgttggtgcaacagaacatgcacaacagggtataattgatctgatgaagtcagaaaatcctgtgaaagacagctctattcagactatgcaaacagaaaacacttcattatatgagcatttctcagttcatgaggctccaattgatcttctacaggatgttactgaaaaggctaatggtgcacatcattcttctcgaagcctgtcatcccccaaccccaagcagaacacagatgcaaatatgagagtaaaggcaacatttggctcagaaaaggtgagattccgactaaacccagagtgcaattttcaaggactgaagcatgagctagcgaaacgtttgagtatagtagacacaaaccccttggttttaaagtacttggatgatgattcagaatgggtcttgatgacatgtgatgcagatctgcaggagtgccttcatgtatacaaactagcagatatccaaacaatcaaaatttcagttcatttagctgttagtccagctacaagggtcacagctggtcacactggtttgtcatgacaacagtatgagcctcaccactttgtgaggtttaatcaaattcaaccaggatcacatggttttgtgcaggggaaaccaaagattccaggagtccagggttggtagctgtgcaatactgcaatgtactatgtaccaccacgtcccagttctactgttagatcaattagtcttgtttctgatgctcaggttaggaactaatgatcaaacaagaatacttgacaatgagagagtcaagaaatcaggataaacagaagtaagcatgcattgcttgtaaatacttattgatgaacctgaatctctgaatgacaatgcaattgattgaattaatagggtgacgtatctacaaatcagatttgctccaactccaagtatgttttgtttctttgagtgctgatgtgcaacaatcattgatggcttctttctgataattgatcagctacaattgtcccttaagatcacagcattccttcatcgcctgagcgatcagcatgctctgttcaatgcacatgaaattctgcttctgaaattgtaattttctgcagcaaggattagatctagaataggatgataggatacttagtttgttcaatatgtttgtccattgcaaaaaaaataaaaaatgaatggtacactgaattatgggcctctttgaaagaacgtctgctgctgtagacattatagattgttttccttt

SEQ ID NO: 17648 - protein, 872 aa, Zea mays subsp. mays
  peptide (1)..(872): Ceres Seq. ID no. 12366228
  misc_feature (553)..(604): Pfam Name: RWP-RK domain Pfam Description: RWP-RK domain
  misc_feature (99)..(728): Homolog of NCBI NO: 15217991 NR Description: nodule inception protein, putative
  misc_feature (98)..(520): Homolog of NCBI NO: 20503001 NR Description: Putataive nodule inception protein
  misc_feature (484)..(871): Homolog of NCBI NO: 30690272 NR Description: RWP-RK domain containing protein [Arabidopsis
  misc_feature (746)..(859): Homolog of NCBI NO: 15223014 NR Description: hypothetical protein; protein id: At1g76350.1
  misc_feature (60)..(854): Homolog of NCBI NO: 33468530 NR Description: NIN-like protein 1 [Lotus corniculatus var.
  misc_feature (682)..(852): Homolog of NCBI NO: 15217991 NR Description: nodule inception protein, putative
  misc_feature (99)..(689): Homolog of NCBI NO: 15223014 NR Description: hypothetical protein; protein id: At1g76350.1
  misc_feature (60)..(476): Homolog of NCBI NO: 30690272 NR Description: RWP-RK domain containing protein [Arabidopsis
  misc_feature (415)..(872): Homolog of NCBI NO: 30679885 NR Description: RWP-RK domain containing protein [Arabidopsis
  misc_feature (444)..(872): Homolog of NCBI NO: 20503001 NR Description: Putataive nodule inception protein
MQCVRDELCRAGSEESVTCICMEEGGDPQLPSISVARTTSEGAGAVDLDLLEQLLSGDNGWLEVVSRSPNSVAFPPPSAFFSADATATTVTTTAAPAANASWLIQTGGASTPSVRERFSQALSYIRDTQSDGDVLVQLWVPVNRDDGKLVLTTSGQPFTLDHRSDSLIRFREVSTKYQFPADVRSGESPGLPGRVFIGRLPEWSPDIRCFTSYEYARVTDAKYLDVHGTMGLPVFEKRSYSCLGVIELIMTKQKLNFTSELNTICSALQAVNLRSTEVSSIPRKKFSTASYKDALPEILEVLRAACLTHKLPLAQTWVTCTQQGKRGSRHSDENYRYCISTIDEACFVNEAEMRGFHEACSEHHLLRGEGVAGKALTTNQPCFLPDIGSSTKLEYPLSHHAKIFRLKGAVAIRLRCTRTGIADFVLEFFLPTDCEALEEQKTVLDSLSGTMRSVCQTLRVVTDREMEGEAALEMNELNSFTPPEKDKDELSFGGNSADRRGASWTSLAGTSQQEPELAALRMHGTFSPVGQGPSLSGVQATAEGSKTKRRTKAEKTVSLQVLRQYFAGSLKDAARSLGVCPTTLKRICRQHGITRWPSRKIKKVDHSLRKLQQIIDSVHGAETAFQLNTLYKDLTDTSISSDNNLSGSVTVPPTNQSNLTDFNKHQPHKSSSNMPSTSHSHSSCSHGSQSSPSCSVGATEHAQQGIIDLMKSENPVKDSSIQTMQTENTSLYEHFSVHEAPIDLLQDVTEKANGAHHSSRSLSSPNPKQNTDANMRVKATFGSEKVRFRLNPECNFQGLKHELAKRLSIVDTNPLVLKYLDDDSEWVLMTCDADLQECLHVYKLADIQTIKISVHLAVSPATRVTAGHTGLS

SEQ ID NO: 17649 - protein, 851 aa, Zea mays subsp. mays
  peptide (1)..(851): Ceres Seq. ID no. 12366229
  misc_feature (532)..(583): Pfam Name: RWP-RK domain Pfam Description: RWP-RK domain
  misc_feature (394)..(851): Homolog of NCBI NO: 30679885 NR Description: RWP-RK domain containing protein [Arabidopsis
  misc_feature (463)..(850): Homolog of NCBI NO: 30690272 NR Description: RWP-RK domain containing protein [Arabidopsis
  misc_feature (39)..(455): Homolog of NCBI NO: 30690272 NR Description: RWP-RK domain containing protein [Arabidopsis
  misc_feature (725)..(838): Homolog of NCBI NO: 15223014 NR Description: hypothetical protein; protein id: At1g76350.1
  misc_feature (78)..(668): Homolog of NCBI NO: 15223014 NR Description: hypothetical protein; protein id: At1g76350.1
  misc_feature (39)..(833): Homolog of NCBI NO: 33468530 NR Description: NIN-like protein 1 [Lotus corniculatus var.
  misc_feature (661)..(831): Homolog of NCBI NO: 15217991 NR Description: nodule inception protein, putative
  misc_feature (78)..(707): Homolog of NCBI NO: 15217991 NR Description: nodule inception protein, putative
  misc_feature (77)..(499): Homolog of NCBI NO: 20503001 NR Description: Putataive nodule inception protein
  misc_feature (423)..(851): Homolog of NCBI NO: 20503001 NR Description: Putataive nodule inception protein
MEEGGDPQLPSISVARTTSEGAGAVDLDLLEQLLSGDNGWLEVVSRSPNSVAFPPPSAFFSADATATTVTTTAAPAANASWLIQTGGASTPSVRERFSQALSYIRDTQSDGDVLVQLWVPVNRDDGKLVLTTSGQPFTLDHRSDSLIRFREVSTKYQFPADVRSGESPGLPGRVFIGRLPEWSPDIRCFTSYEYARVTDAKYLDVHGTMGLPVFEKRSYSCLGVIELIMTKQKLNFTSELNTICSALQAVNLRSTEVSSIPRKKFSTASYKDALPEILEVLRAACLTHKLPLAQTWVTCTQQGKRGSRHSDENYRYCISTIDEACFVNEAEMRGFHEACSEHHLLRGEGVAGKALTTNQPCFLPDIGSSTKLEYPLSHHAKIFRLKGAVAIRLRCTRTGIADFVLEFFLPTDCEALEEQKTVLDSLSGTMRSVCQTLRVVTDREMEGEAALEMNELNSFTPPEKDKDELSFGGNSADRRGASWTSLAGTSQQEPELAALRMHGTFSPVGQGPSLSGVQATAEGSKTKRRTKAEKTVSLQVLRQYFAGSLKDAARSLGVCPTTLKRICRQHGITRWPSRKIKKVDHSLRKLQQIIDSVHGAETAFQLNTLYKDLTDTSISSDNNLSGSVTVPPTNQSNLTDFNKHQPHKSSSNMPSTSHSHSSCSHGSQSSPSCSVGATEHAQQGIIDLMKSENPVKDSSIQTMQTENTSLYEHFSVHEAPIDLLQDVTEKANGAHHSSRSLSSPNPKQNTDANMRVKATFGSEKVRFRLNPECNFQGLKHELAKRLSIVDTNPLVLKYLDDDSEWVLMTCDADLQECLHVYKLADIQTIKISVHLAVSPATRVTAGHTGLS

SEQ ID NO: 17650 - protein, 643 aa, Zea mays subsp. mays
  peptide (1)..(643): Ceres Seq. ID no. 12366230
  misc_feature (324)..(375): Pfam Name: RWP-RK domain Pfam Description: RWP-RK domain
  misc_feature (186)..(643): Homolog of NCBI NO: 30679885 NR Description: RWP-RK domain containing protein [Arabidopsis
  misc_feature (255)..(642): Homolog of NCBI NO: 30690272 NR Description: RWP-RK domain containing protein [Arabidopsis
  misc_feature (1)..(247): Homolog of NCBI NO: 30690272 NR Description: RWP-RK domain containing protein [Arabidopsis
  misc_feature (517)..(630): Homolog of NCBI NO: 15223014 NR Description: hypothetical protein; protein id: At1g76350.1
  misc_feature (1)..(460): Homolog of NCBI NO: 15223014 NR Description: hypothetical protein; protein id: At1g76350.1
  misc_feature (1)..(625): Homolog of NCBI NO: 33468530 NR Description: NIN-like protein 1 [Lotus corniculatus var.
  misc_feature (453)..(623): Homolog of NCBI NO: 15217991 NR Description: nodule inception protein, putative
  misc_feature (1)..(499): Homolog of NCBI NO: 15217991 NR Description: nodule inception protein, putative
  misc_feature (1)..(291): Homolog of NCBI NO: 20503001 NR Description: Putataive nodule inception protein
  misc_feature (215)..(643): Homolog of NCBI NO: 20503001 NR Description: Putataive nodule inception protein
MGLPVFEKRSYSCLGVIELIMTKQKLNFTSELNTICSALQAVNLRSTEVSSIPRKKFSTASYKDALPEILEVLRAACLTHKLPLAQTWVTCTQQGKRGSRHSDENYRYCISTIDEACFVNEAEMRGFHEACSEHHLLRGEGVAGKALTTNQPCFLPDIGSSTKLEYPLSHHAKIFRLKGAVAIRLRCTRTGIADFVLEFFLPTDCEALEEQKTVLDSLSGTMRSVCQTLRVVTDREMEGEAALEMNELNSFTPPEKDKDELSFGGNSADRRGASWTSLAGTSQQEPELAALRMHGTFSPVGQGPSLSGVQATAEGSKTKRRTKAEKTVSLQVLRQYFAGSLKDAARSLGVCPTTLKRICRQHGITRWPSRKIKKVDHSLRKLQQIIDSVHGAETAFQLNTLYKDLTDTSISSDNNLSGSVTVPPTNQSNLTDFNKHQPHKSSSNMPSTSHSHSSCSHGSQSSPSCSVGATEHAQQGIIDLMKSENPVKDSSIQTMQTENTSLYEHFSVHEAPIDLLQDVTEKANGAHHSSRSLSSPNPKQNTDANMRVKATFGSEKVRFRLNPECNFQGLKHELAKRLSIVDTNPLVLKYLDDDSEWVLMTCDADLQECLHVYKLADIQTIKISVHLAVSPATRVTAGHTGLS

SEQ ID NO: 17651 - DNA, 2511 bp, Zea mays subsp. mays
  misc_feature (1)..(2511): Ceres Seq. ID no. 12361105
  misc_feature: MA Experiment ID: 108522 Result: Down-regulated in Transcription
  misc_feature: MA Experiment 108522 PARAMETER Experiment Name: Zm_42deg_Heat_P Parameter: Age (day) Value: 8
  misc_feature: MA Experiment 108522 PARAMETER Experiment Name: Zm_42deg_Heat_P Parameter: Organism Value: Zea mays
  misc_feature: MA Experiment 108522 PARAMETER Experiment Name: Zm_42deg_Heat_P Parameter: Plant Line Value: 35A19
  misc_feature: MA Experiment 108522 PARAMETER Experiment Name: Zm_42deg_Heat_P Parameter: Temperature (deg C) Value: 42 vs. 22
  misc_feature: MA Experiment 108522 PARAMETER Experiment Name: Zm_42deg_Heat_P Parameter: Timepoint (hr) Value: 1
  misc_feature: MA Experiment 108522 PARAMETER Experiment Name: Zm_42deg_Heat_P Parameter: Tissue Value: Aerial
  misc_feature: MA Experiment ID: 108535 Result: Up-regulated in Transcription
  misc_feature: MA Experiment 108535 PARAMETER Experiment Name: Zm_Meristem_P Parameter: Age (day) Value: 8
  misc_feature: MA Experiment 108535 PARAMETER Experiment Name: Zm_Meristem_P Parameter: Organism Value: Zea mays
  misc_feature: MA Experiment 108535 PARAMETER Experiment Name: Zm_Meristem_P Parameter: Plant Line Value: 35A19
  misc_feature: MA Experiment 108535 PARAMETER Experiment Name: Zm_Meristem_P Parameter: Tissue Value: Root Meristem vs. Above Root Meristem
  misc_feature: MA Experiment ID: 108544 Result: Down-regulated in Transcription
  misc_feature: MA Experiment ID: 108556 Result: Down-regulated in Transcription
  misc_feature: MA Experiment 108556 PARAMETER Experiment Name: Zm_Drought_P Parameter: Age (day) Value: 9
  misc_feature: MA Experiment 108556 PARAMETER Experiment Name: Zm_Drought_P Parameter: Organism Value: Zea mays
  misc_feature: MA Experiment 108556 PARAMETER Experiment Name: Zm_Drought_P Parameter: Plant Line Value: 35A19
  misc_feature: MA Experiment 108556 PARAMETER Experiment Name: Zm_Drought_P Parameter: Timepoint (hr) Value: 24
  misc_feature: MA Experiment 108556 PARAMETER Experiment Name: Zm_Drought_P Parameter: Tissue Value: Aerial
  misc_feature: MA Experiment 108556 PARAMETER Experiment Name: Zm_Drought_P Parameter: Treatment Value: Drought vs. No Drought
  misc_feature: MA Experiment ID: 20000487 Result: Up-regulated in Transcription
  misc_feature: MA Experiment 20000487 PARAMETER Experiment Name: Zm_50mM_NH4NO3_L_to_H_P Parameter: Organism Value: Zea mays
  misc_feature: MA Experiment 20000487 PARAMETER Experiment Name: Zm_50mM_NH4NO3_L_to_H_P Parameter: Timepoint (hr) Value: 4
  misc_feature: MA Experiment 20000487 PARAMETER Experiment Name: Zm_50mM_NH4NO3_L_to_H_P Parameter: Tissue Value: Leaves
  misc_feature: MA Experiment 20000487 PARAMETER Experiment Name: Zm_50mM_NH4NO3_L_to_H_P Parameter: Treatment Value: 50mM NH4NO3 vs. 100mM Mannitol
  misc_feature: MA Experiment ID: 20000626 Result: Up-regulated in Transcription
  misc_feature: MA Experiment 20000626 PARAMETER Experiment Name: Zm_Herbicide-Treatments_P Parameter: Timepoint (hr) Value: 12
  misc_feature: MA Experiment 20000626 PARAMETER Experiment Name: Zm_Herbicide-Treatments_P Parameter: Tissue Value: Aerial
  misc_feature: MA Experiment 20000626 PARAMETER Experiment Name: Zm_Herbicide-Treatments_P Parameter: Treatment Value: Roundup vs. No Treatment
gcacgagaccattacctagaacatcctaatcgaaaaaccaatccgactctcgtccctccccgactcaccccactgcccagccgcacgcgccgccgtgtgttcgcgctctctcccactgtgtctgtgacgactgggtaggctacagccgccgcccgtcgccaggtgccgatcccttcgccgacgaagagcatccaccaggctccggccaagggcgtgatggcggctgtagggagcttgcagccgggggtggagactctacatgtgcaggattacaaggacgcgcctccagccaaggctgtggcggccgcggtagagagcttgcagccggcgatggagagcctacatgtgcaggaattcaaggacgcggctccggctaagggcgtttccgccgctgctgtagggagcttgcagccggggatggagaacctgcaggtgcaggattacaaggacgctagcatgtattatggtgcttacccggcttatccctatggagcaccctatggtggctggggggagtactccacatacttgagccatgatggagcacagacaccaactgctggcgcgtatgctgacatgtactatggccatgctgcatatggtcatatttatgggtctcagaattaccagtatccatcgacctacagcaagcaacagaattccactgccaagctgtcgtccaatggtaaaagtgagaaattggctccagctccggaaggggatgtctccactattgttgttgatgaggtgaaagtcctgaaaaatccaaacccgaccctgaaggcagacaggaatgcaccaggttccaatggttcatatggccgatctagtgtgcgttctggtaactatcagaaccagactagttggtcacactatccatattatagtagtgagatgttctctgacaagcagcaaaagtttaccagcaatcacaattcgactgctcccaatgataaaaccaaggggcagtcgaggaaccaaaacacgagacagtatcctcatctcatgggtctgcaaacaccaacttccccatcagtttactcagctaatggaatatatcggtatgatggcagctatggacctagcctttggtatggatcacacatgtatagttctgggttatatggtggatggaattcactgtatgatgggaagtacagaaccagaggaagatgtaataatggctattatgcttatggtaatggaagccttgatggctttaatgagctgaaaagagggccaagaagtgggatgtacacaaaccagctggggcttggagctactactgaagtaccagcaaaagagcaggaccttctgtctgctaatggttcacatcctgccatgaaggaccagtataatcgggctgactttgcggaaacatactcagacgcaaaattcttcattatcaaatcatacagtgaagacgatgttcacaagagcgtaaagtacaatgtgtgggctagcactccaaatggtaataagaaacttgatgctgcctatcaagaggctaaagaaaaatcaagcgaaactcctgttttccttcttttctctgtgaatgcaagtggccagtttgttgggcttgctgagatggtgggtcgtgttgattttaacaaaacagtagatcattggcaacaggacaagtggactggttgtttccctgtcaagtggcacattgtgaaggatgttccaaacagtttgctgaagcacatcattctcgagaacaatgaaaacaagccagtgacaaacagcagagatacacatgaggtgaagcttgagcaaggccttcaagtgcttaaggttttcaaggatcatgtgtgcaagacatctatactggatgactttggcttttacgataatcgtgagaagatgatgcaatataggaaagcaaagcagcagcagtcactgaaaaaggtcatcgatgtgaaggtgcctaacgccactgacgcagatacaagtctcgtaggaactggatcaacggaactcaccaatgttgaggctgatgtcttgaacaaagagctttcattagacaaagcagtagagaaaaacgaggagaaaggaaatgatgtcgccccacaggacctgaaatcatcagctgagaagtcggcaagcccaaatggctgttaatttttttttttttggttagctcggccattgacagtggtatggggcgggaacctgaggctgggggttgtttgaggaaatcctgagatcccattgagcttgtttcttgcccttgttttctatagttcatagaggattagttagttgcttgtgtgtttgggtgataggtgaggtcagtgtcctggcatggcaggtatttaggaatagaaggacgattaactggggtttacaatggtggttcatgggtttgaggttgtgtttccatctatttgcctttcccctctctatattccagttcctacctctctagattctggacaaacgtagtgcttatttaatgctggctggtttaagaacctgaaatggacaaaggaatccaatcaagtgttt

SEQ ID NO: 17652 - protein, 635 aa, Zea mays subsp. mays
  peptide (1)..(635): Ceres Seq. ID no. 12361106
  misc_feature (442)..(532): Pfam Name: YT521-B-like family Pfam Description: YT521-B-like family
  misc_feature (83)..(580): Homolog of NCBI NO: 30682679 NR Description: expressed protein [Arabidopsis thaliana]
  misc_feature (273)..(612): Homolog of NCBI NO: 30697466 NR Description: expressed protein [Arabidopsis thaliana]
  misc_feature (150)..(612): Homolog of NCBI NO: 15912287 NR Description: AT5g61020/maf19_20 [Arabidopsis thaliana]
  misc_feature (150)..(612): Homolog of NCBI NO: 30697464 NR Description: expressed protein [Arabidopsis thaliana]
  misc_feature (83)..(580): Homolog of NCBI NO: 25084169 NR Description: Unknown protein [Arabidopsis thaliana]
  misc_feature (80)..(565): Homolog of NCBI NO: 25372787 NR Description: Rubisco subunit binding-protein beta subunit
  misc_feature (80)..(570): Homolog of NCBI NO: 18405397 NR Description: expressed protein
  misc_feature (140)..(591): Homolog of NCBI NO: 22773231 NR Description: Putative RNA-binding protein
  misc_feature (83)..(615): Homolog of NCBI NO: 18087662 NR Description: putative RNA-binding protein [Oryza sativa]
  misc_feature (51)..(635): Homolog of NCBI NO: 34395023 NR Description: high-glucose-regulated protein 8-like
MAAVGSLQPGVETLHVQDYKDAPPAKAVAAAVESLQPAMESLHVQEFKDAAPAKGVSAAAVGSLQPGMENLQVQDYKDASMYYGAYPAYPYGAPYGGWGEYSTYLSHDGAQTPTAGAYADMYYGHAAYGHIYGSQNYQYPSTYSKQQNSTAKLSSNGKSEKLAPAPEGDVSTIVVDEVKVLKNPNPTLKADRNAPGSNGSYGRSSVRSGNYQNQTSWSHYPYYSSEMFSDKQQKFTSNHNSTAPNDKTKGQSRNQNTRQYPHLMGLQTPTSPSVYSANGIYRYDGSYGPSLWYGSHMYSSGLYGGWNSLYDGKYRTRGRCNNGYYAYGNGSLDGFNELKRGPRSGMYTNQLGLGATTEVPAKEQDLLSANGSHPAMKDQYNRADFAETYSDAKFFIIKSYSEDDVHKSVKYNVWASTPNGNKKLDAAYQEAKEKSSETPVFLLFSVNASGQFVGLAEMVGRVDFNKTVDHWQQDKWTGCFPVKWHIVKDVPNSLLKHIILENNENKPVTNSRDTHEVKLEQGLQVLKVFKDHVCKTSILDDFGFYDNREKMMQYRKAKQQQSLKKVIDVKVPNATDADTSLVGTGSTELTNVEADVLNKELSLDKAVEKNEEKGNDVAPQDLKSSAEKSASPNGC

SEQ ID NO: 17653 - protein, 597 aa, Zea mays subsp. mays
  peptide (1)..(597): Ceres Seq. ID no. 12361107
  misc_feature (404)..(494): Pfam Name: YT521-B-like family Pfam Description: YT521-B-like family
  misc_feature (45)..(542): Homolog of NCBI NO: 30682679 NR Description: expressed protein [Arabidopsis thaliana]
  misc_feature (235)..(574): Homolog of NCBI NO: 30697466 NR Description: expressed protein [Arabidopsis thaliana]
  misc_feature (112)..(574): Homolog of NCBI NO: 15912287 NR Description: AT5g61020/maf19_20 [Arabidopsis thaliana]
  misc_feature (112)..(574): Homolog of NCBI NO: 30697464 NR Description: expressed protein [Arabidopsis thaliana]
  misc_feature (45)..(542): Homolog of NCBI NO: 25084169 NR Description: Unknown protein [Arabidopsis thaliana]
  misc_feature (42)..(527): Homolog of NCBI NO: 25372787 NR Description: Rubisco subunit binding-protein beta subunit
  misc_feature (42)..(532): Homolog of NCBI NO: 18405397 NR Description: expressed protein
  misc_feature (102)..(553): Homolog of NCBI NO: 22773231 NR Description: Putative RNA-binding protein
  misc_feature (45)..(577): Homolog of NCBI NO: 18087662 NR Description: putative RNA-binding protein [Oryza sativa]
  misc_feature (13)..(597): Homolog of NCBI NO: 34395023 NR Description: high-glucose-regulated protein 8-like
MESLHVQEFKDAAPAKGVSAAAVGSLQPGMENLQVQDYKDASMYYGAYPAYPYGAPYGGWGEYSTYLSHDGAQTPTAGAYADMYYGHAAYGHIYGSQNYQYPSTYSKQQNSTAKLSSNGKSEKLAPAPEGDVSTIVVDEVKVLKNPNPTLKADRNAPGSNGSYGRSSVRSGNYQNQTSWSHYPYYSSEMFSDKQQKFTSNHNSTAPNDKTKGQSRNQNTRQYPHLMGLQTPTSPSVYSANGIYRYDGSYGPSLWYGSHMYSSGLYGGWNSLYDGKYRTRGRCNNGYYAYGNGSLDGFNELKRGPRSGMYTNQLGLGATTEVPAKEQDLLSANGSHPAMKDQYNRADFAETYSDAKFFIIKSYSEDDVHKSVKYNVWASTPNGNKKLDAAYQEAKEKSSETPVFLLFSVNASGQFVGLAEMVGRVDFNKTVDHWQQDKWTGCFPVKWHIVKDVPNSLLKHIILENNENKPVTNSRDTHEVKLEQGLQVLKVFKDHVCKTSILDDFGFYDNREKMMQYRKAKQQQSLKKVIDVKVPNATDADTSLVGTGSTELTNVEADVLNKELSLDKAVEKNEEKGNDVAPQDLKSSAEKSASPNGC

SEQ ID NO: 17654 - protein, 568 aa, Zea mays subsp. mays
  peptide (1)..(568): Ceres Seq. ID no. 12361108
  misc_feature (375)..(465): Pfam Name: YT521-B-like family Pfam Description: YT521-B-like family
  misc_feature (16)..(513): Homolog of NCBI NO: 30682679 NR Description: expressed protein [Arabidopsis thaliana]
  misc_feature (206)..(545): Homolog of NCBI NO: 30697466 NR Description: expressed protein [Arabidopsis thaliana]
  misc_feature (83)..(545): Homolog of NCBI NO: 15912287 NR Description: AT5g61020/maf19_20 [Arabidopsis thaliana]
  misc_feature (83)..(545): Homolog of NCBI NO: 30697464 NR Description: expressed protein [Arabidopsis thaliana]
  misc_feature (16)..(513): Homolog of NCBI NO: 25084169 NR Description: Unknown protein [Arabidopsis thaliana]
  misc_feature (13)..(498): Homolog of NCBI NO: 25372787 NR Description: Rubisco subunit binding-protein beta subunit
  misc_feature (13)..(503): Homolog of NCBI NO: 18405397 NR Description: expressed protein
  misc_feature (73)..(524): Homolog of NCBI NO: 22773231 NR Description: Putative RNA-binding protein
  misc_feature (16)..(548): Homolog of NCBI NO: 18087662 NR Description: putative RNA-binding protein [Oryza sativa]
  misc_feature (1)..(568): Homolog of NCBI NO: 34395023 NR Description: high-glucose-regulated protein 8-like
MENLQVQDYKDASMYYGAYPAYPYGAPYGGWGEYSTYLSHDGAQTPTAGAYADMYYGHAAYGHIYGSQNYQYPSTYSKQQNSTAKLSSNGKSEKLAPAPEGDVSTIVVDEVKVLKNPNPTLKADRNAPGSNGSYGRSSVRSGNYQNQTSWSHYPYYSSEMFSDKQQKFTSNHNSTAPNDKTKGQSRNQNTRQYPHLMGLQTPTSPSVYSANGIYRYDGSYGPSLWYGSHMYSSGLYGGWNSLYDGKYRTRGRCNNGYYAYGNGSLDGFNELKRGPRSGMYTNQLGLGATTEVPAKEQDLLSANGSHPAMKDQYNRADFAETYSDAKFFIIKSYSEDDVHKSVKYNVWASTPNGNKKLDAAYQEAKEKSSETPVFLLFSVNASGQFVGLAEMVGRVDFNKTVDHWQQDKWTGCFPVKWHIVKDVPNSLLKHIILENNENKPVTNSRDTHEVKLEQGLQVLKVFKDHVCKTSILDDFGFYDNREKMMQYRKAKQQQSLKKVIDVKVPNATDADTSLVGTGSTELTNVEADVLNKELSLDKAVEKNEEKGNDVAPQDLKSSAEKSASPNGC

SEQ ID NO: 17655 - DNA, 1670 bp, Zea mays subsp. mays
  misc_feature (1)..(1670): Ceres Seq. ID no. 12366280
  misc_feature: MA Experiment ID: 108528 Result: Up-regulated in Transcription
  misc_feature: MA Experiment 108528 PARAMETER Experiment Name: Zm_Imbibed_Seeds_P Parameter: Age (day) Value: 5 vs. 2
  misc_feature: MA Experiment 108528 PARAMETER Experiment Name: Zm_Imbibed_Seeds_P Parameter: Organism Value: Zea mays
  misc_feature: MA Experiment 108528 PARAMETER Experiment Name: Zm_Imbibed_Seeds_P Parameter: Plant Line Value: 35A19
  misc_feature: MA Experiment 108528 PARAMETER Experiment Name: Zm_Imbibed_Seeds_P Parameter: Tissue Value: Aerial vs. Embryo
  misc_feature: MA Experiment ID: 108530 Result: Up-regulated in Transcription
  misc_feature: MA Experiment 108530 PARAMETER Experiment Name: Zm_Imbibed_Seeds_P Parameter: Age (day) Value: 6 vs. 2
  misc_feature: MA Experiment 108530 PARAMETER Experiment Name: Zm_Imbibed_Seeds_P Parameter: Organism Value: Zea mays
  misc_feature: MA Experiment 108530 PARAMETER Experiment Name: Zm_Imbibed_Seeds_P Parameter: Plant Line Value: 35A19
  misc_feature: MA Experiment 108530 PARAMETER Experiment Name: Zm_Imbibed_Seeds_P Parameter: Tissue Value: Aerial vs. Embryo
  misc_feature: MA Experiment ID: 108536 Result: Down-regulated in Transcription
  misc_feature: MA Experiment 108536 PARAMETER Experiment Name: Zm_Meristem_P Parameter: Age (day) Value: 8
  misc_feature: MA Experiment 108536 PARAMETER Experiment Name: Zm_Meristem_P Parameter: Organism Value: Zea mays
  misc_feature: MA Experiment 108536 PARAMETER Experiment Name: Zm_Meristem_P Parameter: Plant Line Value: 35A19
  misc_feature: MA Experiment 108536 PARAMETER Experiment Name: Zm_Meristem_P Parameter: Tissue Value: Shoot Meristem vs. Above Shoot Meristem
  misc_feature: MA Experiment ID: 108545 Result: Up-regulated in Transcription
  misc_feature: MA Experiment 108545 PARAMETER Experiment Name: Zm_Imbibed_Seeds_P Parameter: Age (day) Value: 3 vs. 2
  misc_feature: MA Experiment 108545 PARAMETER Experiment Name: Zm_Imbibed_Seeds_P Parameter: Organism Value: Zea mays
  misc_feature: MA Experiment 108545 PARAMETER Experiment Name: Zm_Imbibed_Seeds_P Parameter: Plant Line Value: 35A19
  misc_feature: MA Experiment 108545 PARAMETER Experiment Name: Zm_Imbibed_Seeds_P Parameter: Tissue Value: Aerial vs. Embryo
  misc_feature: MA Experiment ID: 108547 Result: Up-regulated in Transcription
  misc_feature: MA Experiment 108547 PARAMETER Experiment Name: Zm_Imbibed_Seeds_P Parameter: Age (day) Value: 4 vs. 2
  misc_feature: MA Experiment 108547 PARAMETER Experiment Name: Zm_Imbibed_Seeds_P Parameter: Organism Value: Zea mays
  misc_feature: MA Experiment 108547 PARAMETER Experiment Name: Zm_Imbibed_Seeds_P Parameter: Plant Line Value: 35A19
  misc_feature: MA Experiment 108547 PARAMETER Experiment Name: Zm_Imbibed_Seeds_P Parameter: Tissue Value: Aerial vs. Embryo
  misc_feature: MA Experiment ID: 20000534 Result: Up-regulated in Transcription
  misc_feature: MA Experiment 20000534 PARAMETER Experiment Name: Zm_Hybrid_Pollen_P Parameter: Age (day) Value: 8
  misc_feature: MA Experiment 20000534 PARAMETER Experiment Name: Zm_Hybrid_Pollen_P Parameter: Organism Value: Zea mays
  misc_feature: MA Experiment 20000534 PARAMETER Experiment Name: Zm_Hybrid_Pollen_P Parameter: Plant Line Value: 35A19
  misc_feature: MA Experiment 20000534 PARAMETER Experiment Name: Zm_Hybrid_Pollen_P Parameter: Tissue Value: Pollen vs. Aerial
gcacgagaccattacctagaacatcctaatcgaaaaccctgtgcagtggtccatattctgggcggcgatccgcaggcgggctacacacacatacatggcggcggagggcgccggaggccggggacgagccatgcggtacccgcctctgtcggcactcgtggtctccgccatcgcagccttctccgccgtgatcgtcctcgccgtcgtccactcggcgtacgacgacgccatgtcgcggacgcggacgctgctgggccacaacctggagccgacgccgtggcacccgttcccgcacgacaagggccggccgccggcgcgcgcggcgctgcggtgcgcgccctccatcgcctgcctgccgccgctatcaccgtcgtcgtcggtcgtcgccgccgcaaggtaacaagaagaagaagcagaagcagtgccctgcctacttcgctgccatccaccgggacctggctccgtggcgcgggcagggccggggcgtgacgcgcgcgctcctggacgaggcgcggcggcgcgcgtccatgcgcgtcaccatcacgggcggcgggcggcggctgcacgtggacctctactacgcctgcgtgcagagccgcgccctgttcacggtgtggagcctgctgcagctgatgcggcggtaccccgggcgcgtgcccgacgtggacctcatgttcgactgcatggaccgccccgccatcaaccggaccgagcacggggacggcgctctgccgccgccgccgctcttccgctactgcaccaccagggaccacttcgacatccccttccctgactggtccttctggggctggccggacacgaacatcgagccatggaaccacgagttcaagaacatcagggcgggcgccagggcaacgagatgggcggacagggtgccgacggcgtactggaagggcaacccggacgtggcgtcgccgctgcgggaggcgctgctgggctgcaacgacacggccctgtggcgcgccgagatcatgcgccagaactgggacgacgaggccaggtccggctaccagcactcgaggctctcggcgcagtgcacgcaccgctacaagatctacgccgagggattcgcgtggtcggtcagcctcaagtacatcctctcctgcggctccatggcgctgctcatcgagccgcgctaccaggacttcttcagccgcgggctggagccccgggtgaactactggccggtcgccgccctgggcatgtgcgagtccatccgggacgccgtcgactggggcaacgccaacccggacgaggccgagcgcgtcggcaggcgcgggcagaggctcgtgcaggacctccgcatgcacgccgtctacgactacatgctgcacctgctcaccgagtatgcgcgcctcctcatagaccaggaccacggcttgagcccgccgccccacgcgcaggaggcatgcgaggcatccctgctctgcctcgcagacgacaagcagcggaggttcctccacgcatccaaggcagaccccgcgccgggcgacccgtgcgtgctcccgccgccgtgatccctccccctccctctctctctaggatttctttctttctttatttatttatttattagactcaacagacagatcagaacgagttgggaggatttcaatgatggttctaaagcttctgacaaaagcatgttc

SEQ ID NO: 17656 - protein, 336 aa, Zea mays subsp. mays
  peptide (1)..(336): Ceres Seq. ID no. 12366281
  misc_feature (1)..(334): Pfam Name: Arabidopsis thaliana protein of unknown function Pfam Description: Arabidopsis thaliana protein of unknown
  misc_feature (1)..(336): Homolog of NCBI NO: 30690136 NR Description: expressed protein [Arabidopsis thaliana]
  misc_feature (1)..(336): Homolog of NCBI NO: 38637028 NR Description: unknown protein [Oryza sativa (japonica
  misc_feature (1)..(336): Homolog of NCBI NO: 15233070 NR Description: putative protein; protein id: At3g61270.1
  misc_feature (1)..(336): Homolog of NCBI NO: 15222413 NR Description: hypothetical protein; protein id: At1g63420.1
  misc_feature (1)..(336): Homolog of NCBI NO: 21742339 NR Description: OSJNBb0020O11.18 [Oryza sativa (japonica
  misc_feature (1)..(336): Homolog of NCBI NO: 7486461 NR Description: hypothetical protein At2g45830 [imported] -
  misc_feature (1)..(336): Homolog of NCBI NO: 15229061 NR Description: putative protein; protein id: At3g48980.1
  misc_feature (1)..(336): Homolog of NCBI NO: 38346998 NR Description: OSJNBb0039L24.21 [Oryza sativa (japonica
  misc_feature (1)..(336): Homolog of NCBI NO: 15237842 NR Description: putative protein; protein id: At5g23850.1
  misc_feature (1)..(334): Homolog of NCBI NO: 15222341 NR Description: hypothetical protein; protein id: At1g07220.1
MRVTITGGGRRLHVDLYYACVQSRALFTVWSLLQLMRRYPGRVPDVDLMFDCMDRPAINRTEHGDGALPPPPLFRYCTTRDHFDIPFPDWSFWGWPDTNIEPWNHEFKNIRAGARATRWADRVPTAYWKGNPDVASPLREALLGCNDTALWRAEIMRQNWDDEARSGYQHSRLSAQCTHRYKIYAEGFAWSVSLKYILSCGSMALLIEPRYQDFFSRGLEPRVNYWPVAALGMCESIRDAVDWGNANPDEAERVGRRGQRLVQDLRMHAVYDYMLHLLTEYARLLIDQDHGLSPPPHAQEACEASLLCLADDKQRRFLHASKADPAPGDPCVLPPP

SEQ ID NO: 17657 - protein, 301 aa, Zea mays subsp. mays
  peptide (1)..(301): Ceres Seq. ID no. 12366282
  misc_feature (1)..(299): Pfam Name: Arabidopsis thaliana protein of unknown function Pfam Description: Arabidopsis thaliana protein of unknown
  misc_feature (1)..(301): Homolog of NCBI NO: 30690136 NR Description: expressed protein [Arabidopsis thaliana]
  misc_feature (1)..(301): Homolog of NCBI NO: 38637028 NR Description: unknown protein [Oryza sativa (japonica
  misc_feature (1)..(301): Homolog of NCBI NO: 15233070 NR Description: putative protein; protein id: At3g61270.1
  misc_feature (1)..(301): Homolog of NCBI NO: 15222413 NR Description: hypothetical protein; protein id: At1g63420.1
  misc_feature (1)..(301): Homolog of NCBI NO: 21742339 NR Description: OSJNBb0020O11.18 [Oryza sativa (japonica
  misc_feature (1)..(301): Homolog of NCBI NO: 7486461 NR Description: hypothetical protein At2g45830 [imported] -
  misc_feature (1)..(301): Homolog of NCBI NO: 15229061 NR Description: putative protein; protein id: At3g48980.1
  misc_feature (1)..(301): Homolog of NCBI NO: 38346998 NR Description: OSJNBb0039L24.21 [Oryza sativa (japonica
  misc_feature (1)..(301): Homolog of NCBI NO: 15237842 NR Description: putative protein; protein id: At5g23850.1
  misc_feature (1)..(299): Homolog of NCBI NO: 15222341 NR Description: hypothetical protein; protein id: At1g07220.1
MRRYPGRVPDVDLMFDCMDRPAINRTEHGDGALPPPPLFRYCTTRDHFDIPFPDWSFWGWPDTNIEPWNHEFKNIRAGARATRWADRVPTAYWKGNPDVASPLREALLGCNDTALWRAEIMRQNWDDEARSGYQHSRLSAQCTHRYKIYAEGFAWSVSLKYILSCGSMALLIEPRYQDFFSRGLEPRVNYWPVAALGMCESIRDAVDWGNANPDEAERVGRRGQRLVQDLRMHAVYDYMLHLLTEYARLLIDQDHGLSPPPHAQEACEASLLCLADDKQRRFLHASKADPAPGDPCVLPPP

SEQ ID NO: 17658 - protein, 288 aa, Zea mays subsp. mays
  peptide (1)..(288): Ceres Seq. ID no. 12366283
  misc_feature (1)..(286): Pfam Name: Arabidopsis thaliana protein of unknown function Pfam Description: Arabidopsis thaliana protein of unknown
  misc_feature (1)..(288): Homolog of NCBI NO: 15229061 NR Description: putative protein; protein id: At3g48980.1
  misc_feature (1)..(288): Homolog of NCBI NO: 38346998 NR Description: OSJNBb0039L24.21 [Oryza sativa (japonica
  misc_feature (1)..(288): Homolog of NCBI NO: 30690136 NR Description: expressed protein [Arabidopsis thaliana]
  misc_feature (1)..(288): Homolog of NCBI NO: 15233070 NR Description: putative protein; protein id: At3g61270.1
  misc_feature (1)..(288): Homolog of NCBI NO: 21742339 NR Description: OSJNBb0020O11.18 [Oryza sativa (japonica
  misc_feature (1)..(288): Homolog of NCBI NO: 7486461 NR Description: hypothetical protein At2g45830 [imported] -
  misc_feature (1)..(288): Homolog of NCBI NO: 15222413 NR Description: hypothetical protein; protein id: At1g63420.1
  misc_feature (1)..(288): Homolog of NCBI NO: 38637028 NR Description: unknown protein [Oryza sativa (japonica
  misc_feature (1)..(288): Homolog of NCBI NO: 15237842 NR Description: putative protein; protein id: At5g23850.1
  misc_feature (1)..(286): Homolog of NCBI NO: 15222341 NR Description: hypothetical protein; protein id: At1g07220.1
MFDCMDRPAINRTEHGDGALPPPPLFRYCTTRDHFDIPFPDWSFWGWPDTNIEPWNHEFKNIRAGARATRWADRVPTAYWKGNPDVASPLREALLGCNDTALWRAEIMRQNWDDEARSGYQHSRLSAQCTHRYKIYAEGFAWSVSLKYILSCGSMALLIEPRYQDFFSRGLEPRVNYWPVAALGMCESIRDAVDWGNANPDEAERVGRRGQRLVQDLRMHAVYDYMLHLLTEYARLLIDQDHGLSPPPHAQEACEASLLCLADDKQRRFLHASKADPAPGDPCVLPPP

SEQ ID NO: 17659 - DNA, 1861 bp, Zea mays subsp. mays
  misc_feature (1)..(1861): Ceres Seq. ID no. 15176874
  misc_feature: MA Experiment ID: 20000488 Result: Down-regulated in Transcription
  misc_feature: MA Experiment 20000488 PARAMETER Experiment Name: Zm_50mM_NH4NO3_L_to_H_P Parameter: Organism Value: Zea mays
  misc_feature: MA Experiment 20000488 PARAMETER Experiment Name: Zm_50mM_NH4NO3_L_to_H_P Parameter: Timepoint (hr) Value: 8
  misc_feature: MA Experiment 20000488 PARAMETER Experiment Name: Zm_50mM_NH4NO3_L_to_H_P Parameter: Tissue Value: Leaves
  misc_feature: MA Experiment 20000488 PARAMETER Experiment Name: Zm_50mM_NH4NO3_L_to_H_P Parameter: Treatment Value: 50mM NH4NO3 vs. 100mM Mannitol
acgaaggcaacgcgtgctgagggctgaggcagaaaaacgcggggaaacaagagggaaacgccgtgagaggtcgccgataggtgcgcgggtcgcggtcgtcgcctcctctgcctccctggcacttcggctcggctcggcaaacgcaacaacacggagcgggcgtggggagcggagcggagcggtgagcgaggatcgagggcaacgtggcgaggccacacgcccgagggggagaggcgactttgcttccagttccaggaaagagtgggctataaaaaggcgctcgagatccagatctgggccgatgcgaccgccctcgctgctctccctcaccctcgacgccgcgctcctccgcatcgccaatatcgccgacctctcccacctcccagaccacctcctcatcgacctcttccgtagaaccctcagtgctggtaagctgacagagaaagttctcaagttgtttctagcaaccggctgtgaggatatcatattggctgttcggttgctcaacattaagcagccactcgtaccagtccttcccacaaggtgctctgagagattctagatctgctgccgcccacatcgttttgattacctgagaagatgcctttggaaattcaagatagtgaggttgacatagtgattgcggcactccagcccaacctgaccactttctatgaggcatggcgaccatttttctcccgtttccacatcattgtcgtcaaagatccagacatggcagaggatcttcaaatccctgcaggttttgatctcaaggtttacaccaagtcagatattaatgggttgcttggtgcctcctcatccataaacttatctggtcactcatgccgttactttgggtatcttgtctcacgcaagaagtatgtgatttcagttgatgacaattgcctcccagcgaaggacactgctgggtcgactgttgatgttgttgcacagcacatggccaatctgaaaacacctgctacacctttctttttcaacacactctatgatccatacaggaaaggtgctgactttgtccgtggttacccattcagcctgcgtgagggggttgagtgcatgctctcgtgtggtttgtggcttcataatgctgactacgacccgatgactcatgttgtgaagagaaatcaacggaacacaacatatgtggatgctgtgatgacggttccgcttggtgccatgctgcctgtgagcgggataaatgttgcattcaaccgcgatgtgctggggcctgctatgttcccaggcctgcgtctaagaaacgaagggaagcacagatgggatacccttgaagacatatggaatggcttatgtgctaaagtagtctgcgacagcttgggatatggtgtgaagaccagactgccttatgtgatgagaagtgatgcagaagcaggtaaagctctggagagcttgaaagagtgggaaggggtaaaagtcatggacgatgttctcccattcttccagtcgctcaagctatcgaggactgcagttactgttgacgattgtgttaaggagcttgctggaattgtccgtgagaaactaggacctaagaatgcaatcttcaccaaagcagccgatgccatggtggaatggaacaatctctggaaagtgcatggtgctcagaatgcatagtttgggaatttgcatgtttcctacagagcatctaatagttgtttggagtgcgcgttttacagttctaaattttccctgtggaactcatgaagctgaaataaacaacagtcctttatgccgtgaatttggcatgaatagctgagcatctcattgtatacgcttaagaattatgtaatgtaatgcatcaaaagaacatgtgatgttttcttgc

SEQ ID NO: 17660 - protein, 349 aa, Zea mays subsp. mays
  peptide (1)..(349): Ceres Seq. ID no. 15176875
  misc_feature (1)..(349): Pfam Name: Reversibly glycosylated polypeptide Pfam Description: Reversibly glycosylated polypeptide
  misc_feature (88)..(327): Homolog of NCBI NO: 7488888 NR Description: type IIIa membrane protein cp-wap11 - cowpea
  misc_feature (1)..(341): Homolog of NCBI NO: 15242351 NR Description: reversibly glycosylated polypeptide-3
  misc_feature (1)..(341): Homolog of NCBI NO: 34582497 NR Description: Alpha-1,4-glucan-protein synthase
  misc_feature (1)..(341): Homolog of NCBI NO: 15232865 NR Description: reversibly glycosylated polypeptide-1
  misc_feature (1)..(341): Homolog of NCBI NO: 2317729 NR Description: reversibly glycosylated polypeptide-1
  misc_feature (4)..(341): Homolog of NCBI NO: 15237362 NR Description: amylogenin; reversibly glycosylatable polypeptide
  misc_feature (1)..(349): Homolog of NCBI NO: 3646375 NR Description: RGP2 protein [Oryza sativa (japonica
  misc_feature (1)..(349): Homolog of NCBI NO: 4158219 NR Description: amylogenin [Oryza sativa (indica cultivar-group)]
  misc_feature (1)..(349): Homolog of NCBI NO: 4158230 NR Description: amylogenin [Triticum aestivum]
  misc_feature (1)..(349): Homolog of NCBI NO: 19387283 NR Description: putative amylogenin [Oryza sativa (japonica
MPLEIQDSEVDIVIAALQPNLTTFYEAWRPFFSRFHIIVVKDPDMAEDLQIPAGFDLKVYTKSDINGLLGASSSINLSGHSCRYFGYLVSRKKYVISVDDNCLPAKDTAGSTVDVVAQHMANLKTPATPFFFNTLYDPYRKGADFVRGYPFSLREGVECMLSCGLWLHNADYDPMTHVVKRNQRNTTYVDAVMTVPLGAMLPVSGINVAFNRDVLGPAMFPGLRLRNEGKHRWDTLEDIWNGLCAKVVCDSLGYGVKTRLPYVMRSDAEAGKALESLKEWEGVKVMDDVLPFFQSLKLSRTAVTVDDCVKELAGIVREKLGPKNAIFTKAADAMVEWNNLWKVHGAQNA

SEQ ID NO: 17661 - protein, 305 aa, Zea mays subsp. mays
  peptide (1)..(305): Ceres Seq. ID no. 15176876
  misc_feature (1)..(305): Pfam Name: Reversibly glycosylated polypeptide Pfam Description: Reversibly glycosylated polypeptide
  misc_feature (44)..(283): Homolog of NCBI NO: 7488888 NR Description: type IIIa membrane protein cp-wap11 - cowpea
  misc_feature (1)..(297): Homolog of NCBI NO: 15242351 NR Description: reversibly glycosylated polypeptide-3
  misc_feature (1)..(297): Homolog of NCBI NO: 34582497 NR Description: Alpha-1,4-glucan-protein synthase
  misc_feature (1)..(297): Homolog of NCBI NO: 15232865 NR Description: reversibly glycosylated polypeptide-1
  misc_feature (1)..(297): Homolog of NCBI NO: 2317729 NR Description: reversibly glycosylated polypeptide-1
  misc_feature (1)..(297): Homolog of NCBI NO: 15237362 NR Description: amylogenin; reversibly glycosylatable polypeptide
  misc_feature (1)..(305): Homolog of NCBI NO: 3646375 NR Description: RGP2 protein [Oryza sativa (japonica
  misc_feature (1)..(305): Homolog of NCBI NO: 4158219 NR Description: amylogenin [Oryza sativa (indica cultivar-group)]
  misc_feature (1)..(305): Homolog of NCBI NO: 4158230 NR Description: amylogenin [Triticum aestivum]
  misc_feature (1)..(305): Homolog of NCBI NO: 19387283 NR Description: putative amylogenin [Oryza sativa (japonica
MAEDLQIPAGFDLKVYTKSDINGLLGASSSINLSGHSCRYFGYLVSRKKYVISVDDNCLPAKDTAGSTVDVVAQHMANLKTPATPFFFNTLYDPYRKGADFVRGYPFSLREGVECMLSCGLWLHNADYDPMTHVVKRNQRNTTYVDAVMTVPLGAMLPVSGINVAFNRDVLGPAMFPGLRLRNEGKHRWDTLEDIWNGLCAKVVCDSLGYGVKTRLPYVMRSDAEAGKALESLKEWEGVKVMDDVLPFFQSLKLSRTAVTVDDCVKELAGIVREKLGPKNAIFTKAADAMVEWNNLWKVHGAQNA

SEQ ID NO: 17662 - protein, 230 aa, Zea mays subsp. mays
  peptide (1)..(230): Ceres Seq. ID no. 15176877
  misc_feature (1)..(230): Pfam Name: Reversibly glycosylated polypeptide Pfam Description: Reversibly glycosylated polypeptide
  misc_feature (1)..(208): Homolog of NCBI NO: 7488888 NR Description: type IIIa membrane protein cp-wap11 - cowpea
  misc_feature (1)..(222): Homolog of NCBI NO: 15242351 NR Description: reversibly glycosylated polypeptide-3
  misc_feature (1)..(222): Homolog of NCBI NO: 34582497 NR Description: Alpha-1,4-glucan-protein synthase
  misc_feature (1)..(222): Homolog of NCBI NO: 15232865 NR Description: reversibly glycosylated polypeptide-1
  misc_feature (1)..(222): Homolog of NCBI NO: 2317729 NR Description: reversibly glycosylated polypeptide-1
  misc_feature (1)..(222): Homolog of NCBI NO: 15237362 NR Description: amylogenin; reversibly glycosylatable polypeptide
  misc_feature (1)..(230): Homolog of NCBI NO: 3646375 NR Description: RGP2 protein [Oryza sativa (japonica
  misc_feature (1)..(230): Homolog of NCBI NO: 4158219 NR Description: amylogenin [Oryza sativa (indica cultivar-group)]
  misc_feature (1)..(230): Homolog of NCBI NO: 4158230 NR Description: amylogenin [Triticum aestivum]
  misc_feature (1)..(230): Homolog of NCBI NO: 19387283 NR Description: putative amylogenin [Oryza sativa (japonica
MANLKTPATPFFFNTLYDPYRKGADFVRGYPFSLREGVECMLSCGLWLHNADYDPMTHVVKRNQRNTTYVDAVMTVPLGAMLPVSGINVAFNRDVLGPAMFPGLRLRNEGKHRWDTLEDIWNGLCAKVVCDSLGYGVKTRLPYVMRSDAEAGKALESLKEWEGVKVMDDVLPFFQSLKLSRTAVTVDDCVKELAGIVREKLGPKNAIFTKAADAMVEWNNLWKVHGAQNA

SEQ ID NO: 17663 - DNA, 1596 bp, Zea mays subsp. mays
  misc_feature (1)..(1596): Ceres Seq. ID no. 12375384
  misc_feature: MA Experiment ID: 108535 Result: Down-regulated in Transcription
  misc_feature: MA Experiment 108535 PARAMETER Experiment Name: Zm_Meristem_P Parameter: Age (day) Value: 8
  misc_feature: MA Experiment 108535 PARAMETER Experiment Name: Zm_Meristem_P Parameter: Organism Value: Zea mays
  misc_feature: MA Experiment 108535 PARAMETER Experiment Name: Zm_Meristem_P Parameter: Plant Line Value: 35A19
  misc_feature: MA Experiment 108535 PARAMETER Experiment Name: Zm_Meristem_P Parameter: Tissue Value: Root Meristem vs. Above Root Meristem
  misc_feature: MA Experiment ID: 20000535 Result: Down-regulated in Transcription
  misc_feature: MA Experiment 20000535 PARAMETER Experiment Name: Zm_Hybrid_Seed_Dev_P Parameter: DAP Value: 30 vs. 12
  misc_feature: MA Experiment 20000535 PARAMETER Experiment Name: Zm_Hybrid_Seed_Dev_P Parameter: Organism Value: Zea mays
  misc_feature: MA Experiment 20000535 PARAMETER Experiment Name: Zm_Hybrid_Seed_Dev_P Parameter: Plant Line Value: 35A19
  misc_feature: MA Experiment 20000535 PARAMETER Experiment Name: Zm_Hybrid_Seed_Dev_P Parameter: Tissue Value: Embryo vs. Unfert Floret
gcacgagaccattacctagaacatcctaatcgaaaaattttgcacccagcaacgtacagctagctagcaggcaccaggcagcacatagcctccgattattcagctggaggtcggtctgtgtgtgcgtgcatggggcatcactcctgctgcaaccagcagaaggtgaagagggggctctggtcccctgaggaggacgagaagctcatcaggtacatcaccacccatggctacgggtgctggagcgaggtccccgagaaggccggcctacaacgctgcgggaagagctgccggctgcggtggatcaactacctcaggccggacatccgccgaggccggttcacggcggaggaggagaagctcatcatcagcctgcacgccattgttggcaacaggtgggcccacattgccagccacttgcccgggcggacggacaacgagatcaagaactactggaactcgtggatcaagaagaagatccgaaagccggcgatgagcacgacgacgacgagctcggccgtgacggcggcgagccctccgtgcagcacggcggcgtcggacgcggcgcttggtcgtcacctgcagacgccgttcagcgcggcggagcaccggctcgacgccatcctcagccagagccttgccttgccgccgccgaagctgggctccggcggcggcggcggcggcggccaagagtccccgccgctgcccccgcactgccccttcttcatgttcgacacgagcgtcagcgtcagcccgccgtcgcccgcggccgcagcacaccacctgcagcacccgttcctcaccttcacggcggcggcggcgatggacgacaacgcgccgatgggcttccatctgccgcccttggtggacggcatgggaatgggcatgccagcaggccatggactgcggcgctctaggccatgaccaccgcgttgccggcggcaacaacaatggtcaggcggaggcggcggcggccggcatggcgaacggctgctgctacgggcagctgcaaaagcagcaggaggaggagcagcagccgtcgctggggcaggaggaccagtgggacgacgagtcggcgcggcacctgctgatgtgggacgatgaccaagaactaacaccgtccaacctggaagccatggaaagtacagctcactccctcctttttatgggaccaaatgaccatacatgacgaaaaagctagcttattattggtgtgcatgcgcatctatccccctctcttcttgatctgatctgctacctctagctctctcacccgatctgctgatctgtgtccatacatgcaataatgaggttgttgtccaaggcgcataatttatttttgctggatttttcatttttctcatattgatttaacctttattttttttggtttttggtttgggctttgtggagtgaattgaagactaaaaggctaagagtgtgcgtgttaaatggggttttattttttgtaaagaggatttgcatgctcttgcatggcgctgcgcttggagtgtaatttgattgatgtatctaagtgaatttaaaataaggaagatgacactaaaagagatcgaaagggagtcacgcaccccttttcct

SEQ ID NO: 17664 - protein, 263 aa, Zea mays subsp. mays
  peptide (1)..(263): Ceres Seq. ID no. 12375385
  misc_feature (14)..(61): Pfam Name: Myb-like DNA-binding domain Pfam Description: Myb-like DNA-binding domain
  misc_feature (1)..(167): Homolog of NCBI NO: 22329445 NR Description: myb family transcription factor
  misc_feature (1)..(131): Homolog of NCBI NO: 30690317 NR Description: myb transcription factor (ATMYB4) [Arabidopsis
  misc_feature (1)..(131): Homolog of NCBI NO: 2280530 NR Description: ATMYB4 [Arabidopsis thaliana]
  misc_feature (1)..(222): Homolog of NCBI NO: 34902542 NR Description: putative transcription factor (myb)
  misc_feature (1)..(116): Homolog of NCBI NO: 11994360 NR Description: transcription factor-like protein [Arabidopsis
  misc_feature (1)..(136): Homolog of NCBI NO: 33320067 NR Description: transcription factor Myb [Capsicum annuum]
  misc_feature (1)..(129): Homolog of NCBI NO: 34910458 NR Description: putative transcription factor
  misc_feature (1)..(141): Homolog of NCBI NO: 15222565 NR Description: putative MYB family transcription factor
  misc_feature (1)..(128): Homolog of NCBI NO: 2129932 NR Description: myb-related protein 1 - tomato
  misc_feature (1)..(251): Homolog of NCBI NO: 28812131 NR Description: putative myb-related protein
MGHHSCCNQQKVKRGLWSPEEDEKLIRYITTHGYGCWSEVPEKAGLQRCGKSCRLRWINYLRPDIRRGRFTAEEEKLIISLHAIVGNRWAHIASHLPGRTDNEIKNYWNSWIKKKIRKPAMSTTTTSSAVTAASPPCSTAASDAALGRHLQTPFSAAEHRLDAILSQSLALPPPKLGSGGGGGGGQESPPLPPHCPFFMFDTSVSVSPPSPAAAAHHLQHPFLTFTAAAAMDDNAPMGFHLPPLVDGMGMGMPAGHGLRRSRP

SEQ ID NO: 17665 - protein, 143 aa, Zea mays subsp. mays
  peptide (1)..(143): Ceres Seq. ID no. 12375386
  misc_feature (1)..(11): Homolog of NCBI NO: 7446174 NR Description: transcription factor MYB4 - Arabidopsis thaliana
  misc_feature (1)..(124): Homolog of NCBI NO: 28927688 NR Description: putative Myb-like DNA-binding protein
  misc_feature (1)..(47): Homolog of NCBI NO: 25294104 NR Description: hypothetical protein [imported] - Arabidopsis
  misc_feature (1)..(47): Homolog of NCBI NO: 22329445 NR Description: myb family transcription factor
  misc_feature (1)..(11): Homolog of NCBI NO: 30690317 NR Description: myb transcription factor (ATMYB4) [Arabidopsis
  misc_feature (1)..(11): Homolog of NCBI NO: 2280530 NR Description: ATMYB4 [Arabidopsis thaliana]
  misc_feature (1)..(102): Homolog of NCBI NO: 34902542 NR Description: putative transcription factor (myb)
  misc_feature (1)..(16): Homolog of NCBI NO: 33320067 NR Description: transcription factor Myb [Capsicum annuum]
  misc_feature (1)..(21): Homolog of NCBI NO: 15222565 NR Description: putative MYB family transcription factor
  misc_feature (1)..(131): Homolog of NCBI NO: 28812131 NR Description: putative myb-related protein
MSTTTTSSAVTAASPPCSTAASDAALGRHLQTPFSAAEHRLDAILSQSLALPPPKLGSGGGGGGGQESPPLPPHCPFFMFDTSVSVSPPSPAAAAHHLQHPFLTFTAAAAMDDNAPMGFHLPPLVDGMGMGMPAGHGLRRSRP

SEQ ID NO: 17666 - DNA, 1615 bp, Zea mays subsp. mays
  misc_feature (1)..(1615): Ceres Seq. ID no. 12358993
  misc_feature: MA Experiment ID: 108527 Result: Up-regulated in Transcription
  misc_feature: MA Experiment 108527 PARAMETER Experiment Name: Zm_5mM_NO_P Parameter: Age (day) Value: 8
  misc_feature: MA Experiment 108527 PARAMETER Experiment Name: Zm_5mM_NO_P Parameter: Organism Value: Zea mays
  misc_feature: MA Experiment 108527 PARAMETER Experiment Name: Zm_5mM_NO_P Parameter: Plant Line Value: 35A19
  misc_feature: MA Experiment 108527 PARAMETER Experiment Name: Zm_5mM_NO_P Parameter: Timepoint (hr) Value: 6
  misc_feature: MA Experiment 108527 PARAMETER Experiment Name: Zm_5mM_NO_P Parameter: Tissue Value: Aerial
  misc_feature: MA Experiment 108527 PARAMETER Experiment Name: Zm_5mM_NO_P Parameter: Treatment Value: 5mM NO vs. No Treatment
acctcttctcgcgcacgtggtctgtgcccgtacgcggcggcgctgccgctcaccagaccggccgccgccacgtctgcttccgcgcctccccgcctcctcaccgtccgcccccttttacctgcctgatcattttattataaatgtggggcgagagaactcatcataagcactggcatcaaggtcatggtacctcggggaattccaacaacaaaaagcatgataagcggcagccaaaatttataccagacaattatagctccgtcgatgaggttactactgctctgcgagaagctggcctcgaatcgtcaaatctaatcctcggtattgatttcaccaaaagcaatgagtggtcaggcaggcattcctttagaagaaaatctctgcatgccattaatggcaccccaaatccatatgaacaagctatctctataatcgggcgaacgctgtcaccttttgacgatgataacttgataccatgttttggatttggcgatgcttctacacatgatcattctgtgttcagtttctacccagagaaccgaccctgtcgtggctttgaggaggttcttgtaaggtatcgacagattgtaccacatttgaacctttcaggaccaacttcttttgcacctcttatttatgcagcgatttctgttgttgaaaacagtaattggcagtaccatgtcctcgtgatcatagctgatggacgtgactgccgcgaatataaatgatggaagattaagtccacaggaacaagcaactatacaagcaattgtcgatgctagctactatcctctttcaatagtaatggttggggtgggtgatggaccatgggatgcgatgcagcattttgatgactgtatccctgaaagagcttttgacaattttcagtttgtgaacttcactggtattatgtcaacaagtaaggatatgtcaaagaaggaggctgcatttgcccttgcagctcttatggaaataccttctcagtataaagcaacgcaaggcctccgacctccagaaaagcaagcacaaaggattggctctcctaggattcttcctcctccaaataaagttcttgaaaatgataatgccgccgccgctgcttcgcaccctcctcaaactgcaagctcgaaatcaactggtattggcaaaagtgctgctgacgagcaggtatgccccatatgtctaaccaatccaaaggacatggcttttcagtgtggtcatctgacatgtaaggaatgtggcccaacactatcaacgtgcccattgtgccgcgctctaatcaccatgcgtgtgaggctctactcctaagtcggttggtgtctggagggatgggaccaaacagaaaggagcaagaactttggggcgcaaggactgcgctacgatcttgagatatggtccatatggatgtcatgataacgatgcatgtacagaaaccttgtccgtgcctattcagtaatgtcgttgatgagtatcttccatcaatcacatgtaaaatttctaatgttatcttgtattagtagcaggggattgcttgttgagtggaataccaccagttgttcagcaacagatagtaaactccatgtgcatttggaagtcacttttgtgatttgtgttc

SEQ ID NO: 17667 - protein, 202 aa, Zea mays subsp. mays
  peptide (1)..(202): Ceres Seq. ID no. 12358994
  misc_feature (5)..(175): Homolog of NCBI NO: 18481708 NR Description: hypothetical protein [Sorghum bicolor]
  misc_feature (11)..(180): Homolog of NCBI NO: 20804894 NR Description: P0497A05.19 [Oryza sativa (japonica
  misc_feature (10)..(202): Homolog of NCBI NO: 18412353 NR Description: expressed protein
  misc_feature (5)..(201): Homolog of NCBI NO: 30697566 NR Description: copine-related [Arabidopsis thaliana]
  misc_feature (5)..(201): Homolog of NCBI NO: 18408863 NR Description: F12A21.7; protein id: At1g67800.1, supported by
  misc_feature (5)..(201): Homolog of NCBI NO: 15241400 NR Description: putative protein
  misc_feature (11)..(174): Homolog of NCBI NO: 8777310 NR Description: gb|AAF01562.1~gene_id:MBM17.7~strong similarity
  misc_feature (11)..(201): Homolog of NCBI NO: 15232157 NR Description: unknown protein; protein id: At3g01650.1
  misc_feature (11)..(202): Homolog of NCBI NO: 22328041 NR Description: putative protein
  misc_feature (3)..(202): Homolog of NCBI NO: 34905794 NR Description: P0401G10.23 [Oryza sativa (japonica
MDVTAANINDGRLSPQEQATIQAIVDASYYPLSIVMVGVGDGPWDAMQHFDDCIPERAFDNFQFVNFTGIMSTSKDMSKKEAAFALAALMEIPSQYKATQGLRPPEKQAQRIGSPRILPPPNKVLENDNAAAAASHPPQTASSKSTGIGKSAADEQVCPICLTNPKDMAFQCGHLTCKECGPTLSTCPLCRALITMRVRLYS

SEQ ID NO: 17668 - protein, 195 aa, Zea mays subsp. mays
  peptide (1)..(195): Ceres Seq. ID no. 12358995
  misc_feature (6)..(192): Homolog of NCBI NO: 18481708 NR Description: hypothetical protein [Sorghum bicolor]
  misc_feature (18)..(192): Homolog of NCBI NO: 20804894 NR Description: P0497A05.19 [Oryza sativa (japonica
  misc_feature (21)..(192): Homolog of NCBI NO: 18412353 NR Description: expressed protein
  misc_feature (18)..(192): Homolog of NCBI NO: 30697566 NR Description: copine-related [Arabidopsis thaliana]
  misc_feature (18)..(192): Homolog of NCBI NO: 18408863 NR Description: F12A21.7; protein id: At1g67800.1, supported by
  misc_feature (18)..(192): Homolog of NCBI NO: 15241400 NR Description: putative protein
  misc_feature (20)..(192): Homolog of NCBI NO: 8777310 NR Description: gb|AAF01562.1~gene_id:MBM17.7~strong similarity
  misc_feature (21)..(192): Homolog of NCBI NO: 15232157 NR Description: unknown protein; protein id: At3g01650.1
  misc_feature (20)..(192): Homolog of NCBI NO: 22328041 NR Description: putative protein
  misc_feature (1)..(189): Homolog of NCBI NO: 34905794 NR Description: P0401G10.23 [Oryza sativa (japonica
MWGERTHHKHWHQGHGTSGNSNNKKHDKRQPKFIPDNYSSVDEVTTALREAGLESSNLILGIDFTKSNEWSGRHSFRRKSLHAINGTPNPYEQAISIIGRTLSPFDDDNLIPCFGFGDASTHDHSVFSFYPENRPCRGFEEVLVRYRQIVPHLNLSGPTSFAPLIYAAISVVENSNWQYHVLVIIADGRDCREYK

SEQ ID NO: 17669 - protein, 167 aa, Zea mays subsp. mays
  peptide (1)..(167): Ceres Seq. ID no. 12358996
  misc_feature (1)..(139): Homolog of NCBI NO: 8777310 NR Description: gb|AAF01562.1~gene_id:MBM17.7~strong similarity
  misc_feature (1)..(166): Homolog of NCBI NO: 15232157 NR Description: unknown protein; protein id: At3g01650.1
  misc_feature (1)..(167): Homolog of NCBI NO: 22328041 NR Description: putative protein
  misc_feature (1)..(167): Homolog of NCBI NO: 34905794 NR Description: P0401G10.23 [Oryza sativa (japonica
  misc_feature (1)..(140): Homolog of NCBI NO: 18481708 NR Description: hypothetical protein [Sorghum bicolor]
  misc_feature (1)..(145): Homolog of NCBI NO: 20804894 NR Description: P0497A05.19 [Oryza sativa (japonica
  misc_feature (1)..(167): Homolog of NCBI NO: 18412353 NR Description: expressed protein
  misc_feature (1)..(166): Homolog of NCBI NO: 30697566 NR Description: copine-related [Arabidopsis thaliana]
  misc_feature (1)..(166): Homolog of NCBI NO: 18408863 NR Description: F12A21.7; protein id: At1g67800.1, supported by
  misc_feature (1)..(166): Homolog of NCBI NO: 15241400 NR Description: putative protein
MVGVGDGPWDAMQHFDDCIPERAFDNFQFVNFTGIMSTSKDMSKKEAAFALAALMEIPSQYKATQGLRPPEKQAQRIGSPRILPPPNKVLENDNAAAAASHPPQTASSKSTGIGKSAADEQVCPICLTNPKDMAFQCGHLTCKECGPTLSTCPLCRALITMRVRLYS

SEQ ID NO: 17670 - DNA, 2973 bp, Zea mays subsp. mays
  misc_feature (1)..(2973): Ceres Seq. ID no. 12375065
  misc_feature: MA Experiment ID: 108522 Result: Up-regulated in Transcription
  misc_feature: MA Experiment 108522 PARAMETER Experiment Name: Zm_42deg_Heat_P Parameter: Age (day) Value: 8
  misc_feature: MA Experiment 108522 PARAMETER Experiment Name: Zm_42deg_Heat_P Parameter: Organism Value: Zea mays
  misc_feature: MA Experiment 108522 PARAMETER Experiment Name: Zm_42deg_Heat_P Parameter: Plant Line Value: 35A19
  misc_feature: MA Experiment 108522 PARAMETER Experiment Name: Zm_42deg_Heat_P Parameter: Temperature (deg C) Value: 42 vs. 22
  misc_feature: MA Experiment 108522 PARAMETER Experiment Name: Zm_42deg_Heat_P Parameter: Timepoint (hr) Value: 1
  misc_feature: MA Experiment 108522 PARAMETER Experiment Name: Zm_42deg_Heat_P Parameter: Tissue Value: Aerial
  misc_feature: MA Experiment ID: 108523 Result: Up-regulated in Transcription
  misc_feature: MA Experiment 108523 PARAMETER Experiment Name: Zm_42deg_Heat_P Parameter: Age (day) Value: 8
  misc_feature: MA Experiment 108523 PARAMETER Experiment Name: Zm_42deg_Heat_P Parameter: Organism Value: Zea mays
  misc_feature: MA Experiment 108523 PARAMETER Experiment Name: Zm_42deg_Heat_P Parameter: Plant Line Value: 35A19
  misc_feature: MA Experiment 108523 PARAMETER Experiment Name: Zm_42deg_Heat_P Parameter: Temperature (deg C) Value: 42 vs. 22
  misc_feature: MA Experiment 108523 PARAMETER Experiment Name: Zm_42deg_Heat_P Parameter: Timepoint (hr) Value: 6
  misc_feature: MA Experiment 108523 PARAMETER Experiment Name: Zm_42deg_Heat_P Parameter: Tissue Value: Aerial
  misc_feature: MA Experiment ID: 108535 Result: Up-regulated in Transcription
  misc_feature: MA Experiment 108535 PARAMETER Experiment Name: Zm_Meristem_P Parameter: Age (day) Value: 8
  misc_feature: MA Experiment 108535 PARAMETER Experiment Name: Zm_Meristem_P Parameter: Organism Value: Zea mays
  misc_feature: MA Experiment 108535 PARAMETER Experiment Name: Zm_Meristem_P Parameter: Plant Line Value: 35A19
  misc_feature: MA Experiment 108535 PARAMETER Experiment Name: Zm_Meristem_P Parameter: Tissue Value: Root Meristem vs. Above Root Meristem
  misc_feature: MA Experiment ID: 108543 Result: Down-regulated in Transcription
  misc_feature: MA Experiment ID: 20000108 Result: Up-regulated in Transcription
  misc_feature: MA Experiment 20000108 PARAMETER Experiment Name: Zm_Root-Tips_P Parameter: Age (day) Value: 12
  misc_feature: MA Experiment 20000108 PARAMETER Experiment Name: Zm_Root-Tips_P Parameter: Organism Value: Zea mays
  misc_feature: MA Experiment 20000108 PARAMETER Experiment Name: Zm_Root-Tips_P Parameter: Tissue Value: Root tips vs. Root mid region    35
  misc_feature: MA Experiment 20000108 PARAMETER Experiment Name: Zm_Root-Tips_P Parameter: Tissue Value: Root tips vs. Root mid region   Sequence Listing-Misc Features (4)
gcacgagaccattacctagaacatcctaatcgaaaaagagacgacgacgacgacgacgacgacgacgacgcgagaagtcgaggcgccgctgcttgctaggaccgagcttcaggaagtctccaacggccccggcgccggcacggcctgccccgcgccgccacagggattgattgtgatcagatctattctgtagtggtcagcggctgagggtgaaccgaagatgagcgttgtgggattcgatctcggcaatgagagctgcattgtggcagtcgcgcggcagcgcggcatcgacgtggtcctcaacgatgagtccaaacgcgagacacccgccatcgtctgcttcggggacaagcagcggttcatcggtacggcgggcgccgcgtcctcaaccatgaaccccaaaaactccatttctcagatcaagcgcctgctcggccgcaagttctccgaccccgagctccagagtgatctcgcgtccttcccgttccgtgtcacggagggccccgatggatttcccttggtacatgtgcggttcctgggcgaggagcggacgtttacccccacccagctgcttgccatggtgctgtccaatctgaagggcattgctgaggggaaccttaagactgcggttgttgattgctgcattggcatccctgtgtacttcagtgatttgcagcgcagggctgttcttgatgctgctactattgcaggcctcacgccgttgcagctatttcatgagacaactgccacggcattggcttatggcatttataagactgacctcccggagcatgaccagctaaacgttgcatttgttgatgtcggccatgctagcttgcaggtcagcattgtcggttacaagaagggacagctcaagatgctttcgcatgcatatgaccgttctcttggtgggagggacttcgatgaggccctcttcaagcacttcgcggcgaagttcaaagaagaatataagattgatgtttaccagaatgcccgtgcatgccttaggttgcgtgtggcgtgtgagaagcttaagaagatgctgagcgccaacccagaggccccactgaacattgagtgcttgatggatgagaaagatgtgagagggtttattaagagagaggagtttgaacacatcagtgcacctgtgctggtacgtgtcaaaggacccttggagaaggccttggctgaagctggcttgacaactgaaaatgtgcactttgttgaggttgtcggatctggttctcgtgttccagccataatcaagataatcactgatttttttgggaaggagccgagacgaaccatgaatgcaagcgagtgtgttgcgcggggctgtgctctccagtgtgctattctcagccccactttcaaagtgcgggaattccaggttaatgatgggtttcctttctcaattgcattgtcatggaaacaagactcgcagaacagtgcaccccaacagacccttgtatttccaaaggggaatgtaattcccagcattaaagctctaaccttctataaatccagtacatttgaagttgatgttttgtatgtggacacatgcgactcgcaaattccacagaagataagcacttacacaattggacctttccaaccctccaaaggtgagagggccaaactgaaagttaaagtgcgtctcaacatccacgggattgtcacagttgattcagctatgatgctggaggaggatgtggcagttccagtctcatctgctaatgaagctccaaaggatactacaaagatggacacagatgatgcaccaagtgatcctgtctctggaactgatgtgaatgtgcatgagcctgatactactgaggctgctcctgcagctgaaaatggaacacaaaatcccgaggaaaaatctgttccaatggaaactgatgcaaaggttgagccatcaaaaaggaaagttaagagaacttctgttccggtccatgcgttggtctatggtgccttggctgcagctgacctgcagaaggctgtagagaaagagtatgagatggctcttcaggacagagtaatggaagaaaccaaagagaagaaaaatgctgtggaagcttatgtctatgacatgcgtaacaagctctacgacaggtacaacgattttgtgacacctgaggagaaggaagggttgattggaaagcttcaggaggttgaagattggctatatgaagatggtgaggatgagacaaagggagtctatatttctaaactggaagatcttaagaagattggtgacccaattgaggcacggtacaaggagtcgacagaaaggggttcctctgtagatcaactggtctactgcatcaacagtttcagagaggctgctttgtccagtgaccaaaagtttggccatatcgacatatctgagaaacagaaggtcatcaatgagtgctctgaagtagagaactggttgagagagaggaagcagcagcaggacgccctacctaagcacaccgatcctgtgctgctcgtatcagatctgaagaagaaagctgaagcacttgacaggttctgcaaaccgatcatgactaaaccaaagccagctccgaagccacagactccgccaccacatactccacctccacagcctgaagcccaagcatctgaccctcaaacaccagaacaacaacaaagcgggactggtgcagctggtgagccgggtagtgagggaggtgtgcagcaggcctccggtgagcaaatggacatggacaggcccgatgattctgcggatgttgcggcataattgtggttgtggttgtcatctgtcttatgatcgatcaaaattttctgtttgtctggtaggtggatgagttaaggcaacagcatattctcccaagcgatttcgttttagggtttggaacattgagattgaggtaatgcgtcttgtccagcgttgttttggtctggactgtgaatcagaatagaaacgttgcatgatcgaattgcgcc

SEQ ID NO: 17671 - protein, 848 aa, Zea mays subsp. mays
  peptide (1)..(848): Ceres Seq. ID no. 12375066
  misc_feature (3)..(688): Pfam Name: Hsp70 protein Pfam Description: Hsp70 protein
  misc_feature (1)..(519): Homolog of NCBI NO: 7441858 NR Description: heat shock protein 70 - fission yeast
  misc_feature (545)..(691): Homolog of NCBI NO: 12230134 NR Description: HEAT SHOCK PROTEIN HOMOLOG PSS1
  misc_feature (1)..(519): Homolog of NCBI NO: 12230134 NR Description: HEAT SHOCK PROTEIN HOMOLOG PSS1
  misc_feature (1)..(838): Homolog of NCBI NO: 39645395 NR Description: Unknown (protein for MGC:76295) [Silurana
  misc_feature (1)..(838): Homolog of NCBI NO: 1098541 NR Description: osmotic stress protein 94
  misc_feature (1)..(838): Homolog of NCBI NO: 40254361 NR Description: osmotic stress protein; osmotic stress protein 94
  misc_feature (1)..(635): Homolog of NCBI NO: 30699465 NR Description: heat shock protein hsp70, putative [Arabidopsis
  misc_feature (1)..(808): Homolog of NCBI NO: 7450157 NR Description: heat shock protein 91 - Arabidopsis thaliana
  misc_feature (1)..(808): Homolog of NCBI NO: 15220026 NR Description: putative heat-shock protein
  misc_feature (1)..(813): Homolog of NCBI NO: 17473863 NR Description: putative heat-shock protein [Arabidopsis thaliana]
MSVVGFDLGNESCIVAVARQRGIDVVLNDESKRETPAIVCFGDKQRFIGTAGAASSTMNPKNSISQIKRLLGRKFSDPELQSDLASFPFRVTEGPDGFPLVHVRFLGEERTFTPTQLLAMVLSNLKGIAEGNLKTAVVDCCIGIPVYFSDLQRRAVLDAATIAGLTPLQLFHETTATALAYGIYKTDLPEHDQLNVAFVDVGHASLQVSIVGYKKGQLKMLSHAYDRSLGGRDFDEALFKHFAAKFKEEYKIDVYQNARACLRLRVACEKLKKMLSANPEAPLNIECLMDEKDVRGFIKREEFEHISAPVLVRVKGPLEKALAEAGLTTENVHFVEVVGSGSRVPAIIKIITDFFGKEPRRTMNASECVARGCALQCAILSPTFKVREFQVNDGFPFSIALSWKQDSQNSAPQQTLVFPKGNVIPSIKALTFYKSSTFEVDVLYVDTCDSQIPQKISTYTIGPFQPSKGERAKLKVKVRLNIHGIVTVDSAMMLEEDVAVPVSSANEAPKDTTKMDTDDAPSDPVSGTDVNVHEPDTTEAAPAAENGTQNPEEKSVPMETDAKVEPSKRKVKRTSVPVHALVYGALAAADLQKAVEKEYEMALQDRVMEETKEKKNAVEAYVYDMRNKLYDRYNDFVTPEEKEGLIGKLQEVEDWLYEDGEDETKGVYISKLEDLKKIGDPIEARYKESTERGSSVDQLVYCINSFREAALSSDQKFGHIDISEKQKVINECSEVENWLRERKQQQDALPKHTDPVLLVSDLKKKAEALDRFCKPIMTKPKPAPKPQTPPPHTPPPQPEAQASDPQTPEQQQSGTGAAGEPGSEGGVQQASGEQMDMDRPDDSADVAA

SEQ ID NO: 17672 - protein, 791 aa, Zea mays subsp. mays
  peptide (1)..(791): Ceres Seq. ID no. 12375067
  misc_feature (1)..(631): Pfam Name: Hsp70 protein Pfam Description: Hsp70 protein
  misc_feature (1)..(462): Homolog of NCBI NO: 7441858 NR Description: heat shock protein 70 - fission yeast
  misc_feature (488)..(634): Homolog of NCBI NO: 12230134 NR Description: HEAT SHOCK PROTEIN HOMOLOG PSS1
  misc_feature (1)..(462): Homolog of NCBI NO: 12230134 NR Description: HEAT SHOCK PROTEIN HOMOLOG PSS1
  misc_feature (1)..(781): Homolog of NCBI NO: 39645395 NR Description: Unknown (protein for MGC:76295) [Silurana
  misc_feature (1)..(781): Homolog of NCBI NO: 1098541 NR Description: osmotic stress protein 94
  misc_feature (1)..(781): Homolog of NCBI NO: 40254361 NR Description: osmotic stress protein; osmotic stress protein 94
  misc_feature (1)..(578): Homolog of NCBI NO: 30699465 NR Description: heat shock protein hsp70, putative [Arabidopsis
  misc_feature (1)..(751): Homolog of NCBI NO: 7450157 NR Description: heat shock protein 91 - Arabidopsis thaliana
  misc_feature (1)..(751): Homolog of NCBI NO: 15220026 NR Description: putative heat-shock protein
  misc_feature (1)..(756): Homolog of NCBI NO: 17473863 NR Description: putative heat-shock protein [Arabidopsis thaliana]
MNPKNSISQIKRLLGRKFSDPELQSDLASFPFRVTEGPDGFPLVHVRFLGEERTFTPTQLLAMVLSNLKGIAEGNLKTAVVDCCIGIPVYFSDLQRRAVLDAATIAGLTPLQLFHETTATALAYGIYKTDLPEHDQLNVAFVDVGHASLQVSIVGYKKGQLKMLSHAYDRSLGGRDFDEALFKHFAAKFKEEYKIDVYQNARACLRLRVACEKLKKMLSANPEAPLNIECLMDEKDVRGFIKREEFEHISAPVLVRVKGPLEKALAEAGLTTENVHFVEVVGSGSRVPAIIKIITDFFGKEPRRTMNASECVARGCALQCAILSPTFKVREFQVNDGFPFSIALSWKQDSQNSAPQQTLVFPKGNVIPSIKALTFYKSSTFEVDVLYVDTCDSQIPQKISTYTIGPFQPSKGERAKLKVKVRLNIHGIVTVDSAMMLEEDVAVPVSSANEAPKDTTKMDTDDAPSDPVSGTDVNVHEPDTTEAAPAAENGTQNPEEKSVPMETDAKVEPSKRKVKRTSVPVHALVYGALAAADLQKAVEKEYEMALQDRVMEETKEKKNAVEAYVYDMRNKLYDRYNDFVTPEEKEGLIGKLQEVEDWLYEDGEDETKGVYISKLEDLKKIGDPIEARYKESTERGSSVDQLVYCINSFREAALSSDQKFGHIDISEKQKVINECSEVENWLRERKQQQDALPKHTDPVLLVSDLKKKAEALDRFCKPIMTKPKPAPKPQTPPPHTPPPQPEAQASDPQTPEQQQSGTGAAGEPGSEGGVQQASGEQMDMDRPDDSADVAA

SEQ ID NO: 17673 - protein, 729 aa, Zea mays subsp. mays
  peptide (1)..(729): Ceres Seq. ID no. 12375068
  misc_feature (1)..(569): Pfam Name: Hsp70 protein Pfam Description: Hsp70 protein
  misc_feature (1)..(400): Homolog of NCBI NO: 7441858 NR Description: heat shock protein 70 - fission yeast
  misc_feature (426)..(572): Homolog of NCBI NO: 12230134 NR Description: HEAT SHOCK PROTEIN HOMOLOG PSS1
  misc_feature (1)..(400): Homolog of NCBI NO: 12230134 NR Description: HEAT SHOCK PROTEIN HOMOLOG PSS1
  misc_feature (1)..(719): Homolog of NCBI NO: 39645395 NR Description: Unknown (protein for MGC:76295) [Silurana
  misc_feature (1)..(719): Homolog of NCBI NO: 1098541 NR Description: osmotic stress protein 94
  misc_feature (1)..(719): Homolog of NCBI NO: 40254361 NR Description: osmotic stress protein; osmotic stress protein 94
  misc_feature (1)..(516): Homolog of NCBI NO: 30699465 NR Description: heat shock protein hsp70, putative [Arabidopsis
  misc_feature (1)..(689): Homolog of NCBI NO: 7450157 NR Description: heat shock protein 91 - Arabidopsis thaliana
  misc_feature (1)..(689): Homolog of NCBI NO: 15220026 NR Description: putative heat-shock protein
  misc_feature (1)..(694): Homolog of NCBI NO: 17473863 NR Description: putative heat-shock protein [Arabidopsis thaliana]
MVLSNLKGIAEGNLKTAVVDCCIGIPVYFSDLQRRAVLDAATIAGLTPLQLFHETTATALAYGIYKTDLPEHDQLNVAFVDVGHASLQVSIVGYKKGQLKMLSHAYDRSLGGRDFDEALFKHFAAKFKEEYKIDVYQNARACLRLRVACEKLKKMLSANPEAPLNIECLMDEKDVRGFIKREEFEHISAPVLVRVKGPLEKALAEAGLTTENVHFVEVVGSGSRVPAIIKIITDFFGKEPRRTMNASECVARGCALQCAILSPTFKVREFQVNDGFPFSIALSWKQDSQNSAPQQTLVFPKGNVIPSIKALTFYKSSTFEVDVLYVDTCDSQIPQKISTYTIGPFQPSKGERAKLKVKVRLNIHGIVTVDSAMMLEEDVAVPVSSANEAPKDTTKMDTDDAPSDPVSGTDVNVHEPDTTEAAPAAENGTQNPEEKSVPMETDAKVEPSKRKVKRTSVPVHALVYGALAAADLQKAVEKEYEMALQDRVMEETKEKKNAVEAYVYDMRNKLYDRYNDFVTPEEKEGLIGKLQEVEDWLYEDGEDETKGVYISKLEDLKKIGDPIEARYKESTERGSSVDQLVYCINSFREAALSSDQKFGHIDISEKQKVINECSEVENWLRERKQQQDALPKHTDPVLLVSDLKKKAEALDRFCKPIMTKPKPAPKPQTPPPHTPPPQPEAQASDPQTPEQQQSGTGAAGEPGSEGGVQQASGEQMDMDRPDDSADVAA

SEQ ID NO: 17674 - DNA, 1678 bp, Zea mays subsp. mays
  misc_feature (1)..(1678): Ceres Seq. ID no. 12363462
  misc_feature: MA Experiment ID: 108556 Result: Down-regulated in Transcription
  misc_feature: MA Experiment 108556 PARAMETER Experiment Name: Zm_Drought_P Parameter: Age (day) Value: 9
  misc_feature: MA Experiment 108556 PARAMETER Experiment Name: Zm_Drought_P Parameter: Organism Value: Zea mays
  misc_feature: MA Experiment 108556 PARAMETER Experiment Name: Zm_Drought_P Parameter: Plant Line Value: 35A19
  misc_feature: MA Experiment 108556 PARAMETER Experiment Name: Zm_Drought_P Parameter: Timepoint (hr) Value: 24
  misc_feature: MA Experiment 108556 PARAMETER Experiment Name: Zm_Drought_P Parameter: Tissue Value: Aerial
  misc_feature: MA Experiment 108556 PARAMETER Experiment Name: Zm_Drought_P Parameter: Treatment Value: Drought vs. No Drought
gcacgagaccattacctagaacatcctaattgaaaaacagtcctcaccaccagaccaaatcgcagtcgcgctcgagctcaagccccgccgccgacgccgtcatctgcgccccagaaccccgtatttccctccgccgccttccgatctctcgctcctccccatgtcggagaaaaagcgccgcgccggtgcgagcgcggccggcgccgcatccagctccaagaagccgcgtgcttcctcggccgcgtcgtacgccgagtccctccgctcgaagctccgccccgacgcctccatcctggccaccctccgctccctcgcttctgcctccgcttccaaatccaaggccgacgccaggtccctcgcggaccacgacccgtgcgcggaccccgcctcctcgtacatcgtggtggccgaccaggactccacctccgtcacctcccgcatcaaccgcctcgtccttgccgccgcgcgcagcatcctctccggccggggcttctccttcgcggtgccctcgcgcgccgcctctaaccaggtctacctcccggacctcgaccgcatcgtgctcgtccgccgcgagtccgcgcgccccttcgccaacgtcgccaccgcgcggaaggccaccatcacggcgcgagtcctctccctcgtccacgccgtcctcggcaggggcatccacgtcaccaagcgtgacctcttctacaccgacgtcaagctcttcggcgaccagacccagtctgacgccgtcctcgacgacgtctcctgcatgctcggatgcaccaggtcctcgctccacgtcgtcgcctccgagaagggcgtcgtcgtcggccgccttgtcttcgccgacgacggggaccggatcgactgcacgcgcatgggcgtcggcggcaaggccattccgcccaacgtcgacagggtctcgggcatcgagagcgacgcgctcttcatcctcctggtggagaaggacgctgcattcatgcgactcgccgaggacaggttctacaaccgcttcccctgcatcattctgacggccaaggggcagccagatgtcgccacccggctgttcctgcggaggctcaaggttgagctgaagctgccagtgctcgcgctggtggattctgatccatacgggctcaagatcttgtcggtgtacatgtgtggttccaagaacatgtcgtatgacagtgccaatctgacgacgccggacatcaagtggctcggtgtccggccgagcgacctggacaagtacagagtgccggagcagtgccgtctccccatgaccgatcacgatatcaaggtggggaaagagctgctcgaggaggacttcgtgaagcagaatgagggctgggtgaaggagctggagacgatgctgcgcaccaagcaaaaggctgagatacaggccctcagttccttcgggttccagtacctcaccgaggtctacctgcctcttaagttgcaggagcaggattggatttgagaactctccaatgctagatatcagtaatttccctagccaagataatgccctccgctcagtattttcaaggaccaaattggcatgaatgaagacttcgccatctagttaatcacatgtatttttgaacaccagctgttgtattatttatttctgctggagaactgttctgtggaaaacattgctgccagatatatgtgctggaatttg

SEQ ID NO: 17675 - protein, 436 aa, Zea mays subsp. mays
  peptide (1)..(436): Ceres Seq. ID no. 12363463
  misc_feature (145)..(212): Pfam Name: Type IIB DNA topoisomerase Pfam Description: Type IIB DNA topoisomerase
  misc_feature (117)..(436): Homolog of NCBI NO: 30696943 NR Description: expressed protein [Arabidopsis thaliana]
  misc_feature (160)..(436): Homolog of NCBI NO: 5733397 NR Description: SPO11 protein [Mus musculus]
  misc_feature (148)..(436): Homolog of NCBI NO: 5453474 NR Description: meiotic DNA transesterase/topoisomerase homolog
  misc_feature (148)..(436): Homolog of NCBI NO: 9501146 NR Description: dJ481F12.2.2 (meiotic protein covalently bound to (S.cerevisiae)-like (meiotic DNA transesterase/topoisomerase
  misc_feature (148)..(436): Homolog of NCBI NO: 5453472 NR Description: meiotic DNA transesterase/topoisomerase homolog
  misc_feature (87)..(436): Homolog of NCBI NO: 9501147 NR Description: dJ481F12.2.1 (meiotic protein covalently bound to (S. cerevisiae)-like (a DNA transesterase/topoisomerase homolog
  misc_feature (87)..(436): Homolog of NCBI NO: 6912680 NR Description: SPO11 meiotic protein covalently bound to
  misc_feature (87)..(436): Homolog of NCBI NO: 6755624 NR Description: sporulation protein, meiosis-specific, SPO11
  misc_feature (18)..(436): Homolog of NCBI NO: 15241959 NR Description: meiosis specific - like protein
  misc_feature (1)..(436): Homolog of NCBI NO: 27476077 NR Description: Hypothetical protein [Oryza sativa (japonica
MSEKKRRAGASAAGAASSSKKPRASSAASYAESLRSKLRPDASILATLRSLASASASKSKADARSLADHDPCADPASSYIVVADQDSTSVTSRINRLVLAAARSILSGRGFSFAVPSRAASNQVYLPDLDRIVLVRRESARPFANVATARKATITARVLSLVHAVLGRGIHVTKRDLFYTDVKLFGDQTQSDAVLDDVSCMLGCTRSSLHVVASEKGVVVGRLVFADDGDRIDCTRMGVGGKAIPPNVDRVSGIESDALFILLVEKDAAFMRLAEDRFYNRFPCIILTAKGQPDVATRLFLRRLKVELKLPVLALVDSDPYGLKILSVYMCGSKNMSYDSANLTTPDIKWLGVRPSDLDKYRVPEQCRLPMTDHDIKVGKELLEEDFVKQNEGWVKELETMLRTKQKAEIQALSSFGFQYLTEVYLPLKLQEQDWI

SEQ ID NO: 17676 - protein, 236 aa, Zea mays subsp. mays
  peptide (1)..(236): Ceres Seq. ID no. 12363464
  misc_feature (60)..(132): Pfam Name: Toprim domain Pfam Description: Toprim domain
  misc_feature (1)..(236): Homolog of NCBI NO: 30696943 NR Description: expressed protein [Arabidopsis thaliana]
  misc_feature (1)..(236): Homolog of NCBI NO: 5733397 NR Description: SPO11 protein [Mus musculus]
  misc_feature (1)..(236): Homolog of NCBI NO: 5453474 NR Description: meiotic DNA transesterase/topoisomerase homolog
  misc_feature (1)..(236): Homolog of NCBI NO: 9501146 NR Description: dJ481F12.2.2 (meiotic protein covalently bound to (S.cerevisiae)-like (meiotic DNA transesterase/topoisomerase
  misc_feature (1)..(236): Homolog of NCBI NO: 5453472 NR Description: meiotic DNA transesterase/topoisomerase homolog
  misc_feature (1)..(236): Homolog of NCBI NO: 9501147 NR Description: dJ481F12.2.1 (meiotic protein covalently bound to (S. cerevisiae)-like (a DNA transesterase/topoisomerase homolog
  misc_feature (1)..(236): Homolog of NCBI NO: 6912680 NR Description: SPO11 meiotic protein covalently bound to
  misc_feature (1)..(236): Homolog of NCBI NO: 6755624 NR Description: sporulation protein, meiosis-specific, SPO11
  misc_feature (1)..(236): Homolog of NCBI NO: 15241959 NR Description: meiosis specific - like protein
  misc_feature (1)..(236): Homolog of NCBI NO: 27476077 NR Description: Hypothetical protein [Oryza sativa (japonica
MLGCTRSSLHVVASEKGVVVGRLVFADDGDRIDCTRMGVGGKAIPPNVDRVSGIESDALFILLVEKDAAFMRLAEDRFYNRFPCIILTAKGQPDVATRLFLRRLKVELKLPVLALVDSDPYGLKILSVYMCGSKNMSYDSANLTTPDIKWLGVRPSDLDKYRVPEQCRLPMTDHDIKVGKELLEEDFVKQNEGWVKELETMLRTKQKAEIQALSSFGFQYLTEVYLPLKLQEQDWI

SEQ ID NO: 17677 - DNA, 2094 bp, Zea mays subsp. mays
  misc_feature (1)..(2094): Ceres Seq. ID no. 12417627
  misc_feature: MA Experiment ID: 108536 Result: Up-regulated in Transcription
  misc_feature: MA Experiment 108536 PARAMETER Experiment Name: Zm_Meristem_P Parameter: Age (day) Value: 8
  misc_feature: MA Experiment 108536 PARAMETER Experiment Name: Zm_Meristem_P Parameter: Organism Value: Zea mays
  misc_feature: MA Experiment 108536 PARAMETER Experiment Name: Zm_Meristem_P Parameter: Plant Line Value: 35A19
  misc_feature: MA Experiment 108536 PARAMETER Experiment Name: Zm_Meristem_P Parameter: Tissue Value: Shoot Meristem vs. Above Shoot Meristem
  misc_feature: MA Experiment ID: 20000479 Result: Up-regulated in Transcription
  misc_feature: MA Experiment 20000479 PARAMETER Experiment Name: Zm_Drought_P Parameter: Age (day) Value: 10
  misc_feature: MA Experiment 20000479 PARAMETER Experiment Name: Zm_Drought_P Parameter: Organism Value: Zea mays
  misc_feature: MA Experiment 20000479 PARAMETER Experiment Name: Zm_Drought_P Parameter: Plant Line Value: 35A19
  misc_feature: MA Experiment 20000479 PARAMETER Experiment Name: Zm_Drought_P Parameter: Timepoint (hr) Value: 48
  misc_feature: MA Experiment 20000479 PARAMETER Experiment Name: Zm_Drought_P Parameter: Tissue Value: Aerial
  misc_feature: MA Experiment 20000479 PARAMETER Experiment Name: Zm_Drought_P Parameter: Treatment Value: Drought vs. No Drought
  misc_feature: MA Experiment ID: 20000492 Result: Down-regulated in Transcription
  misc_feature: MA Experiment 20000492 PARAMETER Experiment Name: Zm_Hybrid_Seed_Dev_P Parameter: DAP Value: 12
  misc_feature: MA Experiment 20000492 PARAMETER Experiment Name: Zm_Hybrid_Seed_Dev_P Parameter: Organism Value: Zea mays
  misc_feature: MA Experiment 20000492 PARAMETER Experiment Name: Zm_Hybrid_Seed_Dev_P Parameter: Plant Line Value: 35A19
  misc_feature: MA Experiment 20000492 PARAMETER Experiment Name: Zm_Hybrid_Seed_Dev_P Parameter: Tissue Value: Fert Kernel vs. Unfert Floret
  misc_feature: MA Experiment ID: 20000535 Result: Down-regulated in Transcription
  misc_feature: MA Experiment 20000535 PARAMETER Experiment Name: Zm_Hybrid_Seed_Dev_P Parameter: DAP Value: 30 vs. 12
  misc_feature: MA Experiment 20000535 PARAMETER Experiment Name: Zm_Hybrid_Seed_Dev_P Parameter: Organism Value: Zea mays
  misc_feature: MA Experiment 20000535 PARAMETER Experiment Name: Zm_Hybrid_Seed_Dev_P Parameter: Plant Line Value: 35A19
  misc_feature: MA Experiment 20000535 PARAMETER Experiment Name: Zm_Hybrid_Seed_Dev_P Parameter: Tissue Value: Embryo vs. Unfert Floret
attgtgctcgctgcgctgtgtgtttctggataataaaaaacccgccagcccccgcatcggagggccgcgcaagtgggtcaactcgcaactgaagaccaaaggcgagagccggctgcccggattccggaagcgcccaagcccccaacgcgaccgtcgctgtcgccaccgcgctcggctcgcccgcgtccacagaagccgccagggccatacgccgatgaatcctgccgcgacggcggatcccagcagctccagcacctcggcggccacgctgcggaagcggatgatctctatagacacggctcgacgaggagccgacggcgcgtcgcctgagaccgcgcccaggccagatcgggcgggtagtgataaggcgccgcaggagcgggaggaggagggctcgatggcggcctccgcgcctgcggcggcagcagcgagggagagtgacctggaggcggtgggcgagccgatgagccccgcggggcggctgttccgcgagacgcacttcaactgctacatcgtggccgtgatcgggctgggcgcggcggtggacgtcgcggcggcgcgcgcggggctggaggtcacgctcgtccgccacccacgcttctccagcgtccaggtgaatgatggtgatgcgagaaagaacgccaagccgcggtgggtgcggaccacggttaacctggatgatcacatcatcgtcccctgcctggaacccgctgccacgtcgaccaagccggaccaggccgtggaggactacctgtcctggctgtccacggcgcccatggaccactcccgcccgctctgggagttccacgtcctggacttcccgacgtccgaggccaccgccaccgttgccatccgcatgcaccactccctcggcgacggcgtctcgctgctgtcgctgctcatcgcgtgcacccgcagcgccgcggacccggcgcggctgccggagctgccgcccgcgccgcgccgcgcgagccctgtctacgccaggcagcgccccccgctttccgcgggcctcgtggcgttctcgctgtggctgtggtcctacgtcttgctcgcgtggcacacactggtggacgtcgcgtgcttcgtggccacggcgtggttcctgcgcgaccagcgcacacccttcatggccgcgtccgagggcgtcgagttccgccgcaagcgcttcgtgcaccgcacgctcagcctcgacgacgtcaagttcgtcaagaatgtcatgaagtgtactgtcaacgatgtcctgattggagtgactaacgcagggttgtcgcggtattattttcgaaaaaccagtgataccaacaacgagaggaaaaaatcgcagaatattcgtgtccgatcagctctccttgttaacattaggagaacacctggtttacatgcattggcggaaatgatggattctatcaagaacaatagggcaaaatgggggaacctgattggttacatgatactgcctttccacatagccatgcacgatgatcctcttgaatacatccgccaagggaaaaggacagctcaaaggaagaaggcttcattagaagcggttttcacgtactggagtgggaacctaatagtcaaactatttggcatgaaggctgcagcagctctctgctatggtatgttcacaaatacgaccatgtcattctcaagcatggtcggacctgctgagaaggtggagttctacggccatccaatcatctacatcgctccctctgtctacgggcatccacatgctctgactatacattaccaaagctatacgaactccatcaagcttgtcctcgcagtggatgatgctcagtttccagactctcatcagcttttggacgacttcgccgagtccctcaggctcatccgtcaggcagcttcaacaagatgacagacacaaacaagagcatttttttcagtagaatgtagactgttggcgagaactcgcatacaaatgctggacaataacttatcaggaaattgatggcctggttacctgactggggactcttgaactttcaagaaatcattagaggcaaattgtaaagtgtaaagactagtatgtaatatcaatattgttcaaccaattgcggtggaatt

SEQ ID NO: 17678 - protein, 627 aa, Zea mays subsp. mays
  peptide (1)..(627): Ceres Seq. ID no. 12417628
  misc_feature (153)..(447): Pfam Name: Condensation domain Pfam Description: Condensation domain
  misc_feature (153)..(627): Homolog of NCBI NO: 15229102 NR Description: putative protein; protein id: At3g49190.1
  misc_feature (142)..(627): Homolog of NCBI NO: 15229104 NR Description: putative protein; protein id: At3g49210.1
  misc_feature (145)..(627): Homolog of NCBI NO: 15229103 NR Description: putative protein; protein id: At3g49200.1
  misc_feature (143)..(627): Homolog of NCBI NO: 30696326 NR Description: expressed protein [Arabidopsis thaliana]
  misc_feature (143)..(627): Homolog of NCBI NO: 26451548 NR Description: unknown protein [Arabidopsis thaliana]
  misc_feature (143)..(627): Homolog of NCBI NO: 9759186 NR Description: emb|CAB66399.1~gene_id:K19E1.19~strong similarity
  misc_feature (429)..(627): Homolog of NCBI NO: 34909902 NR Description: P0665A11.11 [Oryza sativa (japonica
  misc_feature (104)..(409): Homolog of NCBI NO: 34909902 NR Description: P0665A11.11 [Oryza sativa (japonica
  misc_feature (218)..(625): Homolog of NCBI NO: 34911182 NR Description: P0019E03.6 [Oryza sativa (japonica
  misc_feature (153)..(627): Homolog of NCBI NO: 34909900 NR Description: P0665A11.10 [Oryza sativa (japonica
LCSLRCVFLDNKKPASPRIGGPRKWVNSQLKTKGESRLPGFRKRPSPQRDRRCRHRARLARVHRSRQGHTPMNPAATADPSSSSTSAATLRKRMISIDTARRGADGASPETAPRPDRAGSDKAPQEREEEGSMAASAPAAAAARESDLEAVGEPMSPAGRLFRETHFNCYIVAVIGLGAAVDVAAARAGLEVTLVRHPRFSSVQVNDGDARKNAKPRWVRTTVNLDDHIIVPCLEPAATSTKPDQAVEDYLSWLSTAPMDHSRPLWEFHVLDFPTSEATATVAIRMHHSLGDGVSLLSLLIACTRSAADPARLPELPPAPRRASPVYARQRPPLSAGLVAFSLWLWSYVLLAWHTLVDVACFVATAWFLRDQRTPFMAASEGVEFRRKRFVHRTLSLDDVKFVKNVMKCTVNDVLIGVTNAGLSRYYFRKTSDTNNERKKSQNIRVRSALLVNIRRTPGLHALAEMMDSIKNNRAKWGNLIGYMILPFHIAMHDDPLEYIRQGKRTAQRKKASLEAVFTYWSGNLIVKLFGMKAAAALCYGMFTNTTMSFSSMVGPAEKVEFYGHPIIYIAPSVYGHPHALTIHYQSYTNSIKLVLAVDDAQFPDSHQLLDDFAESLRLIRQAASTR

SEQ ID NO: 17679 - protein, 556 aa, Zea mays subsp. mays
  peptide (1)..(556): Ceres Seq. ID no. 12417629
  misc_feature (82)..(376): Pfam Name: Condensation domain Pfam Description: Condensation domain
  misc_feature (82)..(556): Homolog of NCBI NO: 15229102 NR Description: putative protein; protein id: At3g49190.1
  misc_feature (71)..(556): Homolog of NCBI NO: 15229104 NR Description: putative protein; protein id: At3g49210.1
  misc_feature (74)..(556): Homolog of NCBI NO: 15229103 NR Description: putative protein; protein id: At3g49200.1
  misc_feature (72)..(556): Homolog of NCBI NO: 30696326 NR Description: expressed protein [Arabidopsis thaliana]
  misc_feature (72)..(556): Homolog of NCBI NO: 26451548 NR Description: unknown protein [Arabidopsis thaliana]
  misc_feature (72)..(556): Homolog of NCBI NO: 9759186 NR Description: emb|CAB66399.1~gene_id:K19E1.19~strong similarity
  misc_feature (358)..(556): Homolog of NCBI NO: 34909902 NR Description: P0665A11.11 [Oryza sativa (japonica
  misc_feature (33)..(338): Homolog of NCBI NO: 34909902 NR Description: P0665A11.11 [Oryza sativa (japonica
  misc_feature (147)..(554): Homolog of NCBI NO: 34911182 NR Description: P0019E03.6 [Oryza sativa (japonica
  misc_feature (82)..(556): Homolog of NCBI NO: 34909900 NR Description: P0665A11.10 [Oryza sativa (japonica
MNPAATADPSSSSTSAATLRKRMISIDTARRGADGASPETAPRPDRAGSDKAPQEREEEGSMAASAPAAAAARESDLEAVGEPMSPAGRLFRETHFNCYIVAVIGLGAAVDVAAARAGLEVTLVRHPRFSSVQVNDGDARKNAKPRWVRTTVNLDDHIIVPCLEPAATSTKPDQAVEDYLSWLSTAPMDHSRPLWEFHVLDFPTSEATATVAIRMHHSLGDGVSLLSLLIACTRSAADPARLPELPPAPRRASPVYARQRPPLSAGLVAFSLWLWSYVLLAWHTLVDVACFVATAWFLRDQRTPFMAASEGVEFRRKRFVHRTLSLDDVKFVKNVMKCTVNDVLIGVTNAGLSRYYFRKTSDTNNERKKSQNIRVRSALLVNIRRTPGLHALAEMMDSIKNNRAKWGNLIGYMILPFHIAMHDDPLEYIRQGKRTAQRKKASLEAVFTYWSGNLIVKLFGMKAAAALCYGMFTNTTMSFSSMVGPAEKVEFYGHPIIYIAPSVYGHPHALTIHYQSYTNSIKLVLAVDDAQFPDSHQLLDDFAESLRLIRQAASTR

SEQ ID NO: 17680 - protein, 534 aa, Zea mays subsp. mays
  peptide (1)..(534): Ceres Seq. ID no. 12417630
  misc_feature (60)..(354): Pfam Name: Condensation domain Pfam Description: Condensation domain
  misc_feature (52)..(534): Homolog of NCBI NO: 15229103 NR Description: putative protein; protein id: At3g49200.1
  misc_feature (50)..(534): Homolog of NCBI NO: 30696326 NR Description: expressed protein [Arabidopsis thaliana]
  misc_feature (50)..(534): Homolog of NCBI NO: 26451548 NR Description: unknown protein [Arabidopsis thaliana]
  misc_feature (50)..(534): Homolog of NCBI NO: 9759186 NR Description: emb|CAB66399.1~gene_id:K19E1.19~strong similarity
  misc_feature (60)..(534): Homolog of NCBI NO: 15229102 NR Description: putative protein; protein id: At3g49190.1
  misc_feature (49)..(534): Homolog of NCBI NO: 15229104 NR Description: putative protein; protein id: At3g49210.1
  misc_feature (336)..(534): Homolog of NCBI NO: 34909902 NR Description: P0665A11.11 [Oryza sativa (japonica
  misc_feature (11)..(316): Homolog of NCBI NO: 34909902 NR Description: P0665A11.11 [Oryza sativa (japonica
  misc_feature (125)..(532): Homolog of NCBI NO: 34911182 NR Description: P0019E03.6 [Oryza sativa (japonica
  misc_feature (60)..(534): Homolog of NCBI NO: 34909900 NR Description: P0665A11.10 [Oryza sativa (japonica
MISIDTARRGADGASPETAPRPDRAGSDKAPQEREEEGSMAASAPAAAAARESDLEAVGEPMSPAGRLFRETHFNCYIVAVIGLGAAVDVAAARAGLEVTLVRHPRFSSVQVNDGDARKNAKPRWVRTTVNLDDHIIVPCLEPAATSTKPDQAVEDYLSWLSTAPMDHSRPLWEFHVLDFPTSEATATVAIRMHHSLGDGVSLLSLLIACTRSAADPARLPELPPAPRRASPVYARQRPPLSAGLVAFSLWLWSYVLLAWHTLVDVACFVATAWFLRDQRTPFMAASEGVEFRRKRFVHRTLSLDDVKFVKNVMKCTVNDVLIGVTNAGLSRYYFRKTSDTNNERKKSQNIRVRSALLVNIRRTPGLHALAEMMDSIKNNRAKWGNLIGYMILPFHIAMHDDPLEYIRQGKRTAQRKKASLEAVFTYWSGNLIVKLFGMKAAAALCYGMFTNTTMSFSSMVGPAEKVEFYGHPIIYIAPSVYGHPHALTIHYQSYTNSIKLVLAVDDAQFPDSHQLLDDFAESLRLIRQAASTR

SEQ ID NO: 17681 - DNA, 1582 bp, Zea mays subsp. mays
  misc_feature (1)..(1582): Ceres Seq. ID no. 13499244
  misc_feature: MA Experiment ID: 108543 Result: Up-regulated in Transcription
  misc_feature: MA Experiment ID: 20000626 Result: Down-regulated in Transcription
  misc_feature: MA Experiment 20000626 PARAMETER Experiment Name: Zm_Herbicide-Treatments_P Parameter: Timepoint (hr) Value: 12
  misc_feature: MA Experiment 20000626 PARAMETER Experiment Name: Zm_Herbicide-Treatments_P Parameter: Tissue Value: Aerial
  misc_feature: MA Experiment 20000626 PARAMETER Experiment Name: Zm_Herbicide-Treatments_P Parameter: Treatment Value: Roundup vs. No Treatment
actattatagccaacgtctctgcgcgtgcggtgccggagcggcggagcctcccctccctcccccatcctacctcaccatgatggcaatgccggacgcggatcgcaacgccatgtcggcgccgctgctcccgcggcccgcgtgcctgacggcgtccttctcctcctcctcctcctccttcgcgtccttctcctcctccaactcctccagctccgacccctcacccccgtccgccttcccgccggcggggccgtgcaaggcgctggcggtgctgcgggaccacgcgggctccgtctccagcctctccctctgcggggagttcctgctcagcgcgtccacggccggcgacgtcgtggcgtggcagcagcccgacctccggcgcttcgcgcgcttcggccacggcgagagcggcggctccgtcaaggcgctggcggccgcgggcggccgcgtcttctccgcgcaccaggacnnccgcgtccgcgtctggcgcgtctcccgcggccgccgctccgagaacgccttcaagctcgtcgccgcgctgcccaccgccagggactacctgggccgggtgttccgccaggacagctacgtgcagaccaccgccaccacggcggcgcgccgcgcccaccaccgccgcctctggatcgagcacgccaacagcatctcctgcctcgccgtcgccgtgcacgacgccgcgctcctctactcgggctcctgggaccgcacgctcaaggtctggcgcgtcgccgacctcaggtgcctcgagtccatccgcgcccacgacgacgccgtcaacgccgtcgccgcagacgccggcatcgtctactccgcctccgccgacggccgcgtcaaggcctgggagaaggggaaggcgtcgcatttcctccagggcgtcctcgtcgcccgcgacggcgtctcgtggaacgcgctcaccgtcgccgccgacgaccgccggctctacgccgcgggctccgacggccacgtcgccgcctgggaccgcctcggcggcaggaccgccgcgcgctggaccctcgcgtgcgacgtcagggcgcacgacgccgccgtgctgtgcctctgcgtcgccagggacctgctctgcaccggctccgccgacaagaccatcggcctgtggcgccgtcagagcgccggcgagctggccaaggtgggcgtcgtcagaggccacgagggccccgtcaaatgcatccaggcgtcctggtgcaggctcaccaatggctgcatggtctacagcgggagccttgacaagaccatcagagtttggtgggtgcccggtgccttgcagcatgccaatgacaaagatcagcagcagcagcagcaaaaagatggcttcaaggatcacaagcacaaggcttctttgttcttgagatgaaacttgtgtctgctccaaatttcgaaatggattgattgagattgctcaggtctagtctgtattttggattggttgatttatattacaaggataaatgggtaacacacaaaagtagccatagagtggatgtgcttctgtaaatggctgtatactatgttctgattcttctttgatataggttttgactacatggagag

SEQ ID NO: 17682 - protein, 460 aa, Zea mays subsp. mays
  peptide (1)..(460): Ceres Seq. ID no. 13499245
  misc_feature (385)..(426): Pfam Name: WD domain, G-beta repeat Pfam Description: WD domain, G-beta repeat
  misc_feature (89)..(427): Homolog of NCBI NO: 15222143 NR Description: transducin / WD-40 repeat protein family
  misc_feature (46)..(427): Homolog of NCBI NO: 18395507 NR Description: transducin / WD-40 repeat protein family
  misc_feature (76)..(427): Homolog of NCBI NO: 15240616 NR Description: transducin / WD-40 repeat protein family
  misc_feature (95)..(427): Homolog of NCBI NO: 15230244 NR Description: transducin / WD-40 repeat protein family
  misc_feature (89)..(428): Homolog of NCBI NO: 15220271 NR Description: transducin / WD-40 repeat protein family
  misc_feature (18)..(427): Homolog of NCBI NO: 15229740 NR Description: transducin / WD-40 repeat protein family
  misc_feature (88)..(451): Homolog of NCBI NO: 15225317 NR Description: transducin / WD-40 repeat protein family
  misc_feature (44)..(425): Homolog of NCBI NO: 15221675 NR Description: transducin / WD-40 repeat protein family
  misc_feature (53)..(449): Homolog of NCBI NO: 15231088 NR Description: transducin / WD-40 repeat protein family
  misc_feature (27)..(460): Homolog of NCBI NO: 34906600 NR Description: hypothetical protein~similar to Arabidopsis
  misc_feature (156)..(156): Xaa is any aa, unknown or other
YYSQRLCACGAGAAEPPLPPPSYLTMMAMPDADRNAMSAPLLPRPACLTASFSSSSSSFASFSSSNSSSSDPSPPSAFPPAGPCKALAVLRDHAGSVSSLSLCGEFLLSASTAGDVVAWQQPDLRRFARFGHGESGGSVKALAAAGGRVFSAHQDXRVRVWRVSRGRRSENAFKLVAALPTARDYLGRVFRQDSYVQTTATTAARRAHHRRLWIEHANSISCLAVAVHDAALLYSGSWDRTLKVWRVADLRCLESIRAHDDAVNAVAADAGIVYSASADGRVKAWEKGKASHFLQGVLVARDGVSWNALTVAADDRRLYAAGSDGHVAAWDRLGGRTAARWTLACDVRAHDAAVLCLCVARDLLCTGSADKTIGLWRRQSAGELAKVGVVRGHEGPVKCIQASWCRLTNGCMVYSGSLDKTIRVWWVPGALQHANDKDQQQQQQKDGFKDHKHKASLFLR

SEQ ID NO: 17683 - protein, 435 aa, Zea mays subsp. mays
  peptide (1)..(435): Ceres Seq. ID no. 13499246
  misc_feature (360)..(401): Pfam Name: WD domain, G-beta repeat Pfam Description: WD domain, G-beta repeat
  misc_feature (64)..(402): Homolog of NCBI NO: 15222143 NR Description: transducin / WD-40 repeat protein family
  misc_feature (21)..(402): Homolog of NCBI NO: 18395507 NR Description: transducin / WD-40 repeat protein family
  misc_feature (51)..(402): Homolog of NCBI NO: 15240616 NR Description: transducin / WD-40 repeat protein family
  misc_feature (70)..(402): Homolog of NCBI NO: 15230244 NR Description: transducin / WD-40 repeat protein family
  misc_feature (64)..(403): Homolog of NCBI NO: 15220271 NR Description: transducin / WD-40 repeat protein family
  misc_feature (1)..(402): Homolog of NCBI NO: 15229740 NR Description: transducin / WD-40 repeat protein family
  misc_feature (63)..(426): Homolog of NCBI NO: 15225317 NR Description: transducin / WD-40 repeat protein family
  misc_feature (19)..(400): Homolog of NCBI NO: 15221675 NR Description: transducin / WD-40 repeat protein family
  misc_feature (28)..(424): Homolog of NCBI NO: 15231088 NR Description: transducin / WD-40 repeat protein family
  misc_feature (2)..(435): Homolog of NCBI NO: 34906600 NR Description: hypothetical protein~similar to Arabidopsis
  misc_feature (131)..(131): Xaa is any aa, unknown or other
MMAMPDADRNAMSAPLLPRPACLTASFSSSSSSFASFSSSNSSSSDPSPPSAFPPAGPCKALAVLRDHAGSVSSLSLCGEFLLSASTAGDVVAWQQPDLRRFARFGHGESGGSVKALAAAGGRVFSAHQDXRVRVWRVSRGRRSENAFKLVAALPTARDYLGRVFRQDSYVQTTATTAARRAHHRRLWIEHANSISCLAVAVHDAALLYSGSWDRTLKVWRVADLRCLESIRAHDDAVNAVAADAGIVYSASADGRVKAWEKGKASHFLQGVLVARDGVSWNALTVAADDRRLYAAGSDGHVAAWDRLGGRTAARWTLACDVRAHDAAVLCLCVARDLLCTGSADKTIGLWRRQSAGELAKVGVVRGHEGPVKCIQASWCRLTNGCMVYSGSLDKTIRVWWVPGALQHANDKDQQQQQQKDGFKDHKHKASLFLR

SEQ ID NO: 17684 - protein, 434 aa, Zea mays subsp. mays
  peptide (1)..(434): Ceres Seq. ID no. 13499247
  misc_feature (359)..(400): Pfam Name: WD domain, G-beta repeat Pfam Description: WD domain, G-beta repeat
  misc_feature (63)..(401): Homolog of NCBI NO: 15222143 NR Description: transducin / WD-40 repeat protein family
  misc_feature (20)..(401): Homolog of NCBI NO: 18395507 NR Description: transducin / WD-40 repeat protein family
  misc_feature (50)..(401): Homolog of NCBI NO: 15240616 NR Description: transducin / WD-40 repeat protein family
  misc_feature (69)..(401): Homolog of NCBI NO: 15230244 NR Description: transducin / WD-40 repeat protein family
  misc_feature (63)..(402): Homolog of NCBI NO: 15220271 NR Description: transducin / WD-40 repeat protein family
  misc_feature (1)..(401): Homolog of NCBI NO: 15229740 NR Description: transducin / WD-40 repeat protein family
  misc_feature (62)..(425): Homolog of NCBI NO: 15225317 NR Description: transducin / WD-40 repeat protein family
  misc_feature (18)..(399): Homolog of NCBI NO: 15221675 NR Description: transducin / WD-40 repeat protein family
  misc_feature (27)..(423): Homolog of NCBI NO: 15231088 NR Description: transducin / WD-40 repeat protein family
  misc_feature (1)..(434): Homolog of NCBI NO: 34906600 NR Description: hypothetical protein~similar to Arabidopsis
  misc_feature (130)..(130): Xaa is any aa, unknown or other
MAMPDADRNAMSAPLLPRPACLTASFSSSSSSFASFSSSNSSSSDPSPPSAFPPAGPCKALAVLRDHAGSVSSLSLCGEFLLSASTAGDVVAWQQPDLRRFARFGHGESGGSVKALAAAGGRVFSAHQDXRVRVWRVSRGRRSENAFKLVAALPTARDYLGRVFRQDSYVQTTATTAARRAHHRRLWIEHANSISCLAVAVHDAALLYSGSWDRTLKVWRVADLRCLESIRAHDDAVNAVAADAGIVYSASADGRVKAWEKGKASHFLQGVLVARDGVSWNALTVAADDRRLYAAGSDGHVAAWDRLGGRTAARWTLACDVRAHDAAVLCLCVARDLLCTGSADKTIGLWRRQSAGELAKVGVVRGHEGPVKCIQASWCRLTNGCMVYSGSLDKTIRVWWVPGALQHANDKDQQQQQQKDGFKDHKHKASLFLR

SEQ ID NO: 17685 - DNA, 1416 bp, Zea mays subsp. mays
  misc_feature (1)..(1416): Ceres Seq. ID no. 12390128
  misc_feature: MA Experiment ID: 20000477 Result: Down-regulated in Transcription
  misc_feature: MA Experiment 20000477 PARAMETER Experiment Name: Zm_5mM_SA_P Parameter: Age (day) Value: 10
  misc_feature: MA Experiment 20000477 PARAMETER Experiment Name: Zm_5mM_SA_P Parameter: Organism Value: Zea mays
  misc_feature: MA Experiment 20000477 PARAMETER Experiment Name: Zm_5mM_SA_P Parameter: Plant Line Value: 35A19
  misc_feature: MA Experiment 20000477 PARAMETER Experiment Name: Zm_5mM_SA_P Parameter: Timepoint (hr) Value: 48
  misc_feature: MA Experiment 20000477 PARAMETER Experiment Name: Zm_5mM_SA_P Parameter: Tissue Value: Aerial
  misc_feature: MA Experiment 20000477 PARAMETER Experiment Name: Zm_5mM_SA_P Parameter: Treatment Value: 5mM SA vs. No Treatment
  misc_feature: MA Experiment ID: 20000479 Result: Down-regulated in Transcription
  misc_feature: MA Experiment 20000479 PARAMETER Experiment Name: Zm_Drought_P Parameter: Age (day) Value: 10
  misc_feature: MA Experiment 20000479 PARAMETER Experiment Name: Zm_Drought_P Parameter: Organism Value: Zea mays
  misc_feature: MA Experiment 20000479 PARAMETER Experiment Name: Zm_Drought_P Parameter: Plant Line Value: 35A19
  misc_feature: MA Experiment 20000479 PARAMETER Experiment Name: Zm_Drought_P Parameter: Timepoint (hr) Value: 48
  misc_feature: MA Experiment 20000479 PARAMETER Experiment Name: Zm_Drought_P Parameter: Tissue Value: Aerial
  misc_feature: MA Experiment 20000479 PARAMETER Experiment Name: Zm_Drought_P Parameter: Treatment Value: Drought vs. No Drought
  misc_feature: MA Experiment ID: 20000535 Result: Up-regulated in Transcription
  misc_feature: MA Experiment 20000535 PARAMETER Experiment Name: Zm_Hybrid_Seed_Dev_P Parameter: DAP Value: 30 vs. 12
  misc_feature: MA Experiment 20000535 PARAMETER Experiment Name: Zm_Hybrid_Seed_Dev_P Parameter: Organism Value: Zea mays
  misc_feature: MA Experiment 20000535 PARAMETER Experiment Name: Zm_Hybrid_Seed_Dev_P Parameter: Plant Line Value: 35A19
  misc_feature: MA Experiment 20000535 PARAMETER Experiment Name: Zm_Hybrid_Seed_Dev_P Parameter: Tissue Value: Embryo vs. Unfert Floret
  misc_feature: MA Experiment ID: 20000632 Result: Down-regulated in Transcription
  misc_feature: MA Experiment 20000632 PARAMETER Experiment Name: Zm_Herbicide-Treatments_P Parameter: Timepoint (hr) Value: 4
  misc_feature: MA Experiment 20000632 PARAMETER Experiment Name: Zm_Herbicide-Treatments_P Parameter: Tissue Value: Aerial
  misc_feature: MA Experiment 20000632 PARAMETER Experiment Name: Zm_Herbicide-Treatments_P Parameter: Treatment Value: Glean vs. No Treatment
agcattttaacatcgtttgaagtaggaacctcacccagattcattgaaccgccagctctgccatcttatccttgccacgtgaagtgacgttcttggcgaccccatcaatctcctcgatttggatgtccacgagcttattgagctgttgctcctgcgtcctgagatcctctggctgctgctcaacagtttgttcatcctcatccccaatctcatgtgtccaatacacagcaaaagatgcctccttattgaaactggttggcatctgcaacagacgcttcctgttagttccagaggcactgccaaggatctcccccttcatgaggtcatatatgcaggccctgaagttgtccatgctcttatgatcctgagagtcgaggcttaggaagatcagaatttcccagcaccggaggaactgtttcttctttatcttcagcttctaacgaacagtctccatcaggtcagccggtggaaccattctcaaactttgggccctttttgacaggttggtctccttcagagacgagacaatagcaccaagtgcaggtttgatcggatcaaacatgagcaaacggaggcagtcaacggatgatctcacatactgcaggtcaagaagcggaaggcgcgggtgcctctcgacgtcgccgacgccgtgatggagccagtacggcggtccggccggctcgccaacctcccggataagcccgtgtaccgcgagaaggttcccgattttgggatgaagattaggaggacgtacggatcggtgagaagagatctgaccaaccgggtgtacgcgaccgacgatgcgaggagctacgccatctctaaggcggaggatctggagcaagagctggactccagcttccccatcttcatcaagcccatgacccagtcccatgtcaccgggggcttctggctgggccttccgattcatttctgccggaagtatctgcccaagcgtgacgagatgatcaccctggtggatgaggatgatgacgagtccgacacgctgtacctcgcaatgaagcgggggctcagtgctggatggagagggtttgccgtccagcagaagctggtggatggagattgcctggtcttccagctgattgagcaaacaaagttcaaggtctacataactagagcaagttcctactacgaaagcgaggactgatgaaactagtagcttgtaatctggtgattggagctcagttatggaggtggctgcgttggacaagcttgcatctgggaatcgctggggtgtcttgaaactttttggtggcagaaagttagctgatgtatgaaacccagtatctcctaccaattgttgctgatttgtgtacttcttgggcttaccacttgcacggttcagaaacctgcactatgtaagggggttgttggtggcagctaacctcgttttgt

SEQ ID NO: 17686 - protein, 171 aa, Zea mays subsp. mays; identical to SEQ ID NO: 10745
  peptide (1)..(171): Ceres Seq. ID no. 12390129
  misc_feature (73)..(164): Pfam Name: B3 DNA binding domain Pfam Description: B3 DNA binding domain
  misc_feature (31)..(88): Homolog of NCBI NO: 10177273 NR Description: gene_id:MJB21.7~unknown protein [Arabidopsis
  misc_feature (55)..(151): Homolog of NCBI NO: 34904376 NR Description: unnamed protein product [Oryza sativa (japonica
  misc_feature (1)..(164): Homolog of NCBI NO: 15237157 NR Description: unknown protein; protein id: At5g58280.1
  misc_feature (31)..(169): Homolog of NCBI NO: 30694114 NR Description: expressed protein [Arabidopsis thaliana]
  misc_feature (1)..(164): Homolog of NCBI NO: 15217278 NR Description: Unknown protein [Oryza sativa]
  misc_feature (1)..(164): Homolog of NCBI NO: 9294620 NR Description: gene_id:MVI11.9~unknown protein [Arabidopsis

SEQ ID NO: 17687 - protein, 144 aa, Zea mays subsp. mays; identical to SEQ ID NO: 10746
  peptide (1)..(144): Ceres Seq. ID no. 12390130
  misc_feature (46)..(137): Pfam Name: B3 DNA binding domain Pfam Description: B3 DNA binding domain
  misc_feature (4)..(61): Homolog of NCBI NO: 10177273 NR Description: gene_id:MJB21.7~unknown protein [Arabidopsis
  misc_feature (28)..(124): Homolog of NCBI NO: 34904376 NR Description: unnamed protein product [Oryza sativa (japonica
  misc_feature (1)..(137): Homolog of NCBI NO: 15237157 NR Description: unknown protein; protein id: At5g58280.1
  misc_feature (4)..(142): Homolog of NCBI NO: 30694114 NR Description: expressed protein [Arabidopsis thaliana]
  misc_feature (1)..(137): Homolog of NCBI NO: 15217278 NR Description: Unknown protein [Oryza sativa]
  misc_feature (1)..(137): Homolog of NCBI NO: 9294620 NR Description: gene_id:MVI11.9~unknown protein [Arabidopsis

SEQ ID NO: 17688 - protein, 95 aa, Zea mays subsp. mays
  peptide (1)..(95): Ceres Seq. ID no. 12390131
  misc_feature (1)..(88): Pfam Name: B3 DNA binding domain Pfam Description: B3 DNA binding domain
  misc_feature (1)..(12): Homolog of NCBI NO: 10177273 NR Description: gene_id:MJB21.7~unknown protein [Arabidopsis
  misc_feature (1)..(75): Homolog of NCBI NO: 34904376 NR Description: unnamed protein product [Oryza sativa (japonica
  misc_feature (1)..(88): Homolog of NCBI NO: 15237157 NR Description: unknown protein; protein id: At5g58280.1
  misc_feature (1)..(93): Homolog of NCBI NO: 30694114 NR Description: expressed protein [Arabidopsis thaliana]
  misc_feature (1)..(88): Homolog of NCBI NO: 15217278 NR Description: Unknown protein [Oryza sativa]
  misc_feature (1)..(88): Homolog of NCBI NO: 9294620 NR Description: gene_id:MVI11.9~unknown protein [Arabidopsis
MTQSHVTGGFWLGLPIHFCRKYLPKRDEMITLVDEDDDESDTLYLAMKRGLSAGWRGFAVQQKLVDGDCLVFQLIEQTKFKVYITRASSYYESED

SEQ ID NO: 17689 - DNA, 1955 bp, Zea mays subsp. mays
  misc_feature (1)..(1955): Ceres Seq. ID no. 12363415
  misc_feature: MA Experiment ID: 108527 Result: Down-regulated in Transcription
  misc_feature: MA Experiment 108527 PARAMETER Experiment Name: Zm_5mM_NO_P Parameter: Age (day) Value: 8
  misc_feature: MA Experiment 108527 PARAMETER Experiment Name: Zm_5mM_NO_P Parameter: Organism Value: Zea mays
  misc_feature: MA Experiment 108527 PARAMETER Experiment Name: Zm_5mM_NO_P Parameter: Plant Line Value: 35A19
  misc_feature: MA Experiment 108527 PARAMETER Experiment Name: Zm_5mM_NO_P Parameter: Timepoint (hr) Value: 6
  misc_feature: MA Experiment 108527 PARAMETER Experiment Name: Zm_5mM_NO_P Parameter: Tissue Value: Aerial
  misc_feature: MA Experiment 108527 PARAMETER Experiment Name: Zm_5mM_NO_P Parameter: Treatment Value: 5mM NO vs. No Treatment
  misc_feature: MA Experiment ID: 108528 Result: Up-regulated in Transcription
  misc_feature: MA Experiment 108528 PARAMETER Experiment Name: Zm_Imbibed_Seeds_P Parameter: Age (day) Value: 5 vs. 2
  misc_feature: MA Experiment 108528 PARAMETER Experiment Name: Zm_Imbibed_Seeds_P Parameter: Organism Value: Zea mays
  misc_feature: MA Experiment 108528 PARAMETER Experiment Name: Zm_Imbibed_Seeds_P Parameter: Plant Line Value: 35A19
  misc_feature: MA Experiment 108528 PARAMETER Experiment Name: Zm_Imbibed_Seeds_P Parameter: Tissue Value: Aerial vs. Embryo
  misc_feature: MA Experiment ID: 108530 Result: Up-regulated in Transcription
  misc_feature: MA Experiment 108530 PARAMETER Experiment Name: Zm_Imbibed_Seeds_P Parameter: Age (day) Value: 6 vs. 2
  misc_feature: MA Experiment 108530 PARAMETER Experiment Name: Zm_Imbibed_Seeds_P Parameter: Organism Value: Zea mays
  misc_feature: MA Experiment 108530 PARAMETER Experiment Name: Zm_Imbibed_Seeds_P Parameter: Plant Line Value: 35A19
  misc_feature: MA Experiment 108530 PARAMETER Experiment Name: Zm_Imbibed_Seeds_P Parameter: Tissue Value: Aerial vs. Embryo
  misc_feature: MA Experiment ID: 108547 Result: Up-regulated in Transcription
  misc_feature: MA Experiment 108547 PARAMETER Experiment Name: Zm_Imbibed_Seeds_P Parameter: Age (day) Value: 4 vs. 2
  misc_feature: MA Experiment 108547 PARAMETER Experiment Name: Zm_Imbibed_Seeds_P Parameter: Organism Value: Zea mays
  misc_feature: MA Experiment 108547 PARAMETER Experiment Name: Zm_Imbibed_Seeds_P Parameter: Plant Line Value: 35A19
  misc_feature: MA Experiment 108547 PARAMETER Experiment Name: Zm_Imbibed_Seeds_P Parameter: Tissue Value: Aerial vs. Embryo
  misc_feature: MA Experiment ID: 20000532 Result: Up-regulated in Transcription
  misc_feature: MA Experiment 20000532 PARAMETER Experiment Name: Zm_0.001percent_MeJA_P Parameter: Age (day) Value: 10
  misc_feature: MA Experiment 20000532 PARAMETER Experiment Name: Zm_0.001percent_MeJA_P Parameter: Organism Value: Zea mays
  misc_feature: MA Experiment 20000532 PARAMETER Experiment Name: Zm_0.001percent_MeJA_P Parameter: Plant Line Value: 35A19
  misc_feature: MA Experiment 20000532 PARAMETER Experiment Name: Zm_0.001percent_MeJA_P Parameter: Timepoint (hr) Value: 48
  misc_feature: MA Experiment 20000532 PARAMETER Experiment Name: Zm_0.001percent_MeJA_P Parameter: Tissue Value: Aerial
  misc_feature: MA Experiment 20000532 PARAMETER Experiment Name: Zm_0.001percent_MeJA_P Parameter: Treatment Value: 0.001percent MeJA vs. No Treatment
  misc_feature: MA Experiment ID: 20000533 Result: Up-regulated in Transcription
  misc_feature: MA Experiment 20000533 PARAMETER Experiment Name: Zm_0.001percent_MeJA_P Parameter: Age (day) Value: 11
  misc_feature: MA Experiment 20000533 PARAMETER Experiment Name: Zm_0.001percent_MeJA_P Parameter: Organism Value: Zea mays
  misc_feature: MA Experiment 20000533 PARAMETER Experiment Name: Zm_0.001percent_MeJA_P Parameter: Plant Line Value: 35A19
  misc_feature: MA Experiment 20000533 PARAMETER Experiment Name: Zm_0.001percent_MeJA_P Parameter: Timepoint (hr) Value: 72
  misc_feature: MA Experiment 20000533 PARAMETER Experiment Name: Zm_0.001percent_MeJA_P Parameter: Tissue Value: Aerial
  misc_feature: MA Experiment 20000533 PARAMETER Experiment Name: Zm_0.001percent_MeJA_P Parameter: Treatment Value: 0.001percent MeJA vs. No Treatment
ggcgaatccctgactttcttctccacgccgtgctctgcttcgagtgaggcctggttcagattttacaggggttcggttcgatctggtgtccgacggaggcggcggcggcggctcctctgctgttcgattgagggagaggggccatggaaaacccggcgccgccgaccaacccggcctccgccacgccgtcgccgtcgcggcagctgccggacttccagcagtcggttcgtctcaagtacgtgaagctggggtaccattacctcatcacccacggcatgtacctgctgctcaccccgctgatggtgctcgtggccgtgtacctctccacgctctccccgcgcgacgtcgccgacctgtgggcccacctccgcctcaacctcatctccgtgctggcctgctccacgctcctcgtcttcctcggcacggcctacttcctcacccgcccgcggcccgtgtacctggtcgacttcgcctgctacaagcccgggccggagcgtcggtgcacgcgcgacaccttcatgcgctgctccaggctcaccggctgcttcactgacgccagcctcgagttccagcgcaagatcctggagcgctcggggctgggcgaggacacgtaccttccccccgccgtcacgcgggtgccgcccaacccgtccatggacgaggcgcgcgcggaggcgcgggaggtcatgttcggcgccgtcgacgagctgctcgccaagacgggggtcaagcccaaggacatcgggatcctcgtggtgaactgcagcctgttcaacccgacgccgtcgctgtcggccatggtggtcaaccactacaagctgcgcgggaacgtggtgagctacaacctcggcgggatggggtgcagcgccgggctgctgtccgtggacctcgccaaggacctgctgcagacgcacccggggtcgtacgcgctggtcatcagcacggagaacatcacgctcaactggtactcggggaacgaccgctccaagctggtgtccaactgcctgttccggatgggcggcgccgcggtgctgctctcgaatcggcggtccgaccggcggcgggccaagtacgagctggtgcacacggtgcgcacgcacaagggcgcggacgaccggtgcttcggctgcgtgacgcaggaggaggacggcgagggcgtcgtgggcgtgtcgctgtcgagggacctgatggcggtggcgggcgacgcgctcaagacgaacataacaacgctgggcccgctggtgctgccgctgtcggagcagctgctgttcatggcgacgctggtcgccaagaagctgctcaagatgaagaaggtgaagccgtacatcccggatttcaaactggcgttcgagcacttctgcatccacgccggcggccgtgccgtgctggacgagctggagagcaacctggcgctcacggattggcacatggagccgtcgcggatgatgctgcaccggttcgggaacacgtccagcagctcgctctggtacgagctggcctacagcgaggccaaggggaggatccggcgccgccaccgggtgtggcagatcgcgttcgggtcagggttcaagtgcaacagcgccgtgtggagggcgctccggtcggtgaacccggcggaggagacgaacccgtggatggacgagatcgacaggtttcccgtggatgttcccaaggtctctaaggtttcaagcgactgaaatgcattgctagttgcgtgaatgatggagcttgcaattgtttggatagaagatctggttggaatttttcatagttcattactatatagttgtaggagataggaaaggcgatcgacttctctaatcttgaattatacatctgttaatgttgtttctgtatggcactcggtccctggcctatctatatagttgactgctcggtgttctgacagttctactatatctgttcattctccaactgttgatcactgttcttcc

SEQ ID NO: 17690 - protein, 517 aa, Zea mays subsp. mays
  peptide (1)..(517): Ceres Seq. ID no. 12363416
  misc_feature (342)..(486): Pfam Name: Chalcone and stilbene synthases, C-terminal domain Pfam Description: Chalcone and stilbene synthases, C-terminal
  misc_feature (16)..(509): Homolog of NCBI NO: 19908404 NR Description: putative fatty acid elongase [Tropaeolum majus]
  misc_feature (18)..(516): Homolog of NCBI NO: 18377979 NR Description: putative beta-ketoacyl-CoA synthase [Arabidopsis
  misc_feature (18)..(516): Homolog of NCBI NO: 15219676 NR Description: putative beta-ketoacyl-CoA synthase; protein id:
  misc_feature (3)..(516): Homolog of NCBI NO: 1045614 NR Description: beta-ketoacyl-CoA synthase
  misc_feature (7)..(516): Homolog of NCBI NO: 15239981 NR Description: beta-ketoacyl-CoA synthase
  misc_feature (7)..(516): Homolog of NCBI NO: 14334714 NR Description: putative beta-ketoacyl-CoA synthase [Arabidopsis
  misc_feature (7)..(508): Homolog of NCBI NO: 11066477 NR Description: fatty acid elongase 1-like protein [Limnanthes
  misc_feature (1)..(509): Homolog of NCBI NO: 29417540 NR Description: beta-ketoacyl-CoA-synthase [Marchantia polymorpha]
  misc_feature (16)..(514): Homolog of NCBI NO: 15225767 NR Description: putative beta-ketoacyl-CoA synthase; protein id:
  misc_feature (1)..(514): Homolog of NCBI NO: 9714501 NR Description: putative fatty acid elongase [Zea mays]
MENPAPPTNPASATPSPSRQLPDFQQSVRLKYVKLGYHYLITHGMYLLLTPLMVLVAVYLSTLSPRDVADLWAHLRLNLISVLACSTLLVFLGTAYFLTRPRPVYLVDFACYKPGPERRCTRDTFMRCSRLTGCFTDASLEFQRKILERSGLGEDTYLPPAVTRVPPNPSMDEARAEAREVMFGAVDELLAKTGVKPKDIGILVVNCSLFNPTPSLSAMVVNHYKLRGNVVSYNLGGMGCSAGLLSVDLAKDLLQTHPGSYALVISTENITLNWYSGNDRSKLVSNCLFRMGGAAVLLSNRRSDRRRAKYELVHTVRTHKGADDRCFGCVTQEEDGEGVVGVSLSRDLMAVAGDALKTNITTLGPLVLPLSEQLLFMATLVAKKLLKMKKVKPYIPDFKLAFEHFCIHAGGRAVLDELESNLALTDWHMEPSRMMLHRFGNTSSSSLWYELAYSEAKGRIRRRHRVWQIAFGSGFKCNSAVWRALRSVNPAEETNPWMDEIDRFPVDVPKVSKVSSD

SEQ ID NO: 17691 - protein, 473 aa, Zea mays subsp. mays
  peptide (1)..(473): Ceres Seq. ID no. 12363417
  misc_feature (298)..(442): Pfam Name: Chalcone and stilbene synthases, C-terminal domain Pfam Description: Chalcone and stilbene synthases, C-terminal
  misc_feature (1)..(465): Homolog of NCBI NO: 19908404 NR Description: putative fatty acid elongase [Tropaeolum majus]
  misc_feature (1)..(472): Homolog of NCBI NO: 18377979 NR Description: putative beta-ketoacyl-CoA synthase [Arabidopsis
  misc_feature (1)..(472): Homolog of NCBI NO: 15219676 NR Description: putative beta-ketoacyl-CoA synthase; protein id:
  misc_feature (1)..(472): Homolog of NCBI NO: 1045614 NR Description: beta-ketoacyl-CoA synthase
  misc_feature (1)..(472): Homolog of NCBI NO: 15239981 NR Description: beta-ketoacyl-CoA synthase
  misc_feature (1)..(472): Homolog of NCBI NO: 14334714 NR Description: putative beta-ketoacyl-CoA synthase [Arabidopsis
  misc_feature (1)..(464): Homolog of NCBI NO: 11066477 NR Description: fatty acid elongase 1-like protein [Limnanthes
  misc_feature (1)..(465): Homolog of NCBI NO: 29417540 NR Description: beta-ketoacyl-CoA-synthase [Marchantia polymorpha]
  misc_feature (1)..(470): Homolog of NCBI NO: 15225767 NR Description: putative beta-ketoacyl-CoA synthase; protein id:
  misc_feature (1)..(470): Homolog of NCBI NO: 9714501 NR Description: putative fatty acid elongase [Zea mays]
MYLLLTPLMVLVAVYLSTLSPRDVADLWAHLRLNLISVLACSTLLVFLGTAYFLTRPRPVYLVDFACYKPGPERRCTRDTFMRCSRLTGCFTDASLEFQRKILERSGLGEDTYLPPAVTRVPPNPSMDEARAEAREVMFGAVDELLAKTGVKPKDIGILVVNCSLFNPTPSLSAMVVNHYKLRGNVVSYNLGGMGCSAGLLSVDLAKDLLQTHPGSYALVISTENITLNWYSGNDRSKLVSNCLFRMGGAAVLLSNRRSDRRRAKYELVHTVRTHKGADDRCFGCVTQEEDGEGVVGVSLSRDLMAVAGDALKTNITTLGPLVLPLSEQLLFMATLVAKKLLKMKKVKPYIPDFKLAFEHFCIHAGGRAVLDELESNLALTDWHMEPSRMMLHRFGNTSSSSLWYELAYSEAKGRIRRRHRVWQIAFGSGFKCNSAVWRALRSVNPAEETNPWMDEIDRFPVDVPKVSKVSSD

SEQ ID NO: 17692 - protein, 465 aa, Zea mays subsp. mays
  peptide (1)..(465): Ceres Seq. ID no. 12363418
  misc_feature (290)..(434): Pfam Name: Chalcone and stilbene synthases, C-terminal domain Pfam Description: Chalcone and stilbene synthases, C-terminal
  misc_feature (1)..(464): Homolog of NCBI NO: 14334714 NR Description: putative beta-ketoacyl-CoA synthase [Arabidopsis
  misc_feature (1)..(456): Homolog of NCBI NO: 11066477 NR Description: fatty acid elongase 1-like protein [Limnanthes
  misc_feature (1)..(457): Homolog of NCBI NO: 29417540 NR Description: beta-ketoacyl-CoA-synthase [Marchantia polymorpha]
  misc_feature (1)..(464): Homolog of NCBI NO: 18377979 NR Description: putative beta-ketoacyl-CoA synthase [Arabidopsis
  misc_feature (1)..(464): Homolog of NCBI NO: 1045614 NR Description: beta-ketoacyl-CoA synthase
  misc_feature (1)..(464): Homolog of NCBI NO: 15239981 NR Description: beta-ketoacyl-CoA synthase
  misc_feature (1)..(464): Homolog of NCBI NO: 15219676 NR Description: putative beta-ketoacyl-CoA synthase; protein id:
  misc_feature (1)..(457): Homolog of NCBI NO: 19908404 NR Description: putative fatty acid elongase [Tropaeolum majus]
  misc_feature (1)..(462): Homolog of NCBI NO: 15225767 NR Description: putative beta-ketoacyl-CoA synthase; protein id:
  misc_feature (1)..(462): Homolog of NCBI NO: 9714501 NR Description: putative fatty acid elongase [Zea mays]
MVLVAVYLSTLSPRDVADLWAHLRLNLISVLACSTLLVFLGTAYFLTRPRPVYLVDFACYKPGPERRCTRDTFMRCSRLTGCFTDASLEFQRKILERSGLGEDTYLPPAVTRVPPNPSMDEARAEAREVMFGAVDELLAKTGVKPKDIGILVVNCSLFNPTPSLSAMVVNHYKLRGNVVSYNLGGMGCSAGLLSVDLAKDLLQTHPGSYALVISTENITLNWYSGNDRSKLVSNCLFRMGGAAVLLSNRRSDRRRAKYELVHTVRTHKGADDRCFGCVTQEEDGEGVVGVSLSRDLMAVAGDALKTNITTLGPLVLPLSEQLLFMATLVAKKLLKMKKVKPYIPDFKLAFEHFCIHAGGRAVLDELESNLALTDWHMEPSRMMLHRFGNTSSSSLWYELAYSEAKGRIRRRHRVWQIAFGSGFKCNSAVWRALRSVNPAEETNPWMDEIDRFPVDVPKVSKVSSD

SEQ ID NO: 17693 - DNA, 1561 bp, Zea mays subsp. mays; identical to SEQ ID NO: 5062
  misc_feature (1)..(1561): Ceres Seq. ID no. 13494774
  misc_feature: MA Experiment ID: 108529 Result: Up-regulated in Transcription
  misc_feature: MA Experiment 108529 PARAMETER Experiment Name: Zm_Imbibed_Seeds_P Parameter: Age (day) Value: 5 vs. 2
  misc_feature: MA Experiment 108529 PARAMETER Experiment Name: Zm_Imbibed_Seeds_P Parameter: Organism Value: Zea mays
  misc_feature: MA Experiment 108529 PARAMETER Experiment Name: Zm_Imbibed_Seeds_P Parameter: Plant Line Value: 35A19
  misc_feature: MA Experiment 108529 PARAMETER Experiment Name: Zm_Imbibed_Seeds_P Parameter: Tissue Value: Roots vs. Embryo
  misc_feature: MA Experiment ID: 108556 Result: Down-regulated in Transcription
  misc_feature: MA Experiment 108556 PARAMETER Experiment Name: Zm_Drought_P Parameter: Age (day) Value: 9
  misc_feature: MA Experiment 108556 PARAMETER Experiment Name: Zm_Drought_P Parameter: Organism Value: Zea mays
  misc_feature: MA Experiment 108556 PARAMETER Experiment Name: Zm_Drought_P Parameter: Plant Line Value: 35A19
  misc_feature: MA Experiment 108556 PARAMETER Experiment Name: Zm_Drought_P Parameter: Timepoint (hr) Value: 24
  misc_feature: MA Experiment 108556 PARAMETER Experiment Name: Zm_Drought_P Parameter: Tissue Value: Aerial
  misc_feature: MA Experiment 108556 PARAMETER Experiment Name: Zm_Drought_P Parameter: Treatment Value: Drought vs. No Drought
  misc_feature: MA Experiment ID: 20000480 Result: Down-regulated in Transcription
  misc_feature: MA Experiment 20000480 PARAMETER Experiment Name: Zm_Drought_P Parameter: Age (day) Value: 11
  misc_feature: MA Experiment 20000480 PARAMETER Experiment Name: Zm_Drought_P Parameter: Organism Value: Zea mays
  misc_feature: MA Experiment 20000480 PARAMETER Experiment Name: Zm_Drought_P Parameter: Plant Line Value: 35A19
  misc_feature: MA Experiment 20000480 PARAMETER Experiment Name: Zm_Drought_P Parameter: Timepoint (hr) Value: 72
  misc_feature: MA Experiment 20000480 PARAMETER Experiment Name: Zm_Drought_P Parameter: Tissue Value: Aerial
  misc_feature: MA Experiment 20000480 PARAMETER Experiment Name: Zm_Drought_P Parameter: Treatment Value: Drought vs. No Drought
  misc_feature: MA Experiment ID: 20000492 Result: Down-regulated in Transcription
  misc_feature: MA Experiment 20000492 PARAMETER Experiment Name: Zm_Hybrid_Seed_Dev_P Parameter: DAP Value: 12
  misc_feature: MA Experiment 20000492 PARAMETER Experiment Name: Zm_Hybrid_Seed_Dev_P Parameter: Organism Value: Zea mays
  misc_feature: MA Experiment 20000492 PARAMETER Experiment Name: Zm_Hybrid_Seed_Dev_P Parameter: Plant Line Value: 35A19
  misc_feature: MA Experiment 20000492 PARAMETER Experiment Name: Zm_Hybrid_Seed_Dev_P Parameter: Tissue Value: Fert Kernel vs. Unfert Floret
  misc_feature: MA Experiment ID: 20000535 Result: Down-regulated in Transcription
  misc_feature: MA Experiment 20000535 PARAMETER Experiment Name: Zm_Hybrid_Seed_Dev_P Parameter: DAP Value: 30 vs. 12
  misc_feature: MA Experiment 20000535 PARAMETER Experiment Name: Zm_Hybrid_Seed_Dev_P Parameter: Organism Value: Zea mays
  misc_feature: MA Experiment 20000535 PARAMETER Experiment Name: Zm_Hybrid_Seed_Dev_P Parameter: Plant Line Value: 35A19
  misc_feature: MA Experiment 20000535 PARAMETER Experiment Name: Zm_Hybrid_Seed_Dev_P Parameter: Tissue Value: Embryo vs. Unfert Floret

SEQ ID NO: 17694 - protein, 382 aa, Zea mays subsp. mays; identical to SEQ ID NO: 5063
  peptide (1)..(382): Ceres Seq. ID no. 13494775
  misc_feature (40)..(368): Pfam Name: GDSL-like Lipase/Acylhydrolase Pfam Description: GDSL-like Lipase/Acylhydrolase
  misc_feature (14)..(381): Homolog of NCBI NO: 34903958 NR Description: OSJNBa0038J17.24 [Oryza sativa (japonica >gi|7523510|dbj|BAA94238.1| unnamed protein product [Oryza sativa
  misc_feature (1)..(379): Homolog of NCBI NO: 34903956 NR Description: OSJNBa0038J17.23 [Oryza sativa (japonica >gi|7523511|dbj|BAA94239.1| unnamed protein product [Oryza sativa
  misc_feature (4)..(379): Homolog of NCBI NO: 34903994 NR Description: unnamed protein product [Oryza sativa (japonica group)] >gi|7523492|dbj|BAA94220.1| unnamed protein product
  misc_feature (32)..(379): Homolog of NCBI NO: 34903986 NR Description: unnamed protein product [Oryza sativa (japonica group)] >gi|7523496|dbj|BAA94224.1| unnamed protein product
  misc_feature (36)..(373): Homolog of NCBI NO: 15242538 NR Description: GDSL-motif lipase/hydrolase protein [Arabidopsis
  misc_feature (36)..(373): Homolog of NCBI NO: 21553708 NR Description: GDSL-motif lipase/hydrolase-like protein
  misc_feature (32)..(382): Homolog of NCBI NO: 34903970 NR Description: OSJNBa0038J17.30 [Oryza sativa (japonica >gi|7523504|dbj|BAA94232.1| unnamed protein product [Oryza sativa
  misc_feature (2)..(382): Homolog of NCBI NO: 34911800 NR Description: lipase-like protein [Oryza sativa (japonica
  misc_feature (1)..(377): Homolog of NCBI NO: 10764858 NR Description: F1K23.17 [Arabidopsis thaliana]
  misc_feature (28)..(381): Homolog of NCBI NO: 10764858 NR Description: F1K23.17 [Arabidopsis thaliana]

SEQ ID NO: 17695 - protein, 376 aa, Zea mays subsp. mays; identical to SEQ ID NO: 5064
  peptide (1)..(376): Ceres Seq. ID no. 13494776
  misc_feature (34)..(362): Pfam Name: GDSL-like Lipase/Acylhydrolase Pfam Description: GDSL-like Lipase/Acylhydrolase
  misc_feature (1)..(376): Homolog of NCBI NO: 34911800 NR Description: lipase-like protein [Oryza sativa (japonica
  misc_feature (1)..(371): Homolog of NCBI NO: 10764858 NR Description: F1K23.17 [Arabidopsis thaliana]
  misc_feature (1)..(373): Homolog of NCBI NO: 34903956 NR Description: OSJNBa0038J17.23 [Oryza sativa (japonica >gi|7523511|dbj|BAA94239.1| unnamed protein product [Oryza sativa
  misc_feature (26)..(373): Homolog of NCBI NO: 34903986 NR Description: unnamed protein product [Oryza sativa (japonica group)] >gi|7523496|dbj|BAA94224.1| unnamed protein product
  misc_feature (30)..(367): Homolog of NCBI NO: 21553708 NR Description: GDSL-motif lipase/hydrolase-like protein
  misc_feature (26)..(376): Homolog of NCBI NO: 34903970 NR Description: OSJNBa0038J17.30 [Oryza sativa (japonica >gi|7523504|dbj|BAA94232.1| unnamed protein product [Oryza sativa
  misc_feature (30)..(367): Homolog of NCBI NO: 15242538 NR Description: GDSL-motif lipase/hydrolase protein [Arabidopsis
  misc_feature (1)..(373): Homolog of NCBI NO: 34903994 NR Description: unnamed protein product [Oryza sativa (japonica group)] >gi|7523492|dbj|BAA94220.1| unnamed protein product
  misc_feature (8)..(375): Homolog of NCBI NO: 34903958 NR Description: OSJNBa0038J17.24 [Oryza sativa (japonica >gi|7523510|dbj|BAA94238.1| unnamed protein product [Oryza sativa
  misc_feature (22)..(375): Homolog of NCBI NO: 10764858 NR Description: F1K23.17 [Arabidopsis thaliana]

SEQ ID NO: 17696 - protein, 238 aa, Zea mays subsp. mays; identical to SEQ ID NO: 5065
  peptide (1)..(238): Ceres Seq. ID no. 13494777
  misc_feature (1)..(224): Pfam Name: GDSL-like Lipase/Acylhydrolase Pfam Description: GDSL-like Lipase/Acylhydrolase
  misc_feature (1)..(237): Homolog of NCBI NO: 34903958 NR Description: OSJNBa0038J17.24 [Oryza sativa (japonica >gi|7523510|dbj|BAA94238.1| unnamed protein product [Oryza sativa
  misc_feature (1)..(235): Homolog of NCBI NO: 34903956 NR Description: OSJNBa0038J17.23 [Oryza sativa (japonica >gi|7523511|dbj|BAA94239.1| unnamed protein product [Oryza sativa
  misc_feature (1)..(235): Homolog of NCBI NO: 34903994 NR Description: unnamed protein product [Oryza sativa (japonica group)] >gi|7523492|dbj|BAA94220.1| unnamed protein product
  misc_feature (1)..(235): Homolog of NCBI NO: 34903986 NR Description: unnamed protein product [Oryza sativa (japonica group)] >gi|7523496|dbj|BAA94224.1| unnamed protein product
  misc_feature (1)..(229): Homolog of NCBI NO: 15242538 NR Description: GDSL-motif lipase/hydrolase protein [Arabidopsis
  misc_feature (1)..(229): Homolog of NCBI NO: 21553708 NR Description: GDSL-motif lipase/hydrolase-like protein
  misc_feature (1)..(238): Homolog of NCBI NO: 34903970 NR Description: OSJNBa0038J17.30 [Oryza sativa (japonica >gi|7523504|dbj|BAA94232.1| unnamed protein product [Oryza sativa
  misc_feature (1)..(238): Homolog of NCBI NO: 34911800 NR Description: lipase-like protein [Oryza sativa (japonica
  misc_feature (1)..(233): Homolog of NCBI NO: 10764858 NR Description: F1K23.17 [Arabidopsis thaliana]
  misc_feature (1)..(237): Homolog of NCBI NO: 10764858 NR Description: F1K23.17 [Arabidopsis thaliana]

SEQ ID NO: 17697 - DNA, 1035 bp, Zea mays subsp. mays
  misc_feature (1)..(1035): Ceres Seq. ID no. 12364643
  misc_feature: MA Experiment ID: 108523 Result: Up-regulated in Transcription
  misc_feature: MA Experiment 108523 PARAMETER Experiment Name: Zm_42deg_Heat_P Parameter: Age (day) Value: 8
  misc_feature: MA Experiment 108523 PARAMETER Experiment Name: Zm_42deg_Heat_P Parameter: Organism Value: Zea mays
  misc_feature: MA Experiment 108523 PARAMETER Experiment Name: Zm_42deg_Heat_P Parameter: Plant Line Value: 35A19
  misc_feature: MA Experiment 108523 PARAMETER Experiment Name: Zm_42deg_Heat_P Parameter: Temperature (deg C) Value: 42 vs. 22
  misc_feature: MA Experiment 108523 PARAMETER Experiment Name: Zm_42deg_Heat_P Parameter: Timepoint (hr) Value: 6
  misc_feature: MA Experiment 108523 PARAMETER Experiment Name: Zm_42deg_Heat_P Parameter: Tissue Value: Aerial
  misc_feature: MA Experiment ID: 20000492 Result: Up-regulated in Transcription
  misc_feature: MA Experiment 20000492 PARAMETER Experiment Name: Zm_Hybrid_Seed_Dev_P Parameter: DAP Value: 12
  misc_feature: MA Experiment 20000492 PARAMETER Experiment Name: Zm_Hybrid_Seed_Dev_P Parameter: Organism Value: Zea mays
  misc_feature: MA Experiment 20000492 PARAMETER Experiment Name: Zm_Hybrid_Seed_Dev_P Parameter: Plant Line Value: 35A19
  misc_feature: MA Experiment 20000492 PARAMETER Experiment Name: Zm_Hybrid_Seed_Dev_P Parameter: Tissue Value: Fert Kernel vs. Unfert Floret
  misc_feature: MA Experiment ID: 20000535 Result: Up-regulated in Transcription
  misc_feature: MA Experiment 20000535 PARAMETER Experiment Name: Zm_Hybrid_Seed_Dev_P Parameter: DAP Value: 30 vs. 12
  misc_feature: MA Experiment 20000535 PARAMETER Experiment Name: Zm_Hybrid_Seed_Dev_P Parameter: Organism Value: Zea mays
  misc_feature: MA Experiment 20000535 PARAMETER Experiment Name: Zm_Hybrid_Seed_Dev_P Parameter: Plant Line Value: 35A19
  misc_feature: MA Experiment 20000535 PARAMETER Experiment Name: Zm_Hybrid_Seed_Dev_P Parameter: Tissue Value: Embryo vs. Unfert Floret
tacctacaacatcctaatcaaaagagagagaaagttctcgagctagacgagcgccgtgcgaggagagaagcgagatgagcggtgaggcggcggccgtgggcggaggcgaaggagaggcgaatggcatcccgccgaacgtcaccatctatatcaacaacctcaacgagaagatcaagctcgaagaacttaagaagtccctaacagccgttttttcccagtttgggaaaattcttgatgtgcttgctttcaagactttgaagcataaaggtcaagcttgggttgtcttcgaagatgtcgcatcagctactgaggctctgaagaggatgcagggctttcccttctatgacaaaactatgagaattcaatatgccaagaccaaatcagatattatagcaaaggctgatggcacctttgtacctcgagaaagaagaaagaggactgatgaaaaatctgaaaagaagcagaagcgcgagcatcaccatgatgctggtgctagtcaaattggcatgggtgtaactgcttaccctggtgtttatggggctccacagctcacccagatacctatagcaggaggacaaagggtcatgatgccagagattatcgtaccaaacaacatcttgtttgtccaaaacttgccacacgagacgacgcccatgatgctccagatgctcttctgccagtaccctggcttcaaggaggttcggatgatcgaggcgaagcctgggattgctttcgtggagtatggagacgagacccaggtcactgctgccatgaacaaccttcaaagcttcaaaattacaaaagaaaaccagatggtcatcacatatgcgaagaagtaatgagctcccgagcaatgtttacctgatgtgtgagatgttgtattccgagttttacacaactggtaaatttccttcatgtgttaggtagacagcatcctgaacaacctgttaattgtacccactgggctgcagctatgtgcacttcaggaacggagatgaaatgcaaactgttattatttggtctgctcttgtattc

SEQ ID NO: 17698 - protein, 254 aa, Zea mays subsp. mays
  peptide (1)..(254): Ceres Seq. ID no. 12364644
  misc_feature (24)..(96): Pfam Name: RNA recognition motif. (a.k.a. RRM, RBD, or RNP domain) Pfam Description: RNA recognition motif. (a.k.a. RRM, RBD, or RNP
  misc_feature (18)..(254): Homolog of NCBI NO: 19347861 NR Description: putative spliceosomal protein (U2B) [Arabidopsis
  misc_feature (18)..(254): Homolog of NCBI NO: 30679892 NR Description: small nuclear ribonucleoprotein U2B (spliceosomal
  misc_feature (18)..(254): Homolog of NCBI NO: 30679897 NR Description: small nuclear ribonucleoprotein U2B (spliceosomal
  misc_feature (18)..(254): Homolog of NCBI NO: 25294325 NR Description: hypothetical protein [imported] - Arabidopsis
  misc_feature (18)..(254): Homolog of NCBI NO: 421960 NR Description: small nuclear ribonucleoprotein U2B'' - potato
  misc_feature (18)..(254): Homolog of NCBI NO: 21593001 NR Description: putative small nuclear ribonucleoprotein U2B
  misc_feature (18)..(254): Homolog of NCBI NO: 15227729 NR Description: small nuclear ribonucleoprotein U2B, putative
  misc_feature (12)..(254): Homolog of NCBI NO: 15226631 NR Description: small nuclear ribonucleoprotein U1A
  misc_feature (1)..(254): Homolog of NCBI NO: 2119045 NR Description: small nuclear ribonucleoprotein U1A - potato
  misc_feature (1)..(254): Homolog of NCBI NO: 34897622 NR Description: putative small nuclear ribonucleoprotein U1A
MSGEAAAVGGGEGEANGIPPNVTIYINNLNEKIKLEELKKSLTAVFSQFGKILDVLAFKTLKHKGQAWVVFEDVASATEALKRMQGFPFYDKTMRIQYAKTKSDIIAKADGTFVPRERRKRTDEKSEKKQKREHHHDAGASQIGMGVTAYPGVYGAPQLTQIPIAGGQRVMMPEIIVPNNILFVQNLPHETTPMMLQMLFCQYPGFKEVRMIEAKPGIAFVEYGDETQVTAAMNNLQSFKITKENQMVITYAKK

SEQ ID NO: 17699 - protein, 171 aa, Zea mays subsp. mays
  peptide (1)..(171): Ceres Seq. ID no. 12364645
  misc_feature (1)..(171): Homolog of NCBI NO: 19347861 NR Description: putative spliceosomal protein (U2B) [Arabidopsis
  misc_feature (1)..(171): Homolog of NCBI NO: 30679892 NR Description: small nuclear ribonucleoprotein U2B (spliceosomal
  misc_feature (1)..(171): Homolog of NCBI NO: 30679897 NR Description: small nuclear ribonucleoprotein U2B (spliceosomal
  misc_feature (1)..(171): Homolog of NCBI NO: 25294325 NR Description: hypothetical protein [imported] - Arabidopsis
  misc_feature (1)..(171): Homolog of NCBI NO: 421960 NR Description: small nuclear ribonucleoprotein U2B'' - potato
  misc_feature (1)..(171): Homolog of NCBI NO: 21593001 NR Description: putative small nuclear ribonucleoprotein U2B
  misc_feature (1)..(171): Homolog of NCBI NO: 15227729 NR Description: small nuclear ribonucleoprotein U2B, putative
  misc_feature (1)..(171): Homolog of NCBI NO: 15226631 NR Description: small nuclear ribonucleoprotein U1A
  misc_feature (1)..(171): Homolog of NCBI NO: 2119045 NR Description: small nuclear ribonucleoprotein U1A - potato
  misc_feature (1)..(171): Homolog of NCBI NO: 34897622 NR Description: putative small nuclear ribonucleoprotein U1A
MQGFPFYDKTMRIQYAKTKSDIIAKADGTFVPRERRKRTDEKSEKKQKREHHHDAGASQIGMGVTAYPGVYGAPQLTQIPIAGGQRVMMPEIIVPNNILFVQNLPHETTPMMLQMLFCQYPGFKEVRMIEAKPGIAFVEYGDETQVTAAMNNLQSFKITKENQMVITYAKK

SEQ ID NO: 17700 - protein, 161 aa, Zea mays subsp. mays
  peptide (1)..(161): Ceres Seq. ID no. 12364646
  misc_feature (1)..(161): Homolog of NCBI NO: 19347861 NR Description: putative spliceosomal protein (U2B) [Arabidopsis
  misc_feature (1)..(161): Homolog of NCBI NO: 30679892 NR Description: small nuclear ribonucleoprotein U2B (spliceosomal
  misc_feature (1)..(161): Homolog of NCBI NO: 30679897 NR Description: small nuclear ribonucleoprotein U2B (spliceosomal
  misc_feature (1)..(161): Homolog of NCBI NO: 25294325 NR Description: hypothetical protein [imported] - Arabidopsis
  misc_feature (1)..(161): Homolog of NCBI NO: 421960 NR Description: small nuclear ribonucleoprotein U2B'' - potato
  misc_feature (1)..(161): Homolog of NCBI NO: 21593001 NR Description: putative small nuclear ribonucleoprotein U2B
  misc_feature (1)..(161): Homolog of NCBI NO: 15227729 NR Description: small nuclear ribonucleoprotein U2B, putative
  misc_feature (1)..(161): Homolog of NCBI NO: 15226631 NR Description: small nuclear ribonucleoprotein U1A
  misc_feature (1)..(161): Homolog of NCBI NO: 2119045 NR Description: small nuclear ribonucleoprotein U1A - potato
  misc_feature (1)..(161): Homolog of NCBI NO: 34897622 NR Description: putative small nuclear ribonucleoprotein U1A
MRIQYAKTKSDIIAKADGTFVPRERRKRTDEKSEKKQKREHHHDAGASQIGMGVTAYPGVYGAPQLTQIPIAGGQRVMMPEIIVPNNILFVQNLPHETTPMMLQMLFCQYPGFKEVRMIEAKPGIAFVEYGDETQVTAAMNNLQSFKITKENQMVITYAKK

SEQ ID NO: 17701 - DNA, 2408 bp, Zea mays subsp. mays
  misc_feature (1)..(2408): Ceres Seq. ID no. 12375257
  misc_feature: MA Experiment ID: 108522 Result: Down-regulated in Transcription
  misc_feature: MA Experiment 108522 PARAMETER Experiment Name: Zm_42deg_Heat_P Parameter: Age (day) Value: 8
  misc_feature: MA Experiment 108522 PARAMETER Experiment Name: Zm_42deg_Heat_P Parameter: Organism Value: Zea mays
  misc_feature: MA Experiment 108522 PARAMETER Experiment Name: Zm_42deg_Heat_P Parameter: Plant Line Value: 35A19
  misc_feature: MA Experiment 108522 PARAMETER Experiment Name: Zm_42deg_Heat_P Parameter: Temperature (deg C) Value: 42 vs. 22
  misc_feature: MA Experiment 108522 PARAMETER Experiment Name: Zm_42deg_Heat_P Parameter: Timepoint (hr) Value: 1
  misc_feature: MA Experiment 108522 PARAMETER Experiment Name: Zm_42deg_Heat_P Parameter: Tissue Value: Aerial
  misc_feature: MA Experiment ID: 108529 Result: Up-regulated in Transcription
  misc_feature: MA Experiment 108529 PARAMETER Experiment Name: Zm_Imbibed_Seeds_P Parameter: Age (day) Value: 5 vs. 2
  misc_feature: MA Experiment 108529 PARAMETER Experiment Name: Zm_Imbibed_Seeds_P Parameter: Organism Value: Zea mays
  misc_feature: MA Experiment 108529 PARAMETER Experiment Name: Zm_Imbibed_Seeds_P Parameter: Plant Line Value: 35A19
  misc_feature: MA Experiment 108529 PARAMETER Experiment Name: Zm_Imbibed_Seeds_P Parameter: Tissue Value: Roots vs. Embryo
  misc_feature: MA Experiment ID: 108535 Result: Down-regulated in Transcription
  misc_feature: MA Experiment 108535 PARAMETER Experiment Name: Zm_Meristem_P Parameter: Age (day) Value: 8
  misc_feature: MA Experiment 108535 PARAMETER Experiment Name: Zm_Meristem_P Parameter: Organism Value: Zea mays
  misc_feature: MA Experiment 108535 PARAMETER Experiment Name: Zm_Meristem_P Parameter: Plant Line Value: 35A19
  misc_feature: MA Experiment 108535 PARAMETER Experiment Name: Zm_Meristem_P Parameter: Tissue Value: Root Meristem vs. Above Root Meristem
  misc_feature: MA Experiment ID: 108543 Result: Down-regulated in Transcription
  misc_feature: MA Experiment ID: 108546 Result: Up-regulated in Transcription
  misc_feature: MA Experiment 108546 PARAMETER Experiment Name: Zm_Imbibed_Seeds_P Parameter: Age (day) Value: 3 vs. 2
  misc_feature: MA Experiment 108546 PARAMETER Experiment Name: Zm_Imbibed_Seeds_P Parameter: Organism Value: Zea mays
  misc_feature: MA Experiment 108546 PARAMETER Experiment Name: Zm_Imbibed_Seeds_P Parameter: Plant Line Value: 35A19
  misc_feature: MA Experiment 108546 PARAMETER Experiment Name: Zm_Imbibed_Seeds_P Parameter: Tissue Value: Roots vs. Embryo
  misc_feature: MA Experiment ID: 20000488 Result: Down-regulated in Transcription
  misc_feature: MA Experiment 20000488 PARAMETER Experiment Name: Zm_50mM_NH4NO3_L_to_H_P Parameter: Organism Value: Zea mays
  misc_feature: MA Experiment 20000488 PARAMETER Experiment Name: Zm_50mM_NH4NO3_L_to_H_P Parameter: Timepoint (hr) Value: 8
  misc_feature: MA Experiment 20000488 PARAMETER Experiment Name: Zm_50mM_NH4NO3_L_to_H_P Parameter: Tissue Value: Leaves
  misc_feature: MA Experiment 20000488 PARAMETER Experiment Name: Zm_50mM_NH4NO3_L_to_H_P Parameter: Treatment Value: 50mM NH4NO3 vs. 100mM Mannitol
  misc_feature: MA Experiment ID: 20000535 Result: Down-regulated in Transcription
  misc_feature: MA Experiment 20000535 PARAMETER Experiment Name: Zm_Hybrid_Seed_Dev_P Parameter: DAP Value: 30 vs. 12
  misc_feature: MA Experiment 20000535 PARAMETER Experiment Name: Zm_Hybrid_Seed_Dev_P Parameter: Organism Value: Zea mays
  misc_feature: MA Experiment 20000535 PARAMETER Experiment Name: Zm_Hybrid_Seed_Dev_P Parameter: Plant Line Value: 35A19
  misc_feature: MA Experiment 20000535 PARAMETER Experiment Name: Zm_Hybrid_Seed_Dev_P Parameter: Tissue Value: Embryo vs. Unfert Floret
gcacgagaccattacctagaacatcctaatcgaaaagatcgatgacgcaccggaacagtgcaggtgcagcgaaagaggagcgcgccgtcgctgtcgacggccgtgccgagcgccagcagacaagcggcgacgctacaaaacaacgcgccaaccaaccgccccactgctgaccctttccaacctccaagctccctgccttctgccggccggtcggcagcggtggtagcggccaccaccccagggtatggccgcccgctccctcctcctctacgcgctgctgctcctggccctcgccaccgccgcaccgtcccacggcctcactcaagcggatgttgcgaagcgattgaaggaggtgctgtcggagaggaaccgagggcatgagatgctcgattcgtggaatggggatggggacccgtgttctccgtctacctgggaaggcttctcttgcgaacccaaggatggtgcccaggtcgtcgtcaagttgaacttttcttcgaagaaattgcaagggccgattcctgcagagattgctaacttgacggagctaaatgaaatacatctgcagtataataacttcactggatctattccggcatccttttctgctctcagacacctgctgaagctgtcggtgatttgcaaccccttgttgaacaataagcagcctgatggattttctagcggtgtaaatttcagctatggaggatgtgccgcccaagagtactatagctcaccagctgaagagtaccaaagcccacctgcagttgccagtcagaaagtatatgttattggtggtgtcgccggaggatctttggcatgtactgttgcactcggatcgttctttgtttgttttaacaaacgtgaacggcgttctccaaaaaaggactgctcttctacaacaaatcctgtttttcaagaatgcagcatccataacactacaaatcctgcagtacaacagttctccctcaaagcaatccagactgcaataagcaactacaaaactacgataggagagggtgggtttggagcagtttatcgaggtgcattagcaaatgggcaagaagttgcagtaaaagtccgctcaagttcatcgacacagggaacacgtgagtttaacaatgagctaagacttctttctgctgtgtggcatgagaatttagtcccacttatcggctattgctgtgaaaaagatcaacagatattggtctatccgttcatgtccaatggctcactacaagatcgtctttacggtgaggcatcaaaaaggaaagttcttgattggcccacaagactatctgtttgcattggtgctgctagagggctagtatatctgcacaattttgccgggcgttgtatcatacacagagatattaaatcgagcaacatacttctggatcacagcatgtgtggcaaggtagccgactttgggttttccaagtatgcaccacaggaaggtgacagcaatccatcaatggaagtgaggggaactgctgggtatttggaccctgaatactattccactcaggtgttatcaaccagaagcgacgtcttcagtttcggagtagtcctgttagaaattgtgacaggaagagaacctcttgatgtcaaaaggcctcgtcatgaatggagcttagttgagtgggcaaaaccatacatcagggagtacaagatcgaggagatggtggaccctggcataaaagggcagtattgctcagaggccatgtggagagtgctcgaggtcgcatctgtgtgcaccgagcccttctcaaccttcaggccgaccatggaggacgtcctgagggagctggaggacgctctgatcatcgagaacaacgcgtccgagtacatgaggtccatcgagagcacagggactctggggtccaaccgctatctgtccatcgacaggaagatgttcgcgtcagggtcagcgcgaatcgagtcgacgaaggggaatctgcaagcaatgccctcgcttccgcggtaactagacgccgcattgtgatttcgtagcgggcgtcgtcagggtgtgatccatgctcaaggcacatctaaccacgctgaggcctgactgagcacctgagatgggcatagacatgaagggatagtctgtactctgtaccatgtacagagcccattcagtggtgagagcacagatcagcgatacctacactgggaaatgccttctgaagccaatgtgctagttttgcctgttgaatttcccaaaagcaggcgaatgtgcgggcacaaactattctttggaccattataaacacgtaaaatgtgtcgagggaatccctcaagaaatcgaatattcagatctgtaccgtcacttcattatgtgaactattgctcgcttgttgtaattgtcattcttgcctaataaaccgatcaacagatgaattttcttc

SEQ ID NO: 17702 - protein, 579 aa, Zea mays subsp. mays
  peptide (1)..(579): Ceres Seq. ID no. 12375258
  misc_feature (251)..(451): Pfam Name: Protein kinase domain Pfam Description: Protein kinase domain
  misc_feature (26)..(567): Homolog of NCBI NO: 21698779 NR Description: nodulation receptor kinase [Pisum sativum]
  misc_feature (26)..(567): Homolog of NCBI NO: 21717594 NR Description: SYM19; PsSYM19 [Pisum sativum]
  misc_feature (26)..(567): Homolog of NCBI NO: 21698794 NR Description: nodulation receptor kinase [Pisum sativum]
  misc_feature (29)..(567): Homolog of NCBI NO: 21698781 NR Description: nodulation receptor kinase [Medicago sativa]
  misc_feature (29)..(567): Homolog of NCBI NO: 21698790 NR Description: nodulation receptor kinase [Medicago truncatula]
  misc_feature (29)..(566): Homolog of NCBI NO: 21698802 NR Description: nodulation receptor kinase [Melilotus alba]
  misc_feature (29)..(567): Homolog of NCBI NO: 21717596 NR Description: SYMRK; MtSYMRK [Medicago truncatula]
  misc_feature (29)..(567): Homolog of NCBI NO: 21698783 NR Description: nodulation receptor kinase [Medicago truncatula]
  misc_feature (7)..(567): Homolog of NCBI NO: 21622628 NR Description: receptor-like kinase SYMRK [Lotus japonicus]
  misc_feature (29)..(567): Homolog of NCBI NO: 21698787 NR Description: nodulation receptor kinase [Medicago truncatula]
MAARSLLLYALLLLALATAAPSHGLTQADVAKRLKEVLSERNRGHEMLDSWNGDGDPCSPSTWEGFSCEPKDGAQVVVKLNFSSKKLQGPIPAEIANLTELNEIHLQYNNFTGSIPASFSALRHLLKLSVICNPLLNNKQPDGFSSGVNFSYGGCAAQEYYSSPAEEYQSPPAVASQKVYVIGGVAGGSLACTVALGSFFVCFNKRERRSPKKDCSSTTNPVFQECSIHNTTNPAVQQFSLKAIQTAISNYKTTIGEGGFGAVYRGALANGQEVAVKVRSSSSTQGTREFNNELRLLSAVWHENLVPLIGYCCEKDQQILVYPFMSNGSLQDRLYGEASKRKVLDWPTRLSVCIGAARGLVYLHNFAGRCIIHRDIKSSNILLDHSMCGKVADFGFSKYAPQEGDSNPSMEVRGTAGYLDPEYYSTQVLSTRSDVFSFGVVLLEIVTGREPLDVKRPRHEWSLVEWAKPYIREYKIEEMVDPGIKGQYCSEAMWRVLEVASVCTEPFSTFRPTMEDVLRELEDALIIENNASEYMRSIESTGTLGSNRYLSIDRKMFASGSARIESTKGNLQAMPSLPR

SEQ ID NO: 17703 - protein, 533 aa, Zea mays subsp. mays
  peptide (1)..(533): Ceres Seq. ID no. 12375259
  misc_feature (205)..(405): Pfam Name: Protein kinase domain Pfam Description: Protein kinase domain
  misc_feature (1)..(521): Homolog of NCBI NO: 21698779 NR Description: nodulation receptor kinase [Pisum sativum]
  misc_feature (1)..(521): Homolog of NCBI NO: 21717594 NR Description: SYM19; PsSYM19 [Pisum sativum]
  misc_feature (1)..(521): Homolog of NCBI NO: 21698794 NR Description: nodulation receptor kinase [Pisum sativum]
  misc_feature (1)..(521): Homolog of NCBI NO: 21698781 NR Description: nodulation receptor kinase [Medicago sativa]
  misc_feature (1)..(521): Homolog of NCBI NO: 21698790 NR Description: nodulation receptor kinase [Medicago truncatula]
  misc_feature (1)..(520): Homolog of NCBI NO: 21698802 NR Description: nodulation receptor kinase [Melilotus alba]
  misc_feature (1)..(521): Homolog of NCBI NO: 21717596 NR Description: SYMRK; MtSYMRK [Medicago truncatula]
  misc_feature (1)..(521): Homolog of NCBI NO: 21698783 NR Description: nodulation receptor kinase [Medicago truncatula]
  misc_feature (1)..(521): Homolog of NCBI NO: 21622628 NR Description: receptor-like kinase SYMRK [Lotus japonicus]
  misc_feature (1)..(521): Homolog of NCBI NO: 21698787 NR Description: nodulation receptor kinase [Medicago truncatula]
MLDSWNGDGDPCSPSTWEGFSCEPKDGAQVVVKLNFSSKKLQGPIPAEIANLTELNEIHLQYNNFTGSIPASFSALRHLLKLSVICNPLLNNKQPDGFSSGVNFSYGGCAAQEYYSSPAEEYQSPPAVASQKVYVIGGVAGGSLACTVALGSFFVCFNKRERRSPKKDCSSTTNPVFQECSIHNTTNPAVQQFSLKAIQTAISNYKTTIGEGGFGAVYRGALANGQEVAVKVRSSSSTQGTREFNNELRLLSAVWHENLVPLIGYCCEKDQQILVYPFMSNGSLQDRLYGEASKRKVLDWPTRLSVCIGAARGLVYLHNFAGRCIIHRDIKSSNILLDHSMCGKVADFGFSKYAPQEGDSNPSMEVRGTAGYLDPEYYSTQVLSTRSDVFSFGVVLLEIVTGREPLDVKRPRHEWSLVEWAKPYIREYKIEEMVDPGIKGQYCSEAMWRVLEVASVCTEPFSTFRPTMEDVLRELEDALIIENNASEYMRSIESTGTLGSNRYLSIDRKMFASGSARIESTKGNLQAMPSLPR

SEQ ID NO: 17704 - DNA, 1315 bp, Zea mays subsp. mays
  misc_feature (1)..(1315): Ceres Seq. ID no. 12417755
  misc_feature: MA Experiment ID: 108527 Result: Up-regulated in Transcription
  misc_feature: MA Experiment 108527 PARAMETER Experiment Name: Zm_5mM_NO_P Parameter: Age (day) Value: 8
  misc_feature: MA Experiment 108527 PARAMETER Experiment Name: Zm_5mM_NO_P Parameter: Organism Value: Zea mays
  misc_feature: MA Experiment 108527 PARAMETER Experiment Name: Zm_5mM_NO_P Parameter: Plant Line Value: 35A19
  misc_feature: MA Experiment 108527 PARAMETER Experiment Name: Zm_5mM_NO_P Parameter: Timepoint (hr) Value: 6
  misc_feature: MA Experiment 108527 PARAMETER Experiment Name: Zm_5mM_NO_P Parameter: Tissue Value: Aerial
  misc_feature: MA Experiment 108527 PARAMETER Experiment Name: Zm_5mM_NO_P Parameter: Treatment Value: 5mM NO vs. No Treatment
  misc_feature: MA Experiment ID: 108535 Result: Up-regulated in Transcription
  misc_feature: MA Experiment 108535 PARAMETER Experiment Name: Zm_Meristem_P Parameter: Age (day) Value: 8
  misc_feature: MA Experiment 108535 PARAMETER Experiment Name: Zm_Meristem_P Parameter: Organism Value: Zea mays
  misc_feature: MA Experiment 108535 PARAMETER Experiment Name: Zm_Meristem_P Parameter: Plant Line Value: 35A19
  misc_feature: MA Experiment 108535 PARAMETER Experiment Name: Zm_Meristem_P Parameter: Tissue Value: Root Meristem vs. Above Root Meristem
  misc_feature: MA Experiment ID: 108559 Result: Up-regulated in Transcription
  misc_feature: MA Experiment 108559 PARAMETER Experiment Name: Zm_5mM_NO_P Parameter: Age (day) Value: 8
  misc_feature: MA Experiment 108559 PARAMETER Experiment Name: Zm_5mM_NO_P Parameter: Organism Value: Zea mays
  misc_feature: MA Experiment 108559 PARAMETER Experiment Name: Zm_5mM_NO_P Parameter: Plant Line Value: 35A19
  misc_feature: MA Experiment 108559 PARAMETER Experiment Name: Zm_5mM_NO_P Parameter: Timepoint (hr) Value: 12
  misc_feature: MA Experiment 108559 PARAMETER Experiment Name: Zm_5mM_NO_P Parameter: Tissue Value: Aerial
  misc_feature: MA Experiment 108559 PARAMETER Experiment Name: Zm_5mM_NO_P Parameter: Treatment Value: 5mM NO vs. No Treatment
  misc_feature: MA Experiment ID: 108689 Result: Up-regulated in Transcription
  misc_feature: MA Experiment 108689 PARAMETER Experiment Name: Zm_Drought_Roots_P Parameter: Age (day) Value: 9
  misc_feature: MA Experiment 108689 PARAMETER Experiment Name: Zm_Drought_Roots_P Parameter: Organism Value: Zea mays
  misc_feature: MA Experiment 108689 PARAMETER Experiment Name: Zm_Drought_Roots_P Parameter: Plant Line Value: 35A19
  misc_feature: MA Experiment 108689 PARAMETER Experiment Name: Zm_Drought_Roots_P Parameter: Timepoint (hr) Value: 24
  misc_feature: MA Experiment 108689 PARAMETER Experiment Name: Zm_Drought_Roots_P Parameter: Tissue Value: Roots
  misc_feature: MA Experiment 108689 PARAMETER Experiment Name: Zm_Drought_Roots_P Parameter: Treatment Value: Drought vs. No Drought
  misc_feature: MA Experiment ID: 20000108 Result: Up-regulated in Transcription
  misc_feature: MA Experiment 20000108 PARAMETER Experiment Name: Zm_Root-Tips_P Parameter: Age (day) Value: 12
  misc_feature: MA Experiment 20000108 PARAMETER Experiment Name: Zm_Root-Tips_P Parameter: Organism Value: Zea mays
  misc_feature: MA Experiment 20000108 PARAMETER Experiment Name: Zm_Root-Tips_P Parameter: Tissue Value: Root tips vs. Root mid region    35
  misc_feature: MA Experiment 20000108 PARAMETER Experiment Name: Zm_Root-Tips_P Parameter: Tissue Value: Root tips vs. Root mid region   Sequence Listing-Misc Features (4)
  misc_feature: MA Experiment ID: 20000480 Result: Up-regulated in Transcription
  misc_feature: MA Experiment 20000480 PARAMETER Experiment Name: Zm_Drought_P Parameter: Age (day) Value: 11
  misc_feature: MA Experiment 20000480 PARAMETER Experiment Name: Zm_Drought_P Parameter: Organism Value: Zea mays
  misc_feature: MA Experiment 20000480 PARAMETER Experiment Name: Zm_Drought_P Parameter: Plant Line Value: 35A19
  misc_feature: MA Experiment 20000480 PARAMETER Experiment Name: Zm_Drought_P Parameter: Timepoint (hr) Value: 72
  misc_feature: MA Experiment 20000480 PARAMETER Experiment Name: Zm_Drought_P Parameter: Tissue Value: Aerial
  misc_feature: MA Experiment 20000480 PARAMETER Experiment Name: Zm_Drought_P Parameter: Treatment Value: Drought vs. No Drought
gcacgagaccattacctagaacatcctaatcgaaaaacctcccgtcgtcactccaccgccgtccccttgagcgctcgccccaacctggggacgctcgccccagccgatctgatccgtctcaactccattaaaaaaatctctcctttccccctccctatccaggaaaaggagaaggtaccacctcggtcgatcttccctccatttactcctccgggcgaggtcccgattcgatcgaaggcggcggagagagatgaggaagcgtgagcgagagaacccgtgcgggatctgcgggcactaccacaagtacgaggagggggaggtgtgcggcgtctgcggtcaccgcccacctgcagcgtcaccagtaggggccaggcagcaagactcggcgttcccgtccgagatcctcaaggagttcctcttcctcggcagctacgacaacgcctcccgctcggagctcctcaagaccatcggcgtctcgcacatcctcaatactgtacctttgtgccaaaacctttaccggaattcattcacttatcactgccttcaagaggacaagactctgcagtttgatgatgcaaaccagtttctagagcaatgtgagagggagaaagcacgagtcctagtccattgcatgtctgggaaaagtagatcggcagcttttgtaatagccttcttgatgaagtcgagaggttggagattggcacaatcttttcagtgggtgaaagagcggagaccacaagtgcaactgtctgatgcagcacagcagcagctgattgagtatgaaaagaagctttttggttctaatgatggcagcataccagctcaaccttttgctccagtggattcgctcccttctcttggatttggttttccaaaaccaccaggcgacatccaagcgcctacctttaatcagcaggctccagcatctatctttgagcgcgttaccccgaacagcttccctagtaatttcatattcggagccgaaagaactagtgatagtgatgcgaaacttccagatagcaacaatttcggcgtggtaaactcgtctgggagtgatagcatgatggacagctcctaggatggttttgccttcaccaaggctatctccagcagcttaatcctcaattcctcatctctcgtttcaaatttcacttccactcttgtacaactatagcctgatatacaaaagaaatgactcagtcgcaaatttagtcaggtttctcgggatgtttttttatttctgagaaggaaacgcatttttgtaatagtatgttgtaatatttgccagtattactaaattgctgctgtgcatttc

SEQ ID NO: 17705 - protein, 275 aa, Zea mays subsp. mays
  peptide (1)..(275): Ceres Seq. ID no. 12417756
  misc_feature (42)..(238): Homolog of NCBI NO: 30851156 NR Description: Unknown (protein for MGC:55423) [Danio rerio]
  misc_feature (1)..(275): Homolog of NCBI NO: 15228155 NR Description: putative protein phosphatase; protein id:
  misc_feature (1)..(244): Homolog of NCBI NO: 28393745 NR Description: putative protein phosphatase [Arabidopsis
  misc_feature (36)..(237): Homolog of NCBI NO: 25742822 NR Description: MAP kinase phosphatase [Rattus norvegicus]
  misc_feature (36)..(237): Homolog of NCBI NO: 1083719 NR Description: dual specificity phosphatase (EC 3.1.3.-) HVH2 -
  misc_feature (48)..(181): Homolog of NCBI NO: 28317042 NR Description: RE08706p [Drosophila melanogaster]
  misc_feature (48)..(181): Homolog of NCBI NO: 24666604 NR Description: Mitogen-activated protein kinase phosphatase 3
  misc_feature (38)..(181): Homolog of NCBI NO: 15229482 NR Description: dual-specificity protein phosphatase; protein id:
  misc_feature (38)..(181): Homolog of NCBI NO: 9294518 NR Description: dual-specificity protein phosphatase-like protein
  misc_feature (36)..(197): Homolog of NCBI NO: 16950652 NR Description: dual specificity phosphatase 4 isoform 2
MRKRERENPCGICGHYHKYEEGEVCGVCGHRPPAASPVGARQQDSAFPSEILKEFLFLGSYDNASRSELLKTIGVSHILNTVPLCQNLYRNSFTYHCLQEDKTLQFDDANQFLEQCEREKARVLVHCMSGKSRSAAFVIAFLMKSRGWRLAQSFQWVKERRPQVQLSDAAQQQLIEYEKKLFGSNDGSIPAQPFAPVDSLPSLGFGFPKPPGDIQAPTFNQQAPASIFERVTPNSFPSNFIFGAERTSDSDAKLPDSNNFGVVNSSGSDSMMDSS

SEQ ID NO: 17706 - protein, 148 aa, Zea mays subsp. mays
  peptide (1)..(148): Ceres Seq. ID no. 12417757
  misc_feature (1)..(110): Homolog of NCBI NO: 25742822 NR Description: MAP kinase phosphatase [Rattus norvegicus]
  misc_feature (1)..(110): Homolog of NCBI NO: 1083719 NR Description: dual specificity phosphatase (EC 3.1.3.-) HVH2 -
  misc_feature (1)..(54): Homolog of NCBI NO: 28317042 NR Description: RE08706p [Drosophila melanogaster]
  misc_feature (1)..(54): Homolog of NCBI NO: 24666604 NR Description: Mitogen-activated protein kinase phosphatase 3
  misc_feature (1)..(54): Homolog of NCBI NO: 15229482 NR Description: dual-specificity protein phosphatase; protein id:
  misc_feature (1)..(54): Homolog of NCBI NO: 9294518 NR Description: dual-specificity protein phosphatase-like protein
  misc_feature (1)..(70): Homolog of NCBI NO: 16950652 NR Description: dual specificity phosphatase 4 isoform 2
  misc_feature (1)..(111): Homolog of NCBI NO: 30851156 NR Description: Unknown (protein for MGC:55423) [Danio rerio]
  misc_feature (1)..(148): Homolog of NCBI NO: 15228155 NR Description: putative protein phosphatase; protein id:
  misc_feature (1)..(117): Homolog of NCBI NO: 28393745 NR Description: putative protein phosphatase [Arabidopsis
MSGKSRSAAFVIAFLMKSRGWRLAQSFQWVKERRPQVQLSDAAQQQLIEYEKKLFGSNDGSIPAQPFAPVDSLPSLGFGFPKPPGDIQAPTFNQQAPASIFERVTPNSFPSNFIFGAERTSDSDAKLPDSNNFGVVNSSGSDSMMDSS

SEQ ID NO: 17707 - DNA, 2634 bp, Zea mays subsp. mays
  misc_feature (1)..(2634): Ceres Seq. ID no. 12361141
  misc_feature: MA Experiment ID: 108536 Result: Up-regulated in Transcription
  misc_feature: MA Experiment 108536 PARAMETER Experiment Name: Zm_Meristem_P Parameter: Age (day) Value: 8
  misc_feature: MA Experiment 108536 PARAMETER Experiment Name: Zm_Meristem_P Parameter: Organism Value: Zea mays
  misc_feature: MA Experiment 108536 PARAMETER Experiment Name: Zm_Meristem_P Parameter: Plant Line Value: 35A19
  misc_feature: MA Experiment 108536 PARAMETER Experiment Name: Zm_Meristem_P Parameter: Tissue Value: Shoot Meristem vs. Above Shoot Meristem
  misc_feature: MA Experiment ID: 108687 Result: Down-regulated in Transcription
  misc_feature: MA Experiment 108687 PARAMETER Experiment Name: Zm_Embryos-Flowers__P Parameter: Tissue Value: Embryo vs. Aerial+
gcacgagaccattacctagaacatcctaatcgaaaaagcctacacgcccccgcctcctgccctctgtccacatcctcgcctctccccactagttcgctcgcgtgatggtggtgcgggagcagcggaacaagggttcgtcgtcggccaccctgtgacaccccgcccacgcccccgcggcggaacctgcaaacccggaggccggagctccgacttcgtcggccatcgaccgcgtctgatcggcgctgggacctgccgtccggacgaaatcggtcagcatgacggggcccaatgagaaggcggcggcgggaggcgggggtggcgagaggcgcaagtacccgatccacgtggaggactacgagctgtacgaggagatcgggcagggcgtcagcgccatcgtgtaccgcgcactctgcaagccactcgacgagatcgtcgccgtcaaggtggtcgacttcgagcgcaccaacagcgacctgaacaacatcgttcgtgaagctcagacaatgattttgatagaccatcctaacgttgtcaaggcgcattgttcatttgcaaaagaccaaacgttatgggtggttatgccgtatatggctggggggtcctgtcttcacataatgaaatcagtgcatcctactggattcgaggaacccatcatcgcgactatacttcgtgaagtcctgaaaggtttagagtatcttcaccatcatggctctatacatcgagatgtgaaggcaggaaatattctagtcgattctcggggtggaattaaacttggggactttggagtctctgcttgcctttttgattctggtgatagacagagggccaggaatacttttgtgggaacaccttgctggatggcgcccgaggttatggagcaactacatggatatgatttcagagcagacatatggtcctttggaattactgcacttgaaacttgctcatggtcatgctcctttctctaagtaccctcccatgaaggtcttgctcatgacacttcagaatgctcctccaggtcttgactatgaaagagataagaaattcacgaggaacttcaagcaaatggttgctatgtgtttggtaaaagacccttcaaagaggccttcggcaaaaaagttgttgaagcaaccatttttcaagcaagctcgttccactgattttattgcacgaaagcttttagaaggattgcctggccttggtgttagatatcaagctttgaaggaaaaggatcaacatttaatggctcaaaagaaaatgtctgatggaaagaaagaagaaatctcgcaggatgaatacaaaaggggtatcagcagctggacctttgacatggatgacctgagatctcaagcttcattgggcacagaatgtgaagacagtaccttatgcaaagattcagatatatctttctatgacttggacagtttacaggatcaagcaccagaagggccacacttgttgagagatttctcaacgaagtatgatgctgacattgaaaatgatatgacaaccaaagataagtcagccgtttcatctcctgatcagcctgctagcttagtgaggaatgcttctatgcgtgggatgcccataaacggttctttcaggaaagacaactctacagaaagcttcgatttggaatgtcaagagaaacatctggacattgttccgactagctcatcccctgaaaggaagttttcttttagttcttgctcatcaaatgggctccttttgtccaaagagagctctaaacagcaaactagcatccacaaccttgacaagtgtaatggagggcatttgcatgtatcagatgaaacatcttctgaagctgctcctaagacacataaatcagcagaggaccatgatgatagatccaaacctccacttataagaggtcgatttagagttatacctgggcatgttgactcaaaggctcaaccacctggcctacagaagtgtcacagcatgcagacaatttctcgccttccatcattaagtataccctcttccgcagaagttgcatcaaccattattggtggctccttctacatgcagctatatagtattctacagacaaatatgcttcagagggaccaaatacttaacgcgatgaagcaggtgagtggttgtgctatggcttcaccaggcgtaccttctatggcttcaccgtgtatcccttccacaagtcgctcgacatctccatcaggtgtaccatcagttgacagatccatgctggaagctgcacaagaaagggagaaagagctgctgaatgaggtcttggagctgcaatggcggttattgtgcacacaagatgaggttcagaagcttaaagcaaaggcagcgcagatctgatgctgaagctgttaagggagcattaagggcgcgtcatgataagatgatctgttcatgcggttttcaaatggctatttagcataggagagagatacaaaattaaggattggtgtatatttaaaaaggtgctagtgatgctcgagtgtccaatcctgtctaagcaggacattaatttcgtacaatctgtgtgtttgtgtttatgggtggcatggcgctgtgtttttgttggagcgcaattcccaggttgggacttgggaaagatagcttaacatgcctatgggtttt

SEQ ID NO: 17708 - protein, 487 aa, Zea mays subsp. mays
  peptide (1)..(487): Ceres Seq. ID no. 12361142
  misc_feature (17)..(85): Pfam Name: Protein kinase domain Pfam Description: Protein kinase domain
  misc_feature (17)..(223): Homolog of NCBI NO: 25407517 NR Description: hypothetical protein AT4g10730 [imported] -
  misc_feature (17)..(353): Homolog of NCBI NO: 7486904 NR Description: hypothetical protein T12H20.4 - Arabidopsis
  misc_feature (17)..(331): Homolog of NCBI NO: 7487178 NR Description: hypothetical protein T19F6.90 - Arabidopsis
  misc_feature (17)..(219): Homolog of NCBI NO: 17998578 NR Description: putative Ste-20 related kinase, 3'-partial [Oryza
  misc_feature (19)..(316): Homolog of NCBI NO: 15223145 NR Description: Ste-20 related kinase SPAK, putative; protein id:
  misc_feature (17)..(158): Homolog of NCBI NO: 7485682 NR Description: hypothetical protein F17O7.3 - Arabidopsis
  misc_feature (17)..(487): Homolog of NCBI NO: 22328895 NR Description: putative protein
  misc_feature (17)..(226): Homolog of NCBI NO: 11358725 NR Description: protein kinase-like protein - Arabidopsis
  misc_feature (17)..(476): Homolog of NCBI NO: 17529280 NR Description: putative protein kinase [Arabidopsis thaliana]
  misc_feature (17)..(476): Homolog of NCBI NO: 30685021 NR Description: protein kinase family [Arabidopsis thaliana]
MDMISEQTYGPLELLHLKLAHGHAPFSKYPPMKVLLMTLQNAPPGLDYERDKKFTRNFKQMVAMCLVKDPSKRPSAKKLLKQPFFKQARSTDFIARKLLEGLPGLGVRYQALKEKDQHLMAQKKMSDGKKEEISQDEYKRGISSWTFDMDDLRSQASLGTECEDSTLCKDSDISFYDLDSLQDQAPEGPHLLRDFSTKYDADIENDMTTKDKSAVSSPDQPASLVRNASMRGMPINGSFRKDNSTESFDLECQEKHLDIVPTSSSPERKFSFSSCSSNGLLLSKESSKQQTSIHNLDKCNGGHLHVSDETSSEAAPKTHKSAEDHDDRSKPPLIRGRFRVIPGHVDSKAQPPGLQKCHSMQTISRLPSLSIPSSAEVASTIIGGSFYMQLYSILQTNMLQRDQILNAMKQVSGCAMASPGVPSMASPCIPSTSRSTSPSGVPSVDRSMLEAAQEREKELLNEVLELQWRLLCTQDEVQKLKAKAAQI

SEQ ID NO: 17709 - protein, 485 aa, Zea mays subsp. mays
  peptide (1)..(485): Ceres Seq. ID no. 12361143
  misc_feature (15)..(83): Pfam Name: Protein kinase domain Pfam Description: Protein kinase domain
  misc_feature (15)..(221): Homolog of NCBI NO: 25407517 NR Description: hypothetical protein AT4g10730 [imported] -
  misc_feature (15)..(351): Homolog of NCBI NO: 7486904 NR Description: hypothetical protein T12H20.4 - Arabidopsis
  misc_feature (15)..(329): Homolog of NCBI NO: 7487178 NR Description: hypothetical protein T19F6.90 - Arabidopsis
  misc_feature (15)..(217): Homolog of NCBI NO: 17998578 NR Description: putative Ste-20 related kinase, 3'-partial [Oryza
  misc_feature (17)..(314): Homolog of NCBI NO: 15223145 NR Description: Ste-20 related kinase SPAK, putative; protein id:
  misc_feature (15)..(156): Homolog of NCBI NO: 7485682 NR Description: hypothetical protein F17O7.3 - Arabidopsis
  misc_feature (15)..(485): Homolog of NCBI NO: 22328895 NR Description: putative protein
  misc_feature (15)..(224): Homolog of NCBI NO: 11358725 NR Description: protein kinase-like protein - Arabidopsis
  misc_feature (15)..(474): Homolog of NCBI NO: 17529280 NR Description: putative protein kinase [Arabidopsis thaliana]
  misc_feature (15)..(474): Homolog of NCBI NO: 30685021 NR Description: protein kinase family [Arabidopsis thaliana]
MISEQTYGPLELLHLKLAHGHAPFSKYPPMKVLLMTLQNAPPGLDYERDKKFTRNFKQMVAMCLVKDPSKRPSAKKLLKQPFFKQARSTDFIARKLLEGLPGLGVRYQALKEKDQHLMAQKKMSDGKKEEISQDEYKRGISSWTFDMDDLRSQASLGTECEDSTLCKDSDISFYDLDSLQDQAPEGPHLLRDFSTKYDADIENDMTTKDKSAVSSPDQPASLVRNASMRGMPINGSFRKDNSTESFDLECQEKHLDIVPTSSSPERKFSFSSCSSNGLLLSKESSKQQTSIHNLDKCNGGHLHVSDETSSEAAPKTHKSAEDHDDRSKPPLIRGRFRVIPGHVDSKAQPPGLQKCHSMQTISRLPSLSIPSSAEVASTIIGGSFYMQLYSILQTNMLQRDQILNAMKQVSGCAMASPGVPSMASPCIPSTSRSTSPSGVPSVDRSMLEAAQEREKELLNEVLELQWRLLCTQDEVQKLKAKAAQI

SEQ ID NO: 17710 - protein, 456 aa, Zea mays subsp. mays
  peptide (1)..(456): Ceres Seq. ID no. 12361144
  misc_feature (1)..(54): Pfam Name: Protein kinase domain Pfam Description: Protein kinase domain
  misc_feature (1)..(192): Homolog of NCBI NO: 25407517 NR Description: hypothetical protein AT4g10730 [imported] -
  misc_feature (1)..(322): Homolog of NCBI NO: 7486904 NR Description: hypothetical protein T12H20.4 - Arabidopsis
  misc_feature (1)..(300): Homolog of NCBI NO: 7487178 NR Description: hypothetical protein T19F6.90 - Arabidopsis
  misc_feature (1)..(188): Homolog of NCBI NO: 17998578 NR Description: putative Ste-20 related kinase, 3'-partial [Oryza
  misc_feature (1)..(285): Homolog of NCBI NO: 15223145 NR Description: Ste-20 related kinase SPAK, putative; protein id:
  misc_feature (1)..(127): Homolog of NCBI NO: 7485682 NR Description: hypothetical protein F17O7.3 - Arabidopsis
  misc_feature (1)..(456): Homolog of NCBI NO: 22328895 NR Description: putative protein
  misc_feature (1)..(195): Homolog of NCBI NO: 11358725 NR Description: protein kinase-like protein - Arabidopsis
  misc_feature (1)..(445): Homolog of NCBI NO: 17529280 NR Description: putative protein kinase [Arabidopsis thaliana]
  misc_feature (1)..(445): Homolog of NCBI NO: 30685021 NR Description: protein kinase family [Arabidopsis thaliana]
MKVLLMTLQNAPPGLDYERDKKFTRNFKQMVAMCLVKDPSKRPSAKKLLKQPFFKQARSTDFIARKLLEGLPGLGVRYQALKEKDQHLMAQKKMSDGKKEEISQDEYKRGISSWTFDMDDLRSQASLGTECEDSTLCKDSDISFYDLDSLQDQAPEGPHLLRDFSTKYDADIENDMTTKDKSAVSSPDQPASLVRNASMRGMPINGSFRKDNSTESFDLECQEKHLDIVPTSSSPERKFSFSSCSSNGLLLSKESSKQQTSIHNLDKCNGGHLHVSDETSSEAAPKTHKSAEDHDDRSKPPLIRGRFRVIPGHVDSKAQPPGLQKCHSMQTISRLPSLSIPSSAEVASTIIGGSFYMQLYSILQTNMLQRDQILNAMKQVSGCAMASPGVPSMASPCIPSTSRSTSPSGVPSVDRSMLEAAQEREKELLNEVLELQWRLLCTQDEVQKLKAKAAQI

SEQ ID NO: 17711 - DNA, 1503 bp, Zea mays subsp. mays
  misc_feature (1)..(1503): Ceres Seq. ID no. 12361279
  misc_feature: MA Experiment ID: 108504 Result: Down-regulated in Transcription
  misc_feature: MA Experiment 108504 PARAMETER Experiment Name: Zm_Drought_P Parameter: Age (day) Value: 8
  misc_feature: MA Experiment 108504 PARAMETER Experiment Name: Zm_Drought_P Parameter: Organism Value: Zea mays
  misc_feature: MA Experiment 108504 PARAMETER Experiment Name: Zm_Drought_P Parameter: Plant Line Value: 35A19
  misc_feature: MA Experiment 108504 PARAMETER Experiment Name: Zm_Drought_P Parameter: Timepoint (hr) Value: 12
  misc_feature: MA Experiment 108504 PARAMETER Experiment Name: Zm_Drought_P Parameter: Tissue Value: Aerial
  misc_feature: MA Experiment 108504 PARAMETER Experiment Name: Zm_Drought_P Parameter: Treatment Value: Drought vs. No Drought
  misc_feature: MA Experiment ID: 108523 Result: Down-regulated in Transcription
  misc_feature: MA Experiment 108523 PARAMETER Experiment Name: Zm_42deg_Heat_P Parameter: Age (day) Value: 8
  misc_feature: MA Experiment 108523 PARAMETER Experiment Name: Zm_42deg_Heat_P Parameter: Organism Value: Zea mays
  misc_feature: MA Experiment 108523 PARAMETER Experiment Name: Zm_42deg_Heat_P Parameter: Plant Line Value: 35A19
  misc_feature: MA Experiment 108523 PARAMETER Experiment Name: Zm_42deg_Heat_P Parameter: Temperature (deg C) Value: 42 vs. 22
  misc_feature: MA Experiment 108523 PARAMETER Experiment Name: Zm_42deg_Heat_P Parameter: Timepoint (hr) Value: 6
  misc_feature: MA Experiment 108523 PARAMETER Experiment Name: Zm_42deg_Heat_P Parameter: Tissue Value: Aerial
  misc_feature: MA Experiment ID: 108535 Result: Up-regulated in Transcription
  misc_feature: MA Experiment 108535 PARAMETER Experiment Name: Zm_Meristem_P Parameter: Age (day) Value: 8
  misc_feature: MA Experiment 108535 PARAMETER Experiment Name: Zm_Meristem_P Parameter: Organism Value: Zea mays
  misc_feature: MA Experiment 108535 PARAMETER Experiment Name: Zm_Meristem_P Parameter: Plant Line Value: 35A19
  misc_feature: MA Experiment 108535 PARAMETER Experiment Name: Zm_Meristem_P Parameter: Tissue Value: Root Meristem vs. Above Root Meristem
  misc_feature: MA Experiment ID: 108546 Result: Down-regulated in Transcription
  misc_feature: MA Experiment 108546 PARAMETER Experiment Name: Zm_Imbibed_Seeds_P Parameter: Age (day) Value: 3 vs. 2
  misc_feature: MA Experiment 108546 PARAMETER Experiment Name: Zm_Imbibed_Seeds_P Parameter: Organism Value: Zea mays
  misc_feature: MA Experiment 108546 PARAMETER Experiment Name: Zm_Imbibed_Seeds_P Parameter: Plant Line Value: 35A19
  misc_feature: MA Experiment 108546 PARAMETER Experiment Name: Zm_Imbibed_Seeds_P Parameter: Tissue Value: Roots vs. Embryo
  misc_feature: MA Experiment ID: 108556 Result: Down-regulated in Transcription
  misc_feature: MA Experiment 108556 PARAMETER Experiment Name: Zm_Drought_P Parameter: Age (day) Value: 9
  misc_feature: MA Experiment 108556 PARAMETER Experiment Name: Zm_Drought_P Parameter: Organism Value: Zea mays
  misc_feature: MA Experiment 108556 PARAMETER Experiment Name: Zm_Drought_P Parameter: Plant Line Value: 35A19
  misc_feature: MA Experiment 108556 PARAMETER Experiment Name: Zm_Drought_P Parameter: Timepoint (hr) Value: 24
  misc_feature: MA Experiment 108556 PARAMETER Experiment Name: Zm_Drought_P Parameter: Tissue Value: Aerial
  misc_feature: MA Experiment 108556 PARAMETER Experiment Name: Zm_Drought_P Parameter: Treatment Value: Drought vs. No Drought
  misc_feature: MA Experiment ID: 108559 Result: Down-regulated in Transcription
  misc_feature: MA Experiment 108559 PARAMETER Experiment Name: Zm_5mM_NO_P Parameter: Age (day) Value: 8
  misc_feature: MA Experiment 108559 PARAMETER Experiment Name: Zm_5mM_NO_P Parameter: Organism Value: Zea mays
  misc_feature: MA Experiment 108559 PARAMETER Experiment Name: Zm_5mM_NO_P Parameter: Plant Line Value: 35A19
  misc_feature: MA Experiment 108559 PARAMETER Experiment Name: Zm_5mM_NO_P Parameter: Timepoint (hr) Value: 12
  misc_feature: MA Experiment 108559 PARAMETER Experiment Name: Zm_5mM_NO_P Parameter: Tissue Value: Aerial
  misc_feature: MA Experiment 108559 PARAMETER Experiment Name: Zm_5mM_NO_P Parameter: Treatment Value: 5mM NO vs. No Treatment
  misc_feature: MA Experiment ID: 108597 Result: Down-regulated in Transcription
  misc_feature: MA Experiment 108597 PARAMETER Experiment Name: Zm_100uM_ABA_P Parameter: Age (day) Value: 9
  misc_feature: MA Experiment 108597 PARAMETER Experiment Name: Zm_100uM_ABA_P Parameter: Organism Value: Zea mays
  misc_feature: MA Experiment 108597 PARAMETER Experiment Name: Zm_100uM_ABA_P Parameter: Plant Line Value: 35A19
  misc_feature: MA Experiment 108597 PARAMETER Experiment Name: Zm_100uM_ABA_P Parameter: Timepoint (hr) Value: 24
  misc_feature: MA Experiment 108597 PARAMETER Experiment Name: Zm_100uM_ABA_P Parameter: Tissue Value: Aerial
  misc_feature: MA Experiment 108597 PARAMETER Experiment Name: Zm_100uM_ABA_P Parameter: Treatment Value: 100uM ABA vs. No Treatment
  misc_feature: MA Experiment ID: 108687 Result: Down-regulated in Transcription
  misc_feature: MA Experiment 108687 PARAMETER Experiment Name: Zm_Embryos-Flowers__P Parameter: Tissue Value: Embryo vs. Aerial+
  misc_feature: MA Experiment ID: 20000487 Result: Down-regulated in Transcription
  misc_feature: MA Experiment 20000487 PARAMETER Experiment Name: Zm_50mM_NH4NO3_L_to_H_P Parameter: Organism Value: Zea mays
  misc_feature: MA Experiment 20000487 PARAMETER Experiment Name: Zm_50mM_NH4NO3_L_to_H_P Parameter: Timepoint (hr) Value: 4
  misc_feature: MA Experiment 20000487 PARAMETER Experiment Name: Zm_50mM_NH4NO3_L_to_H_P Parameter: Tissue Value: Leaves
  misc_feature: MA Experiment 20000487 PARAMETER Experiment Name: Zm_50mM_NH4NO3_L_to_H_P Parameter: Treatment Value: 50mM NH4NO3 vs. 100mM Mannitol
  misc_feature: MA Experiment ID: 20000532 Result: Down-regulated in Transcription
  misc_feature: MA Experiment 20000532 PARAMETER Experiment Name: Zm_0.001percent_MeJA_P Parameter: Age (day) Value: 10
  misc_feature: MA Experiment 20000532 PARAMETER Experiment Name: Zm_0.001percent_MeJA_P Parameter: Organism Value: Zea mays
  misc_feature: MA Experiment 20000532 PARAMETER Experiment Name: Zm_0.001percent_MeJA_P Parameter: Plant Line Value: 35A19
  misc_feature: MA Experiment 20000532 PARAMETER Experiment Name: Zm_0.001percent_MeJA_P Parameter: Timepoint (hr) Value: 48
  misc_feature: MA Experiment 20000532 PARAMETER Experiment Name: Zm_0.001percent_MeJA_P Parameter: Tissue Value: Aerial
  misc_feature: MA Experiment 20000532 PARAMETER Experiment Name: Zm_0.001percent_MeJA_P Parameter: Treatment Value: 0.001percent MeJA vs. No Treatment
  misc_feature: MA Experiment ID: 20000632 Result: Down-regulated in Transcription
  misc_feature: MA Experiment 20000632 PARAMETER Experiment Name: Zm_Herbicide-Treatments_P Parameter: Timepoint (hr) Value: 4
  misc_feature: MA Experiment 20000632 PARAMETER Experiment Name: Zm_Herbicide-Treatments_P Parameter: Tissue Value: Aerial
  misc_feature: MA Experiment 20000632 PARAMETER Experiment Name: Zm_Herbicide-Treatments_P Parameter: Treatment Value: Glean vs. No Treatment
  misc_feature: MA Experiment ID: 20000633 Result: Down-regulated in Transcription
  misc_feature: MA Experiment 20000633 PARAMETER Experiment Name: Zm_Herbicide-Treatments_P Parameter: Timepoint (hr) Value: 4
  misc_feature: MA Experiment 20000633 PARAMETER Experiment Name: Zm_Herbicide-Treatments_P Parameter: Tissue Value: Aerial
  misc_feature: MA Experiment 20000633 PARAMETER Experiment Name: Zm_Herbicide-Treatments_P Parameter: Treatment Value: Trimec vs. No Treatment
gcacgagaccattacctagaacatcctaatcaaaaaagcagcgtccgctccaaaacgcaacggtcgaatctcctcgaattcgaattgcagccggtgccacccacctcacatggcggcggcggaagagatgatggcggtgctggacaaggagacgctggcgctgatgggtctgggcaacgccgccgccgcggtggttgtcgagtgcgagaagttcaaggagaacgcgaggccgctcaagcgcgggcgcgacgtgtccaaactcaaccacgcgctcaaggcacacgccgatcccgcccagcgcgccactcttctcgaagcccgaaagaagatgattgaggcaatctacgagtaccaaggcgaggatccgctccaaccgtggctggactgcatcaagtgggtgcaggagtattttccgaccggcggcgagtgctcagggttggtggtgttgtacgagcagtgcgtgcggaccttattggatgacgagcgctacaaggacgacctccgcttcctcaaagtgtggctggaatacgcggggaactgtgctgatgctgaggtaatatacaggttcctggaggccaaccagattgggcagggccatgcgatctactacatgtcttacgcatcgttgatggagtcaaagaacaagttgaggaaagctaatgagatctttgtccttggtatagctagaaaagcgaagcctctggagaagttggaagctgtatacagggcatttcttcgaagatcaatcaaaaagagggaacaagagcaggatgatacagtagatgatgatctgccaaaacgcagtttcgggaataacttgaaacgagatgaaaacagaaatcagcaagcagggaactcccacctggggagaccaagggcactgcagaggccgctttcagtttacaaagatgaaagtccattaccaaatcagggccttgacagagtgaggagcaaagaaaataacacaagttggcgcaccctcggaacacgagcagaacggaacaaggaaaataacatgatgcctgctaaatggacgtctcacaagattccacagaagttaggagcaagaggagcggttcaatcaacccgagccagttgttccattgaagtcttcgtcgaggaagactgcacacatgaacctgctcggccggtgccaaagagcccaaatccttctgttctgaagctcaggcaaacaacaagcaaaagccttaagaaggagactgaattgctcaaggagaacccgctgcgcaacttccccctgagcaggcttaggtaatcagcatcttgctggttctgagaaacatctcgtacgttatgatttggtcgtatgtatggttgctgtgaggtgttgtgcccaaaaaaaaggctttattagcctctaaagcttagacgagcaatgtatgcctatggcattacccaagtgctgtaaggttctgcattatattgacacggcgtgcttattattgatagacctgcagatctcgtgcgtgcctatgtgaatcg

SEQ ID NO: 17712 - protein, 388 aa, Zea mays subsp. mays
  peptide (1)..(388): Ceres Seq. ID no. 12361280
  misc_feature (31)..(312): Homolog of NCBI NO: 21619502 NR Description: budding uninhibited by benzimidazoles 1 homolog,
  misc_feature (31)..(253): Homolog of NCBI NO: 29725501 NR Description: spindle checkpoint protein BubR1 [Gallus gallus]
  misc_feature (31)..(258): Homolog of NCBI NO: 22128593 NR Description: spindle checkpoint protein BubR1 [Xenopus laevis]
  misc_feature (33)..(316): Homolog of NCBI NO: 26396196 NR Description: Mitotic spindle checkpoint component mad3
  misc_feature (141)..(215): Homolog of NCBI NO: 25370767 NR Description: hypothetical protein At2g33560 [imported] -
  misc_feature (261)..(341): Homolog of NCBI NO: 25370767 NR Description: hypothetical protein At2g33560 [imported] -
  misc_feature (3)..(94): Homolog of NCBI NO: 25370767 NR Description: hypothetical protein At2g33560 [imported] -
  misc_feature (2)..(193): Homolog of NCBI NO: 5441887 NR Description: Similar to Arabidopsis thaliana BAC genomic
  misc_feature (3)..(383): Homolog of NCBI NO: 21593781 NR Description: unknown [Arabidopsis thaliana]
  misc_feature (3)..(383): Homolog of NCBI NO: 18403316 NR Description: expressed protein
MAAAEEMMAVLDKETLALMGLGNAAAAVVVECEKFKENARPLKRGRDVSKLNHALKAHADPAQRATLLEARKKMIEAIYEYQGEDPLQPWLDCIKWVQEYFPTGGECSGLVVLYEQCVRTLLDDERYKDDLRFLKVWLEYAGNCADAEVIYRFLEANQIGQGHAIYYMSYASLMESKNKLRKANEIFVLGIARKAKPLEKLEAVYRAFLRRSIKKREQEQDDTVDDDLPKRSFGNNLKRDENRNQQAGNSHLGRPRALQRPLSVYKDESPLPNQGLDRVRSKENNTSWRTLGTRAERNKENNMMPAKWTSHKIPQKLGARGAVQSTRASCSIEVFVEEDCTHEPARPVPKSPNPSVLKLRQTTSKSLKKETELLKENPLRNFPLSRLR

SEQ ID NO: 17713 - protein, 382 aa, Zea mays subsp. mays
  peptide (1)..(382): Ceres Seq. ID no. 12361281
  misc_feature (25)..(306): Homolog of NCBI NO: 21619502 NR Description: budding uninhibited by benzimidazoles 1 homolog,
  misc_feature (25)..(247): Homolog of NCBI NO: 29725501 NR Description: spindle checkpoint protein BubR1 [Gallus gallus]
  misc_feature (25)..(252): Homolog of NCBI NO: 22128593 NR Description: spindle checkpoint protein BubR1 [Xenopus laevis]
  misc_feature (27)..(310): Homolog of NCBI NO: 26396196 NR Description: Mitotic spindle checkpoint component mad3
  misc_feature (135)..(209): Homolog of NCBI NO: 25370767 NR Description: hypothetical protein At2g33560 [imported] -
  misc_feature (255)..(335): Homolog of NCBI NO: 25370767 NR Description: hypothetical protein At2g33560 [imported] -
  misc_feature (1)..(88): Homolog of NCBI NO: 25370767 NR Description: hypothetical protein At2g33560 [imported] -
  misc_feature (1)..(187): Homolog of NCBI NO: 5441887 NR Description: Similar to Arabidopsis thaliana BAC genomic
  misc_feature (1)..(377): Homolog of NCBI NO: 21593781 NR Description: unknown [Arabidopsis thaliana]
  misc_feature (1)..(377): Homolog of NCBI NO: 18403316 NR Description: expressed protein
MMAVLDKETLALMGLGNAAAAVVVECEKFKENARPLKRGRDVSKLNHALKAHADPAQRATLLEARKKMIEAIYEYQGEDPLQPWLDCIKWVQEYFPTGGECSGLVVLYEQCVRTLLDDERYKDDLRFLKVWLEYAGNCADAEVIYRFLEANQIGQGHAIYYMSYASLMESKNKLRKANEIFVLGIARKAKPLEKLEAVYRAFLRRSIKKREQEQDDTVDDDLPKRSFGNNLKRDENRNQQAGNSHLGRPRALQRPLSVYKDESPLPNQGLDRVRSKENNTSWRTLGTRAERNKENNMMPAKWTSHKIPQKLGARGAVQSTRASCSIEVFVEEDCTHEPARPVPKSPNPSVLKLRQTTSKSLKKETELLKENPLRNFPLSRLR

SEQ ID NO: 17714 - protein, 381 aa, Zea mays subsp. mays
  peptide (1)..(381): Ceres Seq. ID no. 12361282
  misc_feature (24)..(305): Homolog of NCBI NO: 21619502 NR Description: budding uninhibited by benzimidazoles 1 homolog,
  misc_feature (24)..(246): Homolog of NCBI NO: 29725501 NR Description: spindle checkpoint protein BubR1 [Gallus gallus]
  misc_feature (24)..(251): Homolog of NCBI NO: 22128593 NR Description: spindle checkpoint protein BubR1 [Xenopus laevis]
  misc_feature (26)..(309): Homolog of NCBI NO: 26396196 NR Description: Mitotic spindle checkpoint component mad3
  misc_feature (134)..(208): Homolog of NCBI NO: 25370767 NR Description: hypothetical protein At2g33560 [imported] -
  misc_feature (254)..(334): Homolog of NCBI NO: 25370767 NR Description: hypothetical protein At2g33560 [imported] -
  misc_feature (1)..(87): Homolog of NCBI NO: 25370767 NR Description: hypothetical protein At2g33560 [imported] -
  misc_feature (1)..(186): Homolog of NCBI NO: 5441887 NR Description: Similar to Arabidopsis thaliana BAC genomic
  misc_feature (1)..(376): Homolog of NCBI NO: 21593781 NR Description: unknown [Arabidopsis thaliana]
  misc_feature (1)..(376): Homolog of NCBI NO: 18403316 NR Description: expressed protein
MAVLDKETLALMGLGNAAAAVVVECEKFKENARPLKRGRDVSKLNHALKAHADPAQRATLLEARKKMIEAIYEYQGEDPLQPWLDCIKWVQEYFPTGGECSGLVVLYEQCVRTLLDDERYKDDLRFLKVWLEYAGNCADAEVIYRFLEANQIGQGHAIYYMSYASLMESKNKLRKANEIFVLGIARKAKPLEKLEAVYRAFLRRSIKKREQEQDDTVDDDLPKRSFGNNLKRDENRNQQAGNSHLGRPRALQRPLSVYKDESPLPNQGLDRVRSKENNTSWRTLGTRAERNKENNMMPAKWTSHKIPQKLGARGAVQSTRASCSIEVFVEEDCTHEPARPVPKSPNPSVLKLRQTTSKSLKKETELLKENPLRNFPLSRLR

SEQ ID NO: 17715 - DNA, 980 bp, Zea mays subsp. mays; identical to SEQ ID NO: 13583
  misc_feature (1)..(980): Ceres Seq. ID no. 13637386
  misc_feature: MA Experiment ID: 108527 Result: Down-regulated in Transcription
  misc_feature: MA Experiment 108527 PARAMETER Experiment Name: Zm_5mM_NO_P Parameter: Age (day) Value: 8
  misc_feature: MA Experiment 108527 PARAMETER Experiment Name: Zm_5mM_NO_P Parameter: Organism Value: Zea mays
  misc_feature: MA Experiment 108527 PARAMETER Experiment Name: Zm_5mM_NO_P Parameter: Plant Line Value: 35A19
  misc_feature: MA Experiment 108527 PARAMETER Experiment Name: Zm_5mM_NO_P Parameter: Timepoint (hr) Value: 6
  misc_feature: MA Experiment 108527 PARAMETER Experiment Name: Zm_5mM_NO_P Parameter: Tissue Value: Aerial
  misc_feature: MA Experiment 108527 PARAMETER Experiment Name: Zm_5mM_NO_P Parameter: Treatment Value: 5mM NO vs. No Treatment
  misc_feature: MA Experiment ID: 108530 Result: Down-regulated in Transcription
  misc_feature: MA Experiment 108530 PARAMETER Experiment Name: Zm_Imbibed_Seeds_P Parameter: Age (day) Value: 6 vs. 2
  misc_feature: MA Experiment 108530 PARAMETER Experiment Name: Zm_Imbibed_Seeds_P Parameter: Organism Value: Zea mays
  misc_feature: MA Experiment 108530 PARAMETER Experiment Name: Zm_Imbibed_Seeds_P Parameter: Plant Line Value: 35A19
  misc_feature: MA Experiment 108530 PARAMETER Experiment Name: Zm_Imbibed_Seeds_P Parameter: Tissue Value: Aerial vs. Embryo
  misc_feature: MA Experiment ID: 108535 Result: Up-regulated in Transcription
  misc_feature: MA Experiment 108535 PARAMETER Experiment Name: Zm_Meristem_P Parameter: Age (day) Value: 8
  misc_feature: MA Experiment 108535 PARAMETER Experiment Name: Zm_Meristem_P Parameter: Organism Value: Zea mays
  misc_feature: MA Experiment 108535 PARAMETER Experiment Name: Zm_Meristem_P Parameter: Plant Line Value: 35A19
  misc_feature: MA Experiment 108535 PARAMETER Experiment Name: Zm_Meristem_P Parameter: Tissue Value: Root Meristem vs. Above Root Meristem
  misc_feature: MA Experiment ID: 108544 Result: Down-regulated in Transcription
  misc_feature: MA Experiment ID: 20000108 Result: Up-regulated in Transcription
  misc_feature: MA Experiment 20000108 PARAMETER Experiment Name: Zm_Root-Tips_P Parameter: Age (day) Value: 12
  misc_feature: MA Experiment 20000108 PARAMETER Experiment Name: Zm_Root-Tips_P Parameter: Organism Value: Zea mays
  misc_feature: MA Experiment 20000108 PARAMETER Experiment Name: Zm_Root-Tips_P Parameter: Tissue Value: Root tips vs. Root mid region    35
  misc_feature: MA Experiment 20000108 PARAMETER Experiment Name: Zm_Root-Tips_P Parameter: Tissue Value: Root tips vs. Root mid region   Sequence Listing-Misc Features (4)
  misc_feature: MA Experiment ID: 20000487 Result: Up-regulated in Transcription
  misc_feature: MA Experiment 20000487 PARAMETER Experiment Name: Zm_50mM_NH4NO3_L_to_H_P Parameter: Organism Value: Zea mays
  misc_feature: MA Experiment 20000487 PARAMETER Experiment Name: Zm_50mM_NH4NO3_L_to_H_P Parameter: Timepoint (hr) Value: 4
  misc_feature: MA Experiment 20000487 PARAMETER Experiment Name: Zm_50mM_NH4NO3_L_to_H_P Parameter: Tissue Value: Leaves
  misc_feature: MA Experiment 20000487 PARAMETER Experiment Name: Zm_50mM_NH4NO3_L_to_H_P Parameter: Treatment Value: 50mM NH4NO3 vs. 100mM Mannitol
  misc_feature: MA Experiment ID: 20000488 Result: Up-regulated in Transcription
  misc_feature: MA Experiment 20000488 PARAMETER Experiment Name: Zm_50mM_NH4NO3_L_to_H_P Parameter: Organism Value: Zea mays
  misc_feature: MA Experiment 20000488 PARAMETER Experiment Name: Zm_50mM_NH4NO3_L_to_H_P Parameter: Timepoint (hr) Value: 8
  misc_feature: MA Experiment 20000488 PARAMETER Experiment Name: Zm_50mM_NH4NO3_L_to_H_P Parameter: Tissue Value: Leaves
  misc_feature: MA Experiment 20000488 PARAMETER Experiment Name: Zm_50mM_NH4NO3_L_to_H_P Parameter: Treatment Value: 50mM NH4NO3 vs. 100mM Mannitol
  misc_feature: MA Experiment ID: 20000492 Result: Up-regulated in Transcription
  misc_feature: MA Experiment 20000492 PARAMETER Experiment Name: Zm_Hybrid_Seed_Dev_P Parameter: DAP Value: 12
  misc_feature: MA Experiment 20000492 PARAMETER Experiment Name: Zm_Hybrid_Seed_Dev_P Parameter: Organism Value: Zea mays
  misc_feature: MA Experiment 20000492 PARAMETER Experiment Name: Zm_Hybrid_Seed_Dev_P Parameter: Plant Line Value: 35A19
  misc_feature: MA Experiment 20000492 PARAMETER Experiment Name: Zm_Hybrid_Seed_Dev_P Parameter: Tissue Value: Fert Kernel vs. Unfert Floret
  misc_feature: MA Experiment ID: 20000534 Result: Down-regulated in Transcription
  misc_feature: MA Experiment 20000534 PARAMETER Experiment Name: Zm_Hybrid_Pollen_P Parameter: Age (day) Value: 8
  misc_feature: MA Experiment 20000534 PARAMETER Experiment Name: Zm_Hybrid_Pollen_P Parameter: Organism Value: Zea mays
  misc_feature: MA Experiment 20000534 PARAMETER Experiment Name: Zm_Hybrid_Pollen_P Parameter: Plant Line Value: 35A19
  misc_feature: MA Experiment 20000534 PARAMETER Experiment Name: Zm_Hybrid_Pollen_P Parameter: Tissue Value: Pollen vs. Aerial
  misc_feature: MA Experiment ID: 20000535 Result: Up-regulated in Transcription
  misc_feature: MA Experiment 20000535 PARAMETER Experiment Name: Zm_Hybrid_Seed_Dev_P Parameter: DAP Value: 30 vs. 12
  misc_feature: MA Experiment 20000535 PARAMETER Experiment Name: Zm_Hybrid_Seed_Dev_P Parameter: Organism Value: Zea mays
  misc_feature: MA Experiment 20000535 PARAMETER Experiment Name: Zm_Hybrid_Seed_Dev_P Parameter: Plant Line Value: 35A19
  misc_feature: MA Experiment 20000535 PARAMETER Experiment Name: Zm_Hybrid_Seed_Dev_P Parameter: Tissue Value: Embryo vs. Unfert Floret
  misc_feature: MA Experiment ID: 20000632 Result: Down-regulated in Transcription
  misc_feature: MA Experiment 20000632 PARAMETER Experiment Name: Zm_Herbicide-Treatments_P Parameter: Timepoint (hr) Value: 4
  misc_feature: MA Experiment 20000632 PARAMETER Experiment Name: Zm_Herbicide-Treatments_P Parameter: Tissue Value: Aerial
  misc_feature: MA Experiment 20000632 PARAMETER Experiment Name: Zm_Herbicide-Treatments_P Parameter: Treatment Value: Glean vs. No Treatment
  misc_feature: MA Experiment ID: 20000633 Result: Down-regulated in Transcription
  misc_feature: MA Experiment 20000633 PARAMETER Experiment Name: Zm_Herbicide-Treatments_P Parameter: Timepoint (hr) Value: 4
  misc_feature: MA Experiment 20000633 PARAMETER Experiment Name: Zm_Herbicide-Treatments_P Parameter: Tissue Value: Aerial
  misc_feature: MA Experiment 20000633 PARAMETER Experiment Name: Zm_Herbicide-Treatments_P Parameter: Treatment Value: Trimec vs. No Treatment

SEQ ID NO: 17716 - protein, 326 aa, Zea mays subsp. mays; identical to SEQ ID NO: 13584
  peptide (1)..(326): Ceres Seq. ID no. 13637387
  misc_feature (54)..(230): Pfam Name: Nucleoplasmin Pfam Description: Nucleoplasmin
  misc_feature (31)..(324): Homolog of NCBI NO: 7716948 NR Description: histone deacetylase 2 isoform b [Zea mays]
  misc_feature (31)..(324): Homolog of NCBI NO: 7489751 NR Description: histone deacetylase (EC 3.5.1.-) HD2-p39,
  misc_feature (31)..(324): Homolog of NCBI NO: 7716950 NR Description: histone deacetylase 2 isoform c [Zea mays]
  misc_feature (31)..(324): Homolog of NCBI NO: 7804960 NR Description: putative histone deacetylase HD2 [Oryza sativa]
  misc_feature (256)..(256): Xaa is any aa, unknown or other
  misc_feature (303)..(303): Xaa is any aa, unknown or other
  misc_feature (322)..(322): Xaa is any aa, unknown or other

SEQ ID NO: 17717 - protein, 296 aa, Zea mays subsp. mays; identical to SEQ ID NO: 13585
  peptide (1)..(296): Ceres Seq. ID no. 13637388
  misc_feature (24)..(200): Pfam Name: Nucleoplasmin Pfam Description: Nucleoplasmin
  misc_feature (1)..(294): Homolog of NCBI NO: 7716948 NR Description: histone deacetylase 2 isoform b [Zea mays]
  misc_feature (1)..(294): Homolog of NCBI NO: 7489751 NR Description: histone deacetylase (EC 3.5.1.-) HD2-p39,
  misc_feature (1)..(294): Homolog of NCBI NO: 7716950 NR Description: histone deacetylase 2 isoform c [Zea mays]
  misc_feature (1)..(294): Homolog of NCBI NO: 7804960 NR Description: putative histone deacetylase HD2 [Oryza sativa]
  misc_feature (226)..(226): Xaa is any aa, unknown or other
  misc_feature (273)..(273): Xaa is any aa, unknown or other
  misc_feature (292)..(292): Xaa is any aa, unknown or other

SEQ ID NO: 17718 - protein, 255 aa, Zea mays subsp. mays; identical to SEQ ID NO: 13586
  peptide (1)..(255): Ceres Seq. ID no. 13637389
  misc_feature (1)..(159): Pfam Name: Nucleoplasmin Pfam Description: Nucleoplasmin
  misc_feature (1)..(253): Homolog of NCBI NO: 7716948 NR Description: histone deacetylase 2 isoform b [Zea mays]
  misc_feature (1)..(253): Homolog of NCBI NO: 7489751 NR Description: histone deacetylase (EC 3.5.1.-) HD2-p39,
  misc_feature (1)..(253): Homolog of NCBI NO: 7716950 NR Description: histone deacetylase 2 isoform c [Zea mays]
  misc_feature (1)..(253): Homolog of NCBI NO: 7804960 NR Description: putative histone deacetylase HD2 [Oryza sativa]
  misc_feature (185)..(185): Xaa is any aa, unknown or other
  misc_feature (232)..(232): Xaa is any aa, unknown or other
  misc_feature (251)..(251): Xaa is any aa, unknown or other

SEQ ID NO: 17719 - DNA, 1553 bp, Zea mays subsp. mays; identical to SEQ ID NO: 5519
  misc_feature (1)..(1553): Ceres Seq. ID no. 12350501
  misc_feature: MA Experiment ID: 108522 Result: Up-regulated in Transcription
  misc_feature: MA Experiment 108522 PARAMETER Experiment Name: Zm_42deg_Heat_P Parameter: Age (day) Value: 8
  misc_feature: MA Experiment 108522 PARAMETER Experiment Name: Zm_42deg_Heat_P Parameter: Organism Value: Zea mays
  misc_feature: MA Experiment 108522 PARAMETER Experiment Name: Zm_42deg_Heat_P Parameter: Plant Line Value: 35A19
  misc_feature: MA Experiment 108522 PARAMETER Experiment Name: Zm_42deg_Heat_P Parameter: Temperature (deg C) Value: 42 vs. 22
  misc_feature: MA Experiment 108522 PARAMETER Experiment Name: Zm_42deg_Heat_P Parameter: Timepoint (hr) Value: 1
  misc_feature: MA Experiment 108522 PARAMETER Experiment Name: Zm_42deg_Heat_P Parameter: Tissue Value: Aerial
  misc_feature: MA Experiment ID: 108533 Result: Up-regulated in Transcription
  misc_feature: MA Experiment 108533 PARAMETER Experiment Name: Zm_4deg_Cold_P Parameter: Age (hr) Value: 8
  misc_feature: MA Experiment 108533 PARAMETER Experiment Name: Zm_4deg_Cold_P Parameter: Organism Value: Zea mays
  misc_feature: MA Experiment 108533 PARAMETER Experiment Name: Zm_4deg_Cold_P Parameter: Plant Line Value: 35A19
  misc_feature: MA Experiment 108533 PARAMETER Experiment Name: Zm_4deg_Cold_P Parameter: Temperature (deg C) Value: 4 vs. 22
  misc_feature: MA Experiment 108533 PARAMETER Experiment Name: Zm_4deg_Cold_P Parameter: Timepoint (hr) Value: 1
  misc_feature: MA Experiment 108533 PARAMETER Experiment Name: Zm_4deg_Cold_P Parameter: Tissue Value: Aerial
  misc_feature: MA Experiment ID: 108534 Result: Up-regulated in Transcription
  misc_feature: MA Experiment 108534 PARAMETER Experiment Name: Zm_4deg_Cold_P Parameter: Age (hr) Value: 8
  misc_feature: MA Experiment 108534 PARAMETER Experiment Name: Zm_4deg_Cold_P Parameter: Organism Value: Zea mays
  misc_feature: MA Experiment 108534 PARAMETER Experiment Name: Zm_4deg_Cold_P Parameter: Plant Line Value: 35A19
  misc_feature: MA Experiment 108534 PARAMETER Experiment Name: Zm_4deg_Cold_P Parameter: Temperature (deg C) Value: 4 vs. 22
  misc_feature: MA Experiment 108534 PARAMETER Experiment Name: Zm_4deg_Cold_P Parameter: Timepoint (hr) Value: 6
  misc_feature: MA Experiment 108534 PARAMETER Experiment Name: Zm_4deg_Cold_P Parameter: Tissue Value: Aerial
  misc_feature: MA Experiment ID: 108543 Result: Down-regulated in Transcription
  misc_feature: MA Experiment ID: 20000480 Result: Down-regulated in Transcription
  misc_feature: MA Experiment 20000480 PARAMETER Experiment Name: Zm_Drought_P Parameter: Age (day) Value: 11
  misc_feature: MA Experiment 20000480 PARAMETER Experiment Name: Zm_Drought_P Parameter: Organism Value: Zea mays
  misc_feature: MA Experiment 20000480 PARAMETER Experiment Name: Zm_Drought_P Parameter: Plant Line Value: 35A19
  misc_feature: MA Experiment 20000480 PARAMETER Experiment Name: Zm_Drought_P Parameter: Timepoint (hr) Value: 72
  misc_feature: MA Experiment 20000480 PARAMETER Experiment Name: Zm_Drought_P Parameter: Tissue Value: Aerial
  misc_feature: MA Experiment 20000480 PARAMETER Experiment Name: Zm_Drought_P Parameter: Treatment Value: Drought vs. No Drought

SEQ ID NO: 17720 - protein, 336 aa, Zea mays subsp. mays; identical to SEQ ID NO: 5520
  peptide (1)..(336): Ceres Seq. ID no. 12350502
  misc_feature (153)..(277): Pfam Name: DnaJ C terminal region Pfam Description: DnaJ C terminal region

SEQ ID NO: 17721 - protein, 330 aa, Zea mays subsp. mays; identical to SEQ ID NO: 5521
  peptide (1)..(330): Ceres Seq. ID no. 12350503
  misc_feature (147)..(271): Pfam Name: DnaJ C terminal region Pfam Description: DnaJ C terminal region

SEQ ID NO: 17722 - protein, 235 aa, Zea mays subsp. mays; identical to SEQ ID NO: 5522
  peptide (1)..(235): Ceres Seq. ID no. 12350504
  misc_feature (52)..(176): Pfam Name: DnaJ C terminal region Pfam Description: DnaJ C terminal region

SEQ ID NO: 17723 - DNA, 1508 bp, Zea mays subsp. mays
  misc_feature (1)..(1508): Ceres Seq. ID no. 12362611
  misc_feature: MA Experiment ID: 108543 Result: Up-regulated in Transcription
  misc_feature: MA Experiment ID: 108556 Result: Down-regulated in Transcription
  misc_feature: MA Experiment 108556 PARAMETER Experiment Name: Zm_Drought_P Parameter: Age (day) Value: 9
  misc_feature: MA Experiment 108556 PARAMETER Experiment Name: Zm_Drought_P Parameter: Organism Value: Zea mays
  misc_feature: MA Experiment 108556 PARAMETER Experiment Name: Zm_Drought_P Parameter: Plant Line Value: 35A19
  misc_feature: MA Experiment 108556 PARAMETER Experiment Name: Zm_Drought_P Parameter: Timepoint (hr) Value: 24
  misc_feature: MA Experiment 108556 PARAMETER Experiment Name: Zm_Drought_P Parameter: Tissue Value: Aerial
  misc_feature: MA Experiment 108556 PARAMETER Experiment Name: Zm_Drought_P Parameter: Treatment Value: Drought vs. No Drought
  misc_feature: MA Experiment ID: 20000477 Result: Down-regulated in Transcription
  misc_feature: MA Experiment 20000477 PARAMETER Experiment Name: Zm_5mM_SA_P Parameter: Age (day) Value: 10
  misc_feature: MA Experiment 20000477 PARAMETER Experiment Name: Zm_5mM_SA_P Parameter: Organism Value: Zea mays
  misc_feature: MA Experiment 20000477 PARAMETER Experiment Name: Zm_5mM_SA_P Parameter: Plant Line Value: 35A19
  misc_feature: MA Experiment 20000477 PARAMETER Experiment Name: Zm_5mM_SA_P Parameter: Timepoint (hr) Value: 48
  misc_feature: MA Experiment 20000477 PARAMETER Experiment Name: Zm_5mM_SA_P Parameter: Tissue Value: Aerial
  misc_feature: MA Experiment 20000477 PARAMETER Experiment Name: Zm_5mM_SA_P Parameter: Treatment Value: 5mM SA vs. No Treatment
  misc_feature: MA Experiment ID: 20000479 Result: Down-regulated in Transcription
  misc_feature: MA Experiment 20000479 PARAMETER Experiment Name: Zm_Drought_P Parameter: Age (day) Value: 10
  misc_feature: MA Experiment 20000479 PARAMETER Experiment Name: Zm_Drought_P Parameter: Organism Value: Zea mays
  misc_feature: MA Experiment 20000479 PARAMETER Experiment Name: Zm_Drought_P Parameter: Plant Line Value: 35A19
  misc_feature: MA Experiment 20000479 PARAMETER Experiment Name: Zm_Drought_P Parameter: Timepoint (hr) Value: 48
  misc_feature: MA Experiment 20000479 PARAMETER Experiment Name: Zm_Drought_P Parameter: Tissue Value: Aerial
  misc_feature: MA Experiment 20000479 PARAMETER Experiment Name: Zm_Drought_P Parameter: Treatment Value: Drought vs. No Drought
  misc_feature: MA Experiment ID: 20000480 Result: Down-regulated in Transcription
  misc_feature: MA Experiment 20000480 PARAMETER Experiment Name: Zm_Drought_P Parameter: Age (day) Value: 11
  misc_feature: MA Experiment 20000480 PARAMETER Experiment Name: Zm_Drought_P Parameter: Organism Value: Zea mays
  misc_feature: MA Experiment 20000480 PARAMETER Experiment Name: Zm_Drought_P Parameter: Plant Line Value: 35A19
  misc_feature: MA Experiment 20000480 PARAMETER Experiment Name: Zm_Drought_P Parameter: Timepoint (hr) Value: 72
  misc_feature: MA Experiment 20000480 PARAMETER Experiment Name: Zm_Drought_P Parameter: Tissue Value: Aerial
  misc_feature: MA Experiment 20000480 PARAMETER Experiment Name: Zm_Drought_P Parameter: Treatment Value: Drought vs. No Drought
gcacgagaccattacctagaacatcctaatcaaaaaggccgctctctctgccacactcgggtgcctccaccaccaccagtagcagcagcagcaggatcaaaaggccaatgggggcgcacgccaccgcggccgcggccgccgtcctgctcgtcgccacctgcgttgcggcggtggcggcggcggcggcggcggcgctgctgcagcacgagcccggcaggatctcaggggacgcggtgggcgtgctggacgacgaccccgtggggaagctgaaggtgttcgtgtacgagatgccgcgcaagtacaacaggatgctgctggacaaggacagccggtgcctgcaccacatgttcgcggcggagatcttcatgcaccagttcctgctgtcgagcgcggtgcggacgctggacccggaggaggccgactggttctacacgcccgcgtacaccacctgcgacctcacgccgcagggcttcccgctgccgttccgggcgccgcggatcatgcgcagcgccatccgctacgtggccaccacgtggccnttctggaaccgcaccgacggcgccgaccacttcttcctcacgccgcacgacttcggcgcctgcttccactaccaggaggagcgcgccatggagcggggcatcctgccgctgctccgccgcgccacgctggtgcagacgttcggccagcgcaaccacgtgtgcctgcaggacggctccatcaccgtcccgccctacgccgacccgcgcaagatgcaggcgcacctcatcagccccggcacgccgcgctccatcttcgtctacttcaggggcctcttctacgacatgggcaacgaccccgagggcggctactacgccaggggcgctcgcgcgtcggtgtgggagaacttcaaggacaacccgctgttcgacatctcgacggagcacccgtcgacgtactacgaggacatgcagcgcgccatcttctgcctgtgcccgctggggtgggcgccctggagcccccggctggtggaggcggtggtgttcgggtgcatccccgtcatcatcgccgacgacatcgtgctgccgttcgcggacgccatcccctgggaggacatcagcgtgttcgtggcggagcgggacgtgccgcgcctcgactccatcctcacctccatcccgctgcccgacatcctgcggaggcagcgcctgctggcgcgggactccgtcaagcaggcgctgctgttccaccagcccgccaggcccggggacgccttccaccaggtgctcaacgggctggcgcggaagctgccgcacggcgagggcgtgttcctgcagcccggggagaaggcgctcgactgggacgccggactccagagcgacctcaagccctggtagtggactggactcgttgtacatctcttcgtgttcctttgtactctttcatttgacatgacatggatggatcacgcattagtttttgtaccacggcccgtttacatgcagcagcaatatactaatatatagtgtatttcc

SEQ ID NO: 17724 - protein, 420 aa, Zea mays subsp. mays
  peptide (1)..(420): Ceres Seq. ID no. 12362612
  misc_feature (56)..(360): Pfam Name: Exostosin family Pfam Description: Exostosin family
  misc_feature (1)..(420): Homolog of NCBI NO: 34907044 NR Description: hypothetical protein~similar to Arabidopsis
  misc_feature (53)..(392): Homolog of NCBI NO: 9758008 NR Description: contains similarity to limonene
  misc_feature (1)..(392): Homolog of NCBI NO: 15237173 NR Description: putative protein; protein id: At5g22940.1
  misc_feature (49)..(392): Homolog of NCBI NO: 25407954 NR Description: hypothetical protein At2g28110 [imported] -
  misc_feature (80)..(420): Homolog of NCBI NO: 10176877 NR Description: gb|AAC80624.1~gene_id:MAC9.17~strong similarity
  misc_feature (80)..(420): Homolog of NCBI NO: 23821292 NR Description: pectin-glucuronyltransferase [Nicotiana
  misc_feature (11)..(420): Homolog of NCBI NO: 18642697 NR Description: Unknown protein [Oryza sativa]
  misc_feature (15)..(420): Homolog of NCBI NO: 15223522 NR Description: unknown protein; protein id: At1g27440.1
  misc_feature (9)..(420): Homolog of NCBI NO: 21592991 NR Description: unknown [Arabidopsis thaliana]
  misc_feature (9)..(420): Homolog of NCBI NO: 18424516 NR Description: putative protein
  misc_feature (144)..(144): Xaa is any aa, unknown or other
MGAHATAAAAAVLLVATCVAAVAAAAAAALLQHEPGRISGDAVGVLDDDPVGKLKVFVYEMPRKYNRMLLDKDSRCLHHMFAAEIFMHQFLLSSAVRTLDPEEADWFYTPAYTTCDLTPQGFPLPFRAPRIMRSAIRYVATTWXFWNRTDGADHFFLTPHDFGACFHYQEERAMERGILPLLRRATLVQTFGQRNHVCLQDGSITVPPYADPRKMQAHLISPGTPRSIFVYFRGLFYDMGNDPEGGYYARGARASVWENFKDNPLFDISTEHPSTYYEDMQRAIFCLCPLGWAPWSPRLVEAVVFGCIPVIIADDIVLPFADAIPWEDISVFVAERDVPRLDSILTSIPLPDILRRQRLLARDSVKQALLFHQPARPGDAFHQVLNGLARKLPHGEGVFLQPGEKALDWDAGLQSDLKPW

SEQ ID NO: 17725 - protein, 360 aa, Zea mays subsp. mays
  peptide (1)..(360): Ceres Seq. ID no. 12362613
  misc_feature (1)..(300): Pfam Name: Exostosin family Pfam Description: Exostosin family
  misc_feature (1)..(332): Homolog of NCBI NO: 9758008 NR Description: contains similarity to limonene
  misc_feature (1)..(332): Homolog of NCBI NO: 15237173 NR Description: putative protein; protein id: At5g22940.1
  misc_feature (1)..(332): Homolog of NCBI NO: 25407954 NR Description: hypothetical protein At2g28110 [imported] -
  misc_feature (20)..(360): Homolog of NCBI NO: 10176877 NR Description: gb|AAC80624.1~gene_id:MAC9.17~strong similarity
  misc_feature (20)..(360): Homolog of NCBI NO: 23821292 NR Description: pectin-glucuronyltransferase [Nicotiana
  misc_feature (1)..(360): Homolog of NCBI NO: 18642697 NR Description: Unknown protein [Oryza sativa]
  misc_feature (1)..(360): Homolog of NCBI NO: 15223522 NR Description: unknown protein; protein id: At1g27440.1
  misc_feature (1)..(360): Homolog of NCBI NO: 21592991 NR Description: unknown [Arabidopsis thaliana]
  misc_feature (1)..(360): Homolog of NCBI NO: 18424516 NR Description: putative protein
  misc_feature (1)..(360): Homolog of NCBI NO: 34907044 NR Description: hypothetical protein~similar to Arabidopsis
  misc_feature (84)..(84): Xaa is any aa, unknown or other
MPRKYNRMLLDKDSRCLHHMFAAEIFMHQFLLSSAVRTLDPEEADWFYTPAYTTCDLTPQGFPLPFRAPRIMRSAIRYVATTWXFWNRTDGADHFFLTPHDFGACFHYQEERAMERGILPLLRRATLVQTFGQRNHVCLQDGSITVPPYADPRKMQAHLISPGTPRSIFVYFRGLFYDMGNDPEGGYYARGARASVWENFKDNPLFDISTEHPSTYYEDMQRAIFCLCPLGWAPWSPRLVEAVVFGCIPVIIADDIVLPFADAIPWEDISVFVAERDVPRLDSILTSIPLPDILRRQRLLARDSVKQALLFHQPARPGDAFHQVLNGLARKLPHGEGVFLQPGEKALDWDAGLQSDLKPW

SEQ ID NO: 17726 - protein, 353 aa, Zea mays subsp. mays
  peptide (1)..(353): Ceres Seq. ID no. 12362614
  misc_feature (1)..(293): Pfam Name: Exostosin family Pfam Description: Exostosin family
  misc_feature (1)..(325): Homolog of NCBI NO: 9758008 NR Description: contains similarity to limonene
  misc_feature (1)..(325): Homolog of NCBI NO: 15237173 NR Description: putative protein; protein id: At5g22940.1
  misc_feature (1)..(325): Homolog of NCBI NO: 25407954 NR Description: hypothetical protein At2g28110 [imported] -
  misc_feature (13)..(353): Homolog of NCBI NO: 10176877 NR Description: gb|AAC80624.1~gene_id:MAC9.17~strong similarity
  misc_feature (13)..(353): Homolog of NCBI NO: 23821292 NR Description: pectin-glucuronyltransferase [Nicotiana
  misc_feature (1)..(353): Homolog of NCBI NO: 18642697 NR Description: Unknown protein [Oryza sativa]
  misc_feature (1)..(353): Homolog of NCBI NO: 15223522 NR Description: unknown protein; protein id: At1g27440.1
  misc_feature (1)..(353): Homolog of NCBI NO: 21592991 NR Description: unknown [Arabidopsis thaliana]
  misc_feature (1)..(353): Homolog of NCBI NO: 18424516 NR Description: putative protein
  misc_feature (1)..(353): Homolog of NCBI NO: 34907044 NR Description: hypothetical protein~similar to Arabidopsis
  misc_feature (77)..(77): Xaa is any aa, unknown or other
MLLDKDSRCLHHMFAAEIFMHQFLLSSAVRTLDPEEADWFYTPAYTTCDLTPQGFPLPFRAPRIMRSAIRYVATTWXFWNRTDGADHFFLTPHDFGACFHYQEERAMERGILPLLRRATLVQTFGQRNHVCLQDGSITVPPYADPRKMQAHLISPGTPRSIFVYFRGLFYDMGNDPEGGYYARGARASVWENFKDNPLFDISTEHPSTYYEDMQRAIFCLCPLGWAPWSPRLVEAVVFGCIPVIIADDIVLPFADAIPWEDISVFVAERDVPRLDSILTSIPLPDILRRQRLLARDSVKQALLFHQPARPGDAFHQVLNGLARKLPHGEGVFLQPGEKALDWDAGLQSDLKPW

SEQ ID NO: 17727 - DNA, 494 bp, Zea mays subsp. mays
  misc_feature (1)..(494): Ceres Seq. ID no. 11030852
  misc_feature: MA Experiment ID: 108522 Result: Up-regulated in Transcription
  misc_feature: MA Experiment 108522 PARAMETER Experiment Name: Zm_42deg_Heat_P Parameter: Age (day) Value: 8
  misc_feature: MA Experiment 108522 PARAMETER Experiment Name: Zm_42deg_Heat_P Parameter: Organism Value: Zea mays
  misc_feature: MA Experiment 108522 PARAMETER Experiment Name: Zm_42deg_Heat_P Parameter: Plant Line Value: 35A19
  misc_feature: MA Experiment 108522 PARAMETER Experiment Name: Zm_42deg_Heat_P Parameter: Temperature (deg C) Value: 42 vs. 22
  misc_feature: MA Experiment 108522 PARAMETER Experiment Name: Zm_42deg_Heat_P Parameter: Timepoint (hr) Value: 1
  misc_feature: MA Experiment 108522 PARAMETER Experiment Name: Zm_42deg_Heat_P Parameter: Tissue Value: Aerial
  misc_feature: MA Experiment ID: 108523 Result: Up-regulated in Transcription
  misc_feature: MA Experiment 108523 PARAMETER Experiment Name: Zm_42deg_Heat_P Parameter: Age (day) Value: 8
  misc_feature: MA Experiment 108523 PARAMETER Experiment Name: Zm_42deg_Heat_P Parameter: Organism Value: Zea mays
  misc_feature: MA Experiment 108523 PARAMETER Experiment Name: Zm_42deg_Heat_P Parameter: Plant Line Value: 35A19
  misc_feature: MA Experiment 108523 PARAMETER Experiment Name: Zm_42deg_Heat_P Parameter: Temperature (deg C) Value: 42 vs. 22
  misc_feature: MA Experiment 108523 PARAMETER Experiment Name: Zm_42deg_Heat_P Parameter: Timepoint (hr) Value: 6
  misc_feature: MA Experiment 108523 PARAMETER Experiment Name: Zm_42deg_Heat_P Parameter: Tissue Value: Aerial
  misc_feature: MA Experiment ID: 108535 Result: Up-regulated in Transcription
  misc_feature: MA Experiment 108535 PARAMETER Experiment Name: Zm_Meristem_P Parameter: Age (day) Value: 8
  misc_feature: MA Experiment 108535 PARAMETER Experiment Name: Zm_Meristem_P Parameter: Organism Value: Zea mays
  misc_feature: MA Experiment 108535 PARAMETER Experiment Name: Zm_Meristem_P Parameter: Plant Line Value: 35A19
  misc_feature: MA Experiment 108535 PARAMETER Experiment Name: Zm_Meristem_P Parameter: Tissue Value: Root Meristem vs. Above Root Meristem
  misc_feature: MA Experiment ID: 108544 Result: Down-regulated in Transcription
  misc_feature: MA Experiment ID: 20000108 Result: Up-regulated in Transcription
  misc_feature: MA Experiment 20000108 PARAMETER Experiment Name: Zm_Root-Tips_P Parameter: Age (day) Value: 12
  misc_feature: MA Experiment 20000108 PARAMETER Experiment Name: Zm_Root-Tips_P Parameter: Organism Value: Zea mays
  misc_feature: MA Experiment 20000108 PARAMETER Experiment Name: Zm_Root-Tips_P Parameter: Tissue Value: Root tips vs. Root mid region    35
  misc_feature: MA Experiment 20000108 PARAMETER Experiment Name: Zm_Root-Tips_P Parameter: Tissue Value: Root tips vs. Root mid region   Sequence Listing-Misc Features (4)
  misc_feature: MA Experiment ID: 20000487 Result: Up-regulated in Transcription
  misc_feature: MA Experiment 20000487 PARAMETER Experiment Name: Zm_50mM_NH4NO3_L_to_H_P Parameter: Organism Value: Zea mays
  misc_feature: MA Experiment 20000487 PARAMETER Experiment Name: Zm_50mM_NH4NO3_L_to_H_P Parameter: Timepoint (hr) Value: 4
  misc_feature: MA Experiment 20000487 PARAMETER Experiment Name: Zm_50mM_NH4NO3_L_to_H_P Parameter: Tissue Value: Leaves
  misc_feature: MA Experiment 20000487 PARAMETER Experiment Name: Zm_50mM_NH4NO3_L_to_H_P Parameter: Treatment Value: 50mM NH4NO3 vs. 100mM Mannitol
  misc_feature: MA Experiment ID: 20000632 Result: Down-regulated in Transcription
  misc_feature: MA Experiment 20000632 PARAMETER Experiment Name: Zm_Herbicide-Treatments_P Parameter: Timepoint (hr) Value: 4
  misc_feature: MA Experiment 20000632 PARAMETER Experiment Name: Zm_Herbicide-Treatments_P Parameter: Tissue Value: Aerial
  misc_feature: MA Experiment 20000632 PARAMETER Experiment Name: Zm_Herbicide-Treatments_P Parameter: Treatment Value: Glean vs. No Treatment
  misc_feature: MA Experiment ID: 20000633 Result: Down-regulated in Transcription
  misc_feature: MA Experiment 20000633 PARAMETER Experiment Name: Zm_Herbicide-Treatments_P Parameter: Timepoint (hr) Value: 4
  misc_feature: MA Experiment 20000633 PARAMETER Experiment Name: Zm_Herbicide-Treatments_P Parameter: Tissue Value: Aerial
  misc_feature: MA Experiment 20000633 PARAMETER Experiment Name: Zm_Herbicide-Treatments_P Parameter: Treatment Value: Trimec vs. No Treatment
atcaagatgcgtgagatcgctgaagcttaccttggcagcacgatcaagaatgctgttgtcacggtccctgcctacttcaacgactcacagaggcaggccacgaaggatgctggggtgattgctggcctcaatgtgctgcgtatcatcaatgagccaaccgctgctgctattgcctatggtcttgacaagaaggcaaccagcgtcggtgagaagaatgtcctcatctttgaccttggaggtggtaccttcgatgtctccctccttactattgaggaaggtatctttgaggtcaaggccacagctggcgacacccatcttgggggtgaggactttgacaacaggatggtcaaccactttgtccaggagttcaagaggaagaacaagaaggatatcactggcaacccgagggctctccggaggctgaggacctcttgtgagagggccaagagaactctgtcttccactgcccagaccaccattgagattgactcgct

SEQ ID NO: 17728 - protein, 164 aa, Zea mays subsp. mays
  peptide (1)..(164): Ceres Seq. ID no. 11030853
  misc_feature (1)..(163): Pfam Name: Hsp70 protein Pfam Description: Hsp70 protein
  misc_feature (1)..(163): Homolog of NCBI NO: 21664287 NR Description: heat shock protein 70 [Oryza sativa (indica
  misc_feature (1)..(163): Homolog of NCBI NO: 1076746 NR Description: dnaK-type molecular chaperone hsp70 - rice
IKMREIAEAYLGSTIKNAVVTVPAYFNDSQRQATKDAGVIAGLNVLRIINEPTAAAIAYGLDKKATSVGEKNVLIFDLGGGTFDVSLLTIEEGIFEVKATAGDTHLGGEDFDNRMVNHFVQEFKRKNKKDITGNPRALRRLRTSCERAKRTLSSTAQTTIEIDS

SEQ ID NO: 17729 - protein, 162 aa, Zea mays subsp. mays
  peptide (1)..(162): Ceres Seq. ID no. 11030854
  misc_feature (1)..(161): Pfam Name: Hsp70 protein Pfam Description: Hsp70 protein
  misc_feature (1)..(161): Homolog of NCBI NO: 21664287 NR Description: heat shock protein 70 [Oryza sativa (indica
  misc_feature (1)..(161): Homolog of NCBI NO: 1076746 NR Description: dnaK-type molecular chaperone hsp70 - rice
MREIAEAYLGSTIKNAVVTVPAYFNDSQRQATKDAGVIAGLNVLRIINEPTAAAIAYGLDKKATSVGEKNVLIFDLGGGTFDVSLLTIEEGIFEVKATAGDTHLGGEDFDNRMVNHFVQEFKRKNKKDITGNPRALRRLRTSCERAKRTLSSTAQTTIEIDS

SEQ ID NO: 17730 - protein, 97 aa, Zea mays subsp. mays
  peptide (1)..(97): Ceres Seq. ID no. 11030855
MCCVSSMSQPLLLLPMVLTRRQPASVRRMSSSLTLEVVPSMSPSLLLRKVSLRSRPQLATPILGVRTLTTGWSTTLSRSSRGRTRRISLATRGLSGG

SEQ ID NO: 17731 - DNA, 1275 bp, Zea mays subsp. mays; identical to SEQ ID NO: 7199
  misc_feature (1)..(1275): Ceres Seq. ID no. 12366288
  misc_feature: MA Experiment ID: 20000534 Result: Down-regulated in Transcription
  misc_feature: MA Experiment 20000534 PARAMETER Experiment Name: Zm_Hybrid_Pollen_P Parameter: Age (day) Value: 8
  misc_feature: MA Experiment 20000534 PARAMETER Experiment Name: Zm_Hybrid_Pollen_P Parameter: Organism Value: Zea mays
  misc_feature: MA Experiment 20000534 PARAMETER Experiment Name: Zm_Hybrid_Pollen_P Parameter: Plant Line Value: 35A19
  misc_feature: MA Experiment 20000534 PARAMETER Experiment Name: Zm_Hybrid_Pollen_P Parameter: Tissue Value: Pollen vs. Aerial

SEQ ID NO: 17732 - protein, 337 aa, Zea mays subsp. mays; identical to SEQ ID NO: 7200
  peptide (1)..(337): Ceres Seq. ID no. 12366289
  misc_feature (187)..(329): Pfam Name: Dihydrodipicolinate reductase, C-terminus Pfam Description: Dihydrodipicolinate reductase, C-terminus
  misc_feature (53)..(330): Homolog of NCBI NO: 18411368 NR Description: putative protein; protein id: At3g59890.1, by cDNA: 36111. [Arabidopsis thaliana]
  misc_feature (31)..(330): Homolog of NCBI NO: 18406430 NR Description: expressed protein; protein id: At2g44040.1, by cDNA: 10293. [Arabidopsis thaliana] expressed protein [Arabidopsis thaliana]
  misc_feature (53)..(312): Homolog of NCBI NO: 11357603 NR Description: hypothetical protein F24G16.160 - Arabidopsis >gi|7019683|emb|CAB75808.1| putative protein [Arabidopsis
  misc_feature (31)..(313): Homolog of NCBI NO: 7486478 NR Description: hypothetical protein At2g44040 [imported] -
  misc_feature (96)..(228): Homolog of NCBI NO: 282117 NR Description: dipicolinate reductase homolog - Coxiella

SEQ ID NO: 17733 - protein, 329 aa, Zea mays subsp. mays; identical to SEQ ID NO: 7201
  peptide (1)..(329): Ceres Seq. ID no. 12366290
  misc_feature (179)..(321): Pfam Name: Dihydrodipicolinate reductase, C-terminus Pfam Description: Dihydrodipicolinate reductase, C-terminus
  misc_feature (45)..(322): Homolog of NCBI NO: 18411368 NR Description: putative protein; protein id: At3g59890.1, by cDNA: 36111. [Arabidopsis thaliana]
  misc_feature (23)..(322): Homolog of NCBI NO: 18406430 NR Description: expressed protein; protein id: At2g44040.1, by cDNA: 10293. [Arabidopsis thaliana] expressed protein [Arabidopsis thaliana]
  misc_feature (45)..(304): Homolog of NCBI NO: 11357603 NR Description: hypothetical protein F24G16.160 - Arabidopsis >gi|7019683|emb|CAB75808.1| putative protein [Arabidopsis
  misc_feature (23)..(305): Homolog of NCBI NO: 7486478 NR Description: hypothetical protein At2g44040 [imported] -
  misc_feature (88)..(220): Homolog of NCBI NO: 282117 NR Description: dipicolinate reductase homolog - Coxiella

SEQ ID NO: 17734 - protein, 326 aa, Zea mays subsp. mays; identical to SEQ ID NO: 7202
  peptide (1)..(326): Ceres Seq. ID no. 12366291
  misc_feature (176)..(318): Pfam Name: Dihydrodipicolinate reductase, C-terminus Pfam Description: Dihydrodipicolinate reductase, C-terminus
  misc_feature (42)..(319): Homolog of NCBI NO: 18411368 NR Description: putative protein; protein id: At3g59890.1, by cDNA: 36111. [Arabidopsis thaliana]
  misc_feature (20)..(319): Homolog of NCBI NO: 18406430 NR Description: expressed protein; protein id: At2g44040.1, by cDNA: 10293. [Arabidopsis thaliana] expressed protein [Arabidopsis thaliana]
  misc_feature (42)..(301): Homolog of NCBI NO: 11357603 NR Description: hypothetical protein F24G16.160 - Arabidopsis >gi|7019683|emb|CAB75808.1| putative protein [Arabidopsis
  misc_feature (20)..(302): Homolog of NCBI NO: 7486478 NR Description: hypothetical protein At2g44040 [imported] -
  misc_feature (85)..(217): Homolog of NCBI NO: 282117 NR Description: dipicolinate reductase homolog - Coxiella

SEQ ID NO: 17735 - DNA, 490 bp, Zea mays subsp. mays
  misc_feature (1)..(490): Ceres Seq. ID no. 5006152
  misc_feature: MA Experiment ID: 108535 Result: Up-regulated in Transcription
  misc_feature: MA Experiment 108535 PARAMETER Experiment Name: Zm_Meristem_P Parameter: Age (day) Value: 8
  misc_feature: MA Experiment 108535 PARAMETER Experiment Name: Zm_Meristem_P Parameter: Organism Value: Zea mays
  misc_feature: MA Experiment 108535 PARAMETER Experiment Name: Zm_Meristem_P Parameter: Plant Line Value: 35A19
  misc_feature: MA Experiment 108535 PARAMETER Experiment Name: Zm_Meristem_P Parameter: Tissue Value: Root Meristem vs. Above Root Meristem
  misc_feature: MA Experiment ID: 20000487 Result: Up-regulated in Transcription
  misc_feature: MA Experiment 20000487 PARAMETER Experiment Name: Zm_50mM_NH4NO3_L_to_H_P Parameter: Organism Value: Zea mays
  misc_feature: MA Experiment 20000487 PARAMETER Experiment Name: Zm_50mM_NH4NO3_L_to_H_P Parameter: Timepoint (hr) Value: 4
  misc_feature: MA Experiment 20000487 PARAMETER Experiment Name: Zm_50mM_NH4NO3_L_to_H_P Parameter: Tissue Value: Leaves
  misc_feature: MA Experiment 20000487 PARAMETER Experiment Name: Zm_50mM_NH4NO3_L_to_H_P Parameter: Treatment Value: 50mM NH4NO3 vs. 100mM Mannitol
  misc_feature: MA Experiment ID: 20000535 Result: Up-regulated in Transcription
  misc_feature: MA Experiment 20000535 PARAMETER Experiment Name: Zm_Hybrid_Seed_Dev_P Parameter: DAP Value: 30 vs. 12
  misc_feature: MA Experiment 20000535 PARAMETER Experiment Name: Zm_Hybrid_Seed_Dev_P Parameter: Organism Value: Zea mays
  misc_feature: MA Experiment 20000535 PARAMETER Experiment Name: Zm_Hybrid_Seed_Dev_P Parameter: Plant Line Value: 35A19
  misc_feature: MA Experiment 20000535 PARAMETER Experiment Name: Zm_Hybrid_Seed_Dev_P Parameter: Tissue Value: Embryo vs. Unfert Floret
atcacccgcgtccgccaccgccgccgcctttcgtaccgcggcccctaaacccctttcctcgttcccctccgtctctcagttaggcacaatgatgctagctaataagcttggtggtttgctcaagaatgctacgagttcaaagagttcaaatatgtctgtctaccaagcaatcagatgcatgtcatcatccaagctttttgttggagggctttcttatggaaccgatgatcacagtctcagagacgagtttgccaaatatggacaagttattgaagctaagattatccttgatcgtgagtctgggaggtccagaggttttggctttataacttacacgtcttctgaggaggcttcggctgccatcactgccatggatggaaagactctggatggacggaacatacgggttaatcatgctaacgagaggacaggtggcttcccgcagcagcggtggttatggtggtggcggctatggtggtggcaytacggc

SEQ ID NO: 17736 - protein, 163 aa, Zea mays subsp. mays
  peptide (1)..(163): Ceres Seq. ID no. 5006153
  misc_feature (65)..(136): Pfam Name: RNA recognition motif. (a.k.a. RRM, RBD, or RNP domain) Pfam Description: RNA recognition motif. (a.k.a. RRM, RBD, or RNP
  misc_feature (30)..(142): Homolog of NCBI NO: 2826811 NR Description: AtGRP2 [Arabidopsis thaliana]
  misc_feature (30)..(128): Homolog of NCBI NO: 19881711 NR Description: Putative RNA-binding protein [Oryza sativa]
  misc_feature (30)..(146): Homolog of NCBI NO: 7489099 NR Description: RNA-binding protein RGP-3 - wood tobacco
  misc_feature (30)..(146): Homolog of NCBI NO: 7439995 NR Description: RNA binding protein 3 - wood tobacco
  misc_feature (30)..(146): Homolog of NCBI NO: 15221187 NR Description: glycine-rich RNA-binding protein; protein id:
  misc_feature (30)..(142): Homolog of NCBI NO: 7439994 NR Description: glycine-rich RNA-binding protein - garden pea
  misc_feature (30)..(145): Homolog of NCBI NO: 1084415 NR Description: RNA-binding protein - wood tobacco
  misc_feature (30)..(146): Homolog of NCBI NO: 15822705 NR Description: RNA-binding protein precursor [Solanum tuberosum]
  misc_feature (30)..(146): Homolog of NCBI NO: 15239505 NR Description: glycine-rich RNA-binding protein
  misc_feature (30)..(146): Homolog of NCBI NO: 15822703 NR Description: RNA-binding protein precursor [Nicotiana tabacum]
  misc_feature (161)..(161): Xaa is any aa, unknown or other
SPASATAAAFRTAAPKPLSSFPSVSQLGTMMLANKLGGLLKNATSSKSSNMSVYQAIRCMSSSKLFVGGLSYGTDDHSLRDEFAKYGQVIEAKIILDRESGRSRGFGFITYTSSEEASAAITAMDGKTLDGRNIRVNHANERTGGFPQQRWLWWWRLWWWXYG

SEQ ID NO: 17737 - protein, 134 aa, Zea mays subsp. mays
  peptide (1)..(134): Ceres Seq. ID no. 5006154
  misc_feature (36)..(107): Pfam Name: RNA recognition motif. (a.k.a. RRM, RBD, or RNP domain) Pfam Description: RNA recognition motif. (a.k.a. RRM, RBD, or RNP
  misc_feature (1)..(113): Homolog of NCBI NO: 2826811 NR Description: AtGRP2 [Arabidopsis thaliana]
  misc_feature (1)..(99): Homolog of NCBI NO: 19881711 NR Description: Putative RNA-binding protein [Oryza sativa]
  misc_feature (1)..(117): Homolog of NCBI NO: 7489099 NR Description: RNA-binding protein RGP-3 - wood tobacco
  misc_feature (1)..(117): Homolog of NCBI NO: 7439995 NR Description: RNA binding protein 3 - wood tobacco
  misc_feature (1)..(117): Homolog of NCBI NO: 15221187 NR Description: glycine-rich RNA-binding protein; protein id:
  misc_feature (1)..(113): Homolog of NCBI NO: 7439994 NR Description: glycine-rich RNA-binding protein - garden pea
  misc_feature (1)..(116): Homolog of NCBI NO: 1084415 NR Description: RNA-binding protein - wood tobacco
  misc_feature (1)..(117): Homolog of NCBI NO: 15822705 NR Description: RNA-binding protein precursor [Solanum tuberosum]
  misc_feature (1)..(117): Homolog of NCBI NO: 15239505 NR Description: glycine-rich RNA-binding protein
  misc_feature (1)..(117): Homolog of NCBI NO: 15822703 NR Description: RNA-binding protein precursor [Nicotiana tabacum]
  misc_feature (132)..(132): Xaa is any aa, unknown or other
MMLANKLGGLLKNATSSKSSNMSVYQAIRCMSSSKLFVGGLSYGTDDHSLRDEFAKYGQVIEAKIILDRESGRSRGFGFITYTSSEEASAAITAMDGKTLDGRNIRVNHANERTGGFPQQRWLWWWRLWWWXYG

SEQ ID NO: 17738 - protein, 133 aa, Zea mays subsp. mays
  peptide (1)..(133): Ceres Seq. ID no. 5006155
  misc_feature (35)..(106): Pfam Name: RNA recognition motif. (a.k.a. RRM, RBD, or RNP domain) Pfam Description: RNA recognition motif. (a.k.a. RRM, RBD, or RNP
  misc_feature (1)..(112): Homolog of NCBI NO: 2826811 NR Description: AtGRP2 [Arabidopsis thaliana]
  misc_feature (1)..(98): Homolog of NCBI NO: 19881711 NR Description: Putative RNA-binding protein [Oryza sativa]
  misc_feature (1)..(116): Homolog of NCBI NO: 7489099 NR Description: RNA-binding protein RGP-3 - wood tobacco
  misc_feature (1)..(116): Homolog of NCBI NO: 7439995 NR Description: RNA binding protein 3 - wood tobacco
  misc_feature (1)..(116): Homolog of NCBI NO: 15221187 NR Description: glycine-rich RNA-binding protein; protein id:
  misc_feature (1)..(112): Homolog of NCBI NO: 7439994 NR Description: glycine-rich RNA-binding protein - garden pea
  misc_feature (1)..(115): Homolog of NCBI NO: 1084415 NR Description: RNA-binding protein - wood tobacco
  misc_feature (1)..(116): Homolog of NCBI NO: 15822705 NR Description: RNA-binding protein precursor [Solanum tuberosum]
  misc_feature (1)..(116): Homolog of NCBI NO: 15239505 NR Description: glycine-rich RNA-binding protein
  misc_feature (1)..(116): Homolog of NCBI NO: 15822703 NR Description: RNA-binding protein precursor [Nicotiana tabacum]
  misc_feature (131)..(131): Xaa is any aa, unknown or other
MLANKLGGLLKNATSSKSSNMSVYQAIRCMSSSKLFVGGLSYGTDDHSLRDEFAKYGQVIEAKIILDRESGRSRGFGFITYTSSEEASAAITAMDGKTLDGRNIRVNHANERTGGFPQQRWLWWWRLWWWXYG

SEQ ID NO: 17739 - DNA, 933 bp, Zea mays subsp. mays
  misc_feature (1)..(933): Ceres Seq. ID no. 12417671
  misc_feature: MA Experiment ID: 108504 Result: Up-regulated in Transcription
  misc_feature: MA Experiment 108504 PARAMETER Experiment Name: Zm_Drought_P Parameter: Age (day) Value: 8
  misc_feature: MA Experiment 108504 PARAMETER Experiment Name: Zm_Drought_P Parameter: Organism Value: Zea mays
  misc_feature: MA Experiment 108504 PARAMETER Experiment Name: Zm_Drought_P Parameter: Plant Line Value: 35A19
  misc_feature: MA Experiment 108504 PARAMETER Experiment Name: Zm_Drought_P Parameter: Timepoint (hr) Value: 12
  misc_feature: MA Experiment 108504 PARAMETER Experiment Name: Zm_Drought_P Parameter: Tissue Value: Aerial
  misc_feature: MA Experiment 108504 PARAMETER Experiment Name: Zm_Drought_P Parameter: Treatment Value: Drought vs. No Drought
  misc_feature: MA Experiment ID: 108522 Result: Down-regulated in Transcription
  misc_feature: MA Experiment 108522 PARAMETER Experiment Name: Zm_42deg_Heat_P Parameter: Age (day) Value: 8
  misc_feature: MA Experiment 108522 PARAMETER Experiment Name: Zm_42deg_Heat_P Parameter: Organism Value: Zea mays
  misc_feature: MA Experiment 108522 PARAMETER Experiment Name: Zm_42deg_Heat_P Parameter: Plant Line Value: 35A19
  misc_feature: MA Experiment 108522 PARAMETER Experiment Name: Zm_42deg_Heat_P Parameter: Temperature (deg C) Value: 42 vs. 22
  misc_feature: MA Experiment 108522 PARAMETER Experiment Name: Zm_42deg_Heat_P Parameter: Timepoint (hr) Value: 1
  misc_feature: MA Experiment 108522 PARAMETER Experiment Name: Zm_42deg_Heat_P Parameter: Tissue Value: Aerial
  misc_feature: MA Experiment ID: 108523 Result: Up-regulated in Transcription
  misc_feature: MA Experiment 108523 PARAMETER Experiment Name: Zm_42deg_Heat_P Parameter: Age (day) Value: 8
  misc_feature: MA Experiment 108523 PARAMETER Experiment Name: Zm_42deg_Heat_P Parameter: Organism Value: Zea mays
  misc_feature: MA Experiment 108523 PARAMETER Experiment Name: Zm_42deg_Heat_P Parameter: Plant Line Value: 35A19
  misc_feature: MA Experiment 108523 PARAMETER Experiment Name: Zm_42deg_Heat_P Parameter: Temperature (deg C) Value: 42 vs. 22
  misc_feature: MA Experiment 108523 PARAMETER Experiment Name: Zm_42deg_Heat_P Parameter: Timepoint (hr) Value: 6
  misc_feature: MA Experiment 108523 PARAMETER Experiment Name: Zm_42deg_Heat_P Parameter: Tissue Value: Aerial
  misc_feature: MA Experiment ID: 108527 Result: Up-regulated in Transcription
  misc_feature: MA Experiment 108527 PARAMETER Experiment Name: Zm_5mM_NO_P Parameter: Age (day) Value: 8
  misc_feature: MA Experiment 108527 PARAMETER Experiment Name: Zm_5mM_NO_P Parameter: Organism Value: Zea mays
  misc_feature: MA Experiment 108527 PARAMETER Experiment Name: Zm_5mM_NO_P Parameter: Plant Line Value: 35A19
  misc_feature: MA Experiment 108527 PARAMETER Experiment Name: Zm_5mM_NO_P Parameter: Timepoint (hr) Value: 6
  misc_feature: MA Experiment 108527 PARAMETER Experiment Name: Zm_5mM_NO_P Parameter: Tissue Value: Aerial
  misc_feature: MA Experiment 108527 PARAMETER Experiment Name: Zm_5mM_NO_P Parameter: Treatment Value: 5mM NO vs. No Treatment
  misc_feature: MA Experiment ID: 108530 Result: Up-regulated in Transcription
  misc_feature: MA Experiment 108530 PARAMETER Experiment Name: Zm_Imbibed_Seeds_P Parameter: Age (day) Value: 6 vs. 2
  misc_feature: MA Experiment 108530 PARAMETER Experiment Name: Zm_Imbibed_Seeds_P Parameter: Organism Value: Zea mays
  misc_feature: MA Experiment 108530 PARAMETER Experiment Name: Zm_Imbibed_Seeds_P Parameter: Plant Line Value: 35A19
  misc_feature: MA Experiment 108530 PARAMETER Experiment Name: Zm_Imbibed_Seeds_P Parameter: Tissue Value: Aerial vs. Embryo
  misc_feature: MA Experiment ID: 108533 Result: Down-regulated in Transcription
  misc_feature: MA Experiment 108533 PARAMETER Experiment Name: Zm_4deg_Cold_P Parameter: Age (hr) Value: 8
  misc_feature: MA Experiment 108533 PARAMETER Experiment Name: Zm_4deg_Cold_P Parameter: Organism Value: Zea mays
  misc_feature: MA Experiment 108533 PARAMETER Experiment Name: Zm_4deg_Cold_P Parameter: Plant Line Value: 35A19
  misc_feature: MA Experiment 108533 PARAMETER Experiment Name: Zm_4deg_Cold_P Parameter: Temperature (deg C) Value: 4 vs. 22
  misc_feature: MA Experiment 108533 PARAMETER Experiment Name: Zm_4deg_Cold_P Parameter: Timepoint (hr) Value: 1
  misc_feature: MA Experiment 108533 PARAMETER Experiment Name: Zm_4deg_Cold_P Parameter: Tissue Value: Aerial
  misc_feature: MA Experiment ID: 108535 Result: Down-regulated in Transcription
  misc_feature: MA Experiment 108535 PARAMETER Experiment Name: Zm_Meristem_P Parameter: Age (day) Value: 8
  misc_feature: MA Experiment 108535 PARAMETER Experiment Name: Zm_Meristem_P Parameter: Organism Value: Zea mays
  misc_feature: MA Experiment 108535 PARAMETER Experiment Name: Zm_Meristem_P Parameter: Plant Line Value: 35A19
  misc_feature: MA Experiment 108535 PARAMETER Experiment Name: Zm_Meristem_P Parameter: Tissue Value: Root Meristem vs. Above Root Meristem
  misc_feature: MA Experiment ID: 108536 Result: Up-regulated in Transcription
  misc_feature: MA Experiment 108536 PARAMETER Experiment Name: Zm_Meristem_P Parameter: Age (day) Value: 8
  misc_feature: MA Experiment 108536 PARAMETER Experiment Name: Zm_Meristem_P Parameter: Organism Value: Zea mays
  misc_feature: MA Experiment 108536 PARAMETER Experiment Name: Zm_Meristem_P Parameter: Plant Line Value: 35A19
  misc_feature: MA Experiment 108536 PARAMETER Experiment Name: Zm_Meristem_P Parameter: Tissue Value: Shoot Meristem vs. Above Shoot Meristem
  misc_feature: MA Experiment ID: 108540 Result: Up-regulated in Transcription
  misc_feature: MA Experiment 108540 PARAMETER Experiment Name: Zm_20percent_PEG_P Parameter: Age (day) Value: 8
  misc_feature: MA Experiment 108540 PARAMETER Experiment Name: Zm_20percent_PEG_P Parameter: Organism Value: Zea mays
  misc_feature: MA Experiment 108540 PARAMETER Experiment Name: Zm_20percent_PEG_P Parameter: Plant Line Value: 35A19
  misc_feature: MA Experiment 108540 PARAMETER Experiment Name: Zm_20percent_PEG_P Parameter: Timepoint (hr) Value: 6
  misc_feature: MA Experiment 108540 PARAMETER Experiment Name: Zm_20percent_PEG_P Parameter: Tissue Value: Aerial
  misc_feature: MA Experiment 108540 PARAMETER Experiment Name: Zm_20percent_PEG_P Parameter: Treatment Value: 20percent PEG vs. No Treatment
  misc_feature: MA Experiment ID: 108542 Result: Up-regulated in Transcription
  misc_feature: MA Experiment 108542 PARAMETER Experiment Name: Zm_150mM_NaCl_P Parameter: Age (day) Value: 8
  misc_feature: MA Experiment 108542 PARAMETER Experiment Name: Zm_150mM_NaCl_P Parameter: Organism Value: Zea mays
  misc_feature: MA Experiment 108542 PARAMETER Experiment Name: Zm_150mM_NaCl_P Parameter: Plant Line Value: 35A19
  misc_feature: MA Experiment 108542 PARAMETER Experiment Name: Zm_150mM_NaCl_P Parameter: Timepoint (hr) Value: 6
  misc_feature: MA Experiment 108542 PARAMETER Experiment Name: Zm_150mM_NaCl_P Parameter: Tissue Value: Aerial
  misc_feature: MA Experiment 108542 PARAMETER Experiment Name: Zm_150mM_NaCl_P Parameter: Treatment Value: 150mM NaCl vs. No Treatment
  misc_feature: MA Experiment ID: 108547 Result: Up-regulated in Transcription
  misc_feature: MA Experiment 108547 PARAMETER Experiment Name: Zm_Imbibed_Seeds_P Parameter: Age (day) Value: 4 vs. 2
  misc_feature: MA Experiment 108547 PARAMETER Experiment Name: Zm_Imbibed_Seeds_P Parameter: Organism Value: Zea mays
  misc_feature: MA Experiment 108547 PARAMETER Experiment Name: Zm_Imbibed_Seeds_P Parameter: Plant Line Value: 35A19
  misc_feature: MA Experiment 108547 PARAMETER Experiment Name: Zm_Imbibed_Seeds_P Parameter: Tissue Value: Aerial vs. Embryo
  misc_feature: MA Experiment ID: 108559 Result: Up-regulated in Transcription
  misc_feature: MA Experiment 108559 PARAMETER Experiment Name: Zm_5mM_NO_P Parameter: Age (day) Value: 8
  misc_feature: MA Experiment 108559 PARAMETER Experiment Name: Zm_5mM_NO_P Parameter: Organism Value: Zea mays
  misc_feature: MA Experiment 108559 PARAMETER Experiment Name: Zm_5mM_NO_P Parameter: Plant Line Value: 35A19
  misc_feature: MA Experiment 108559 PARAMETER Experiment Name: Zm_5mM_NO_P Parameter: Timepoint (hr) Value: 12
  misc_feature: MA Experiment 108559 PARAMETER Experiment Name: Zm_5mM_NO_P Parameter: Tissue Value: Aerial
  misc_feature: MA Experiment 108559 PARAMETER Experiment Name: Zm_5mM_NO_P Parameter: Treatment Value: 5mM NO vs. No Treatment
  misc_feature: MA Experiment ID: 20000479 Result: Up-regulated in Transcription
  misc_feature: MA Experiment 20000479 PARAMETER Experiment Name: Zm_Drought_P Parameter: Age (day) Value: 10
  misc_feature: MA Experiment 20000479 PARAMETER Experiment Name: Zm_Drought_P Parameter: Organism Value: Zea mays
  misc_feature: MA Experiment 20000479 PARAMETER Experiment Name: Zm_Drought_P Parameter: Plant Line Value: 35A19
  misc_feature: MA Experiment 20000479 PARAMETER Experiment Name: Zm_Drought_P Parameter: Timepoint (hr) Value: 48
  misc_feature: MA Experiment 20000479 PARAMETER Experiment Name: Zm_Drought_P Parameter: Tissue Value: Aerial
  misc_feature: MA Experiment 20000479 PARAMETER Experiment Name: Zm_Drought_P Parameter: Treatment Value: Drought vs. No Drought
  misc_feature: MA Experiment ID: 20000480 Result: Up-regulated in Transcription
  misc_feature: MA Experiment 20000480 PARAMETER Experiment Name: Zm_Drought_P Parameter: Age (day) Value: 11
  misc_feature: MA Experiment 20000480 PARAMETER Experiment Name: Zm_Drought_P Parameter: Organism Value: Zea mays
  misc_feature: MA Experiment 20000480 PARAMETER Experiment Name: Zm_Drought_P Parameter: Plant Line Value: 35A19
  misc_feature: MA Experiment 20000480 PARAMETER Experiment Name: Zm_Drought_P Parameter: Timepoint (hr) Value: 72
  misc_feature: MA Experiment 20000480 PARAMETER Experiment Name: Zm_Drought_P Parameter: Tissue Value: Aerial
  misc_feature: MA Experiment 20000480 PARAMETER Experiment Name: Zm_Drought_P Parameter: Treatment Value: Drought vs. No Drought
  misc_feature: MA Experiment ID: 20000492 Result: Up-regulated in Transcription
  misc_feature: MA Experiment 20000492 PARAMETER Experiment Name: Zm_Hybrid_Seed_Dev_P Parameter: DAP Value: 12
  misc_feature: MA Experiment 20000492 PARAMETER Experiment Name: Zm_Hybrid_Seed_Dev_P Parameter: Organism Value: Zea mays
  misc_feature: MA Experiment 20000492 PARAMETER Experiment Name: Zm_Hybrid_Seed_Dev_P Parameter: Plant Line Value: 35A19
  misc_feature: MA Experiment 20000492 PARAMETER Experiment Name: Zm_Hybrid_Seed_Dev_P Parameter: Tissue Value: Fert Kernel vs. Unfert Floret
  misc_feature: MA Experiment ID: 20000532 Result: Up-regulated in Transcription
  misc_feature: MA Experiment 20000532 PARAMETER Experiment Name: Zm_0.001percent_MeJA_P Parameter: Age (day) Value: 10
  misc_feature: MA Experiment 20000532 PARAMETER Experiment Name: Zm_0.001percent_MeJA_P Parameter: Organism Value: Zea mays
  misc_feature: MA Experiment 20000532 PARAMETER Experiment Name: Zm_0.001percent_MeJA_P Parameter: Plant Line Value: 35A19
  misc_feature: MA Experiment 20000532 PARAMETER Experiment Name: Zm_0.001percent_MeJA_P Parameter: Timepoint (hr) Value: 48
  misc_feature: MA Experiment 20000532 PARAMETER Experiment Name: Zm_0.001percent_MeJA_P Parameter: Tissue Value: Aerial
  misc_feature: MA Experiment 20000532 PARAMETER Experiment Name: Zm_0.001percent_MeJA_P Parameter: Treatment Value: 0.001percent MeJA vs. No Treatment
  misc_feature: MA Experiment ID: 20000535 Result: Up-regulated in Transcription
  misc_feature: MA Experiment 20000535 PARAMETER Experiment Name: Zm_Hybrid_Seed_Dev_P Parameter: DAP Value: 30 vs. 12
  misc_feature: MA Experiment 20000535 PARAMETER Experiment Name: Zm_Hybrid_Seed_Dev_P Parameter: Organism Value: Zea mays
  misc_feature: MA Experiment 20000535 PARAMETER Experiment Name: Zm_Hybrid_Seed_Dev_P Parameter: Plant Line Value: 35A19
  misc_feature: MA Experiment 20000535 PARAMETER Experiment Name: Zm_Hybrid_Seed_Dev_P Parameter: Tissue Value: Embryo vs. Unfert Floret
  misc_feature: MA Experiment ID: 20000626 Result: Down-regulated in Transcription
  misc_feature: MA Experiment 20000626 PARAMETER Experiment Name: Zm_Herbicide-Treatments_P Parameter: Timepoint (hr) Value: 12
  misc_feature: MA Experiment 20000626 PARAMETER Experiment Name: Zm_Herbicide-Treatments_P Parameter: Tissue Value: Aerial
  misc_feature: MA Experiment 20000626 PARAMETER Experiment Name: Zm_Herbicide-Treatments_P Parameter: Treatment Value: Roundup vs. No Treatment
  misc_feature: MA Experiment ID: 20000629 Result: Down-regulated in Transcription
  misc_feature: MA Experiment 20000629 PARAMETER Experiment Name: Zm_Herbicide-Treatments_P Parameter: Timepoint (hr) Value: 12
  misc_feature: MA Experiment 20000629 PARAMETER Experiment Name: Zm_Herbicide-Treatments_P Parameter: Tissue Value: Aerial
  misc_feature: MA Experiment 20000629 PARAMETER Experiment Name: Zm_Herbicide-Treatments_P Parameter: Treatment Value: Trimec vs. No Treatment
gcacgagaccattacctagaacatcctaatcgaaaaaagatccagcaaaccagagttctccaaagcgcgaagctccagctcaagctccaggcaaccgtcaccgtcagggaacgcgcgcgcagcaatggccttttactacggcgtgggcggacagtcgtcggcgtgggcggcgccgggcggcagcaggccatggaccaaggcggaggacaaggtgttcgagggcgcgctggtgatgttcccggagcacttgccgaaccggtgggcgctggtggcgtcccggctgtacgaccgcacgccgcaggaggcctgggaccactaccaggcgctggtgaccgacgtcgacctcatcgagcgcggcatggtggaggccccggactcctgggacgacgacgcggccgccgccggagggggacgctcgggccgcggccgcgggggcggcagcggcagcggcancgnagaggagcgccgccgcggggtnccgtggaccgaggacgagcacaggctgtttctggaggggcttgagaagtacgggcgcggcgactggcggaacatctcgcgctggtcggtgaagacgcggacgcccacgcaggtggccagccacgcgcagaagtacttcatccgccaggccagcgccgccagccgcggcgacaccaagcgcaagagcatccacgacatcaccaccccgtgatggctcctgctcgtggaggacaaagctagcaccgagagatccagacctggctactgctgctacctgcattttatctttacctttgcgagacgggaacaaaaaaaaacaaacagccgtccctgtggttgtagaaatgtaggcaaagctaagttagcctggctggaatctggggtccggtataactgtattaagcggcactacaatgactatcgaataaataagttttgcaagtttgtctggatttc

SEQ ID NO: 17740 - protein, 187 aa, Zea mays subsp. mays
  peptide (1)..(187): Ceres Seq. ID no. 12417672
  misc_feature (117)..(164): Pfam Name: Myb-like DNA-binding domain Pfam Description: Myb-like DNA-binding domain
  misc_feature (11)..(186): Homolog of NCBI NO: 18874263 NR Description: MYB-like transcription factor DIVARICATA
  misc_feature (20)..(186): Homolog of NCBI NO: 15238311 NR Description: I-box binding factor - like protein
  misc_feature (11)..(187): Homolog of NCBI NO: 34908528 NR Description: putative I-box binding factor
  misc_feature (110)..(110): Xaa is any aa, unknown or other
  misc_feature (111)..(111): Xaa is any aa, unknown or other
  misc_feature (118)..(118): Xaa is any aa, unknown or other
MAFYYGVGGQSSAWAAPGGSRPWTKAEDKVFEGALVMFPEHLPNRWALVASRLYDRTPQEAWDHYQALVTDVDLIERGMVEAPDSWDDDAAAAGGGRSGRGRGGGSGSGXXEERRRGXPWTEDEHRLFLEGLEKYGRGDWRNISRWSVKTRTPTQVASHAQKYFIRQASAASRGDTKRKSIHDITTP

SEQ ID NO: 17741 - protein, 173 aa, Zea mays subsp. mays
  peptide (1)..(173): Ceres Seq. ID no. 12417673
  misc_feature (151)..(151): Xaa is any aa, unknown or other
  misc_feature (152)..(152): Xaa is any aa, unknown or other
  misc_feature (160)..(160): Xaa is any aa, unknown or other
ARDHYLEHPNRKKIQQTRVLQSAKLQLKLQATVTVRERARSNGLLLRRGRTVVGVGGAGRQQAMDQGGGQGVRGRAGDVPGALAEPVGAGGVPAVRPHAAGGLGPLPGAGDRRRPHRARHGGGPGLLGRRRGRRRRGTLGPRPRGRQRQRXXRGAPPRGXVDRGRAQAVSGGA

SEQ ID NO: 17742 - protein, 151 aa, Zea mays subsp. mays
  peptide (1)..(151): Ceres Seq. ID no. 12417674
  misc_feature (81)..(128): Pfam Name: Myb-like DNA-binding domain Pfam Description: Myb-like DNA-binding domain
  misc_feature (1)..(150): Homolog of NCBI NO: 18874263 NR Description: MYB-like transcription factor DIVARICATA
  misc_feature (1)..(150): Homolog of NCBI NO: 15238311 NR Description: I-box binding factor - like protein
  misc_feature (1)..(151): Homolog of NCBI NO: 34908528 NR Description: putative I-box binding factor
  misc_feature (74)..(74): Xaa is any aa, unknown or other
  misc_feature (75)..(75): Xaa is any aa, unknown or other
  misc_feature (82)..(82): Xaa is any aa, unknown or other
MFPEHLPNRWALVASRLYDRTPQEAWDHYQALVTDVDLIERGMVEAPDSWDDDAAAAGGGRSGRGRGGGSGSGXXEERRRGXPWTEDEHRLFLEGLEKYGRGDWRNISRWSVKTRTPTQVASHAQKYFIRQASAASRGDTKRKSIHDITTP

SEQ ID NO: 17743 - DNA, 1534 bp, Zea mays subsp. mays; identical to SEQ ID NO: 11228
  misc_feature (1)..(1534): Ceres Seq. ID no. 13492041
  misc_feature: MA Experiment ID: 108556 Result: Down-regulated in Transcription
  misc_feature: MA Experiment 108556 PARAMETER Experiment Name: Zm_Drought_P Parameter: Age (day) Value: 9
  misc_feature: MA Experiment 108556 PARAMETER Experiment Name: Zm_Drought_P Parameter: Organism Value: Zea mays
  misc_feature: MA Experiment 108556 PARAMETER Experiment Name: Zm_Drought_P Parameter: Plant Line Value: 35A19
  misc_feature: MA Experiment 108556 PARAMETER Experiment Name: Zm_Drought_P Parameter: Timepoint (hr) Value: 24
  misc_feature: MA Experiment 108556 PARAMETER Experiment Name: Zm_Drought_P Parameter: Tissue Value: Aerial
  misc_feature: MA Experiment 108556 PARAMETER Experiment Name: Zm_Drought_P Parameter: Treatment Value: Drought vs. No Drought
  misc_feature: MA Experiment ID: 20000535 Result: Down-regulated in Transcription
  misc_feature: MA Experiment 20000535 PARAMETER Experiment Name: Zm_Hybrid_Seed_Dev_P Parameter: DAP Value: 30 vs. 12
  misc_feature: MA Experiment 20000535 PARAMETER Experiment Name: Zm_Hybrid_Seed_Dev_P Parameter: Organism Value: Zea mays
  misc_feature: MA Experiment 20000535 PARAMETER Experiment Name: Zm_Hybrid_Seed_Dev_P Parameter: Plant Line Value: 35A19
  misc_feature: MA Experiment 20000535 PARAMETER Experiment Name: Zm_Hybrid_Seed_Dev_P Parameter: Tissue Value: Embryo vs. Unfert Floret
  misc_feature: MA Experiment ID: 20001608 Result: Down-regulated in Transcription
  misc_feature: MA Experiment 20001608 PARAMETER Experiment Name: Zm_50ppm_KNO3_L-to-H_P Parameter: Age (day) Value: 21
  misc_feature: MA Experiment 20001608 PARAMETER Experiment Name: Zm_50ppm_KNO3_L-to-H_P Parameter: Organism Value: Zea mays
  misc_feature: MA Experiment 20001608 PARAMETER Experiment Name: Zm_50ppm_KNO3_L-to-H_P Parameter: Plant Line Value: 35A19
  misc_feature: MA Experiment 20001608 PARAMETER Experiment Name: Zm_50ppm_KNO3_L-to-H_P Parameter: Timepoint (hr) Value: 48
  misc_feature: MA Experiment 20001608 PARAMETER Experiment Name: Zm_50ppm_KNO3_L-to-H_P Parameter: Tissue Value: Shoots
  misc_feature: MA Experiment 20001608 PARAMETER Experiment Name: Zm_50ppm_KNO3_L-to-H_P Parameter: Treatment Value: 50ppm KNO3 vs. 50ppm KCl

SEQ ID NO: 17744 - protein, 418 aa, Zea mays subsp. mays; identical to SEQ ID NO: 11229
  peptide (1)..(418): Ceres Seq. ID no. 13492042
  misc_feature (249)..(377): Pfam Name: Integral membrane protein DUF6 Pfam Description: Integral membrane protein DUF6
  misc_feature (63)..(418): Homolog of NCBI NO: 34908982 NR Description: P0003D09.29 [Oryza sativa (japonica
  misc_feature (64)..(413): Homolog of NCBI NO: 15236781 NR Description: phosphate translocator-related [Arabidopsis
  misc_feature (64)..(412): Homolog of NCBI NO: 15224742 NR Description: phosphate translocator-related [Arabidopsis
  misc_feature (72)..(415): Homolog of NCBI NO: 18420914 NR Description: phosphate translocator-related [Arabidopsis
  misc_feature (64)..(418): Homolog of NCBI NO: 15238995 NR Description: phosphate translocator-related [Arabidopsis >gi|8953385|emb|CAB96658.1| putative protein [Arabidopsis
  misc_feature (74)..(385): Homolog of NCBI NO: 15221115 NR Description: phosphate translocator-related [Arabidopsis
  misc_feature (74)..(418): Homolog of NCBI NO: 18401506 NR Description: phosphate translocator-related [Arabidopsis >gi|11994681|dbj|BAB02919.1| gb|AAD49773.1~gene_id:MTO12.2~strong to unknown protein [Arabidopsis thaliana]
  misc_feature (74)..(385): Homolog of NCBI NO: 8778534 NR Description: F21D18.5 [Arabidopsis thaliana]
  misc_feature (75)..(412): Homolog of NCBI NO: 18400381 NR Description: transporter-related [Arabidopsis thaliana] AT3g14410/MLN21_19 [Arabidopsis thaliana]
  misc_feature (75)..(412): Homolog of NCBI NO: 9279588 NR Description: phosphate/phosphoenolpyruvate translocator

SEQ ID NO: 17745 - protein, 414 aa, Zea mays subsp. mays; identical to SEQ ID NO: 11230
  peptide (1)..(414): Ceres Seq. ID no. 13492043
  misc_feature (19)..(66): Homolog of NCBI NO: 27375632 NR Description: blr0521 [Bradyrhizobium japonicum]

SEQ ID NO: 17746 - protein, 355 aa, Zea mays subsp. mays; identical to SEQ ID NO: 11231
  peptide (1)..(355): Ceres Seq. ID no. 13492044
  misc_feature (186)..(314): Pfam Name: Integral membrane protein DUF6 Pfam Description: Integral membrane protein DUF6
  misc_feature (1)..(355): Homolog of NCBI NO: 34908982 NR Description: P0003D09.29 [Oryza sativa (japonica
  misc_feature (1)..(350): Homolog of NCBI NO: 15236781 NR Description: phosphate translocator-related [Arabidopsis
  misc_feature (1)..(349): Homolog of NCBI NO: 15224742 NR Description: phosphate translocator-related [Arabidopsis
  misc_feature (9)..(352): Homolog of NCBI NO: 18420914 NR Description: phosphate translocator-related [Arabidopsis
  misc_feature (1)..(355): Homolog of NCBI NO: 15238995 NR Description: phosphate translocator-related [Arabidopsis >gi|8953385|emb|CAB96658.1| putative protein [Arabidopsis
  misc_feature (11)..(322): Homolog of NCBI NO: 15221115 NR Description: phosphate translocator-related [Arabidopsis
  misc_feature (11)..(355): Homolog of NCBI NO: 18401506 NR Description: phosphate translocator-related [Arabidopsis >gi|11994681|dbj|BAB02919.1| gb|AAD49773.1~gene_id:MTO12.2~strong to unknown protein [Arabidopsis thaliana]
  misc_feature (11)..(322): Homolog of NCBI NO: 8778534 NR Description: F21D18.5 [Arabidopsis thaliana]
  misc_feature (12)..(349): Homolog of NCBI NO: 18400381 NR Description: transporter-related [Arabidopsis thaliana] AT3g14410/MLN21_19 [Arabidopsis thaliana]
  misc_feature (12)..(349): Homolog of NCBI NO: 9279588 NR Description: phosphate/phosphoenolpyruvate translocator

SEQ ID NO: 17747 - DNA, 1070 bp, Zea mays subsp. mays
  misc_feature (1)..(1070): Ceres Seq. ID no. 12364063
  misc_feature: MA Experiment ID: 108522 Result: Up-regulated in Transcription
  misc_feature: MA Experiment 108522 PARAMETER Experiment Name: Zm_42deg_Heat_P Parameter: Age (day) Value: 8
  misc_feature: MA Experiment 108522 PARAMETER Experiment Name: Zm_42deg_Heat_P Parameter: Organism Value: Zea mays
  misc_feature: MA Experiment 108522 PARAMETER Experiment Name: Zm_42deg_Heat_P Parameter: Plant Line Value: 35A19
  misc_feature: MA Experiment 108522 PARAMETER Experiment Name: Zm_42deg_Heat_P Parameter: Temperature (deg C) Value: 42 vs. 22
  misc_feature: MA Experiment 108522 PARAMETER Experiment Name: Zm_42deg_Heat_P Parameter: Timepoint (hr) Value: 1
  misc_feature: MA Experiment 108522 PARAMETER Experiment Name: Zm_42deg_Heat_P Parameter: Tissue Value: Aerial
  misc_feature: MA Experiment ID: 108523 Result: Up-regulated in Transcription
  misc_feature: MA Experiment 108523 PARAMETER Experiment Name: Zm_42deg_Heat_P Parameter: Age (day) Value: 8
  misc_feature: MA Experiment 108523 PARAMETER Experiment Name: Zm_42deg_Heat_P Parameter: Organism Value: Zea mays
  misc_feature: MA Experiment 108523 PARAMETER Experiment Name: Zm_42deg_Heat_P Parameter: Plant Line Value: 35A19
  misc_feature: MA Experiment 108523 PARAMETER Experiment Name: Zm_42deg_Heat_P Parameter: Temperature (deg C) Value: 42 vs. 22
  misc_feature: MA Experiment 108523 PARAMETER Experiment Name: Zm_42deg_Heat_P Parameter: Timepoint (hr) Value: 6
  misc_feature: MA Experiment 108523 PARAMETER Experiment Name: Zm_42deg_Heat_P Parameter: Tissue Value: Aerial
  misc_feature: MA Experiment ID: 108528 Result: Down-regulated in Transcription
  misc_feature: MA Experiment 108528 PARAMETER Experiment Name: Zm_Imbibed_Seeds_P Parameter: Age (day) Value: 5 vs. 2
  misc_feature: MA Experiment 108528 PARAMETER Experiment Name: Zm_Imbibed_Seeds_P Parameter: Organism Value: Zea mays
  misc_feature: MA Experiment 108528 PARAMETER Experiment Name: Zm_Imbibed_Seeds_P Parameter: Plant Line Value: 35A19
  misc_feature: MA Experiment 108528 PARAMETER Experiment Name: Zm_Imbibed_Seeds_P Parameter: Tissue Value: Aerial vs. Embryo
  misc_feature: MA Experiment ID: 108529 Result: Down-regulated in Transcription
  misc_feature: MA Experiment 108529 PARAMETER Experiment Name: Zm_Imbibed_Seeds_P Parameter: Age (day) Value: 5 vs. 2
  misc_feature: MA Experiment 108529 PARAMETER Experiment Name: Zm_Imbibed_Seeds_P Parameter: Organism Value: Zea mays
  misc_feature: MA Experiment 108529 PARAMETER Experiment Name: Zm_Imbibed_Seeds_P Parameter: Plant Line Value: 35A19
  misc_feature: MA Experiment 108529 PARAMETER Experiment Name: Zm_Imbibed_Seeds_P Parameter: Tissue Value: Roots vs. Embryo
  misc_feature: MA Experiment ID: 108530 Result: Down-regulated in Transcription
  misc_feature: MA Experiment 108530 PARAMETER Experiment Name: Zm_Imbibed_Seeds_P Parameter: Age (day) Value: 6 vs. 2
  misc_feature: MA Experiment 108530 PARAMETER Experiment Name: Zm_Imbibed_Seeds_P Parameter: Organism Value: Zea mays
  misc_feature: MA Experiment 108530 PARAMETER Experiment Name: Zm_Imbibed_Seeds_P Parameter: Plant Line Value: 35A19
  misc_feature: MA Experiment 108530 PARAMETER Experiment Name: Zm_Imbibed_Seeds_P Parameter: Tissue Value: Aerial vs. Embryo
  misc_feature: MA Experiment ID: 108535 Result: Down-regulated in Transcription
  misc_feature: MA Experiment 108535 PARAMETER Experiment Name: Zm_Meristem_P Parameter: Age (day) Value: 8
  misc_feature: MA Experiment 108535 PARAMETER Experiment Name: Zm_Meristem_P Parameter: Organism Value: Zea mays
  misc_feature: MA Experiment 108535 PARAMETER Experiment Name: Zm_Meristem_P Parameter: Plant Line Value: 35A19
  misc_feature: MA Experiment 108535 PARAMETER Experiment Name: Zm_Meristem_P Parameter: Tissue Value: Root Meristem vs. Above Root Meristem
  misc_feature: MA Experiment ID: 108543 Result: Down-regulated in Transcription
  misc_feature: MA Experiment ID: 108545 Result: Down-regulated in Transcription
  misc_feature: MA Experiment 108545 PARAMETER Experiment Name: Zm_Imbibed_Seeds_P Parameter: Age (day) Value: 3 vs. 2
  misc_feature: MA Experiment 108545 PARAMETER Experiment Name: Zm_Imbibed_Seeds_P Parameter: Organism Value: Zea mays
  misc_feature: MA Experiment 108545 PARAMETER Experiment Name: Zm_Imbibed_Seeds_P Parameter: Plant Line Value: 35A19
  misc_feature: MA Experiment 108545 PARAMETER Experiment Name: Zm_Imbibed_Seeds_P Parameter: Tissue Value: Aerial vs. Embryo
  misc_feature: MA Experiment ID: 108547 Result: Down-regulated in Transcription
  misc_feature: MA Experiment 108547 PARAMETER Experiment Name: Zm_Imbibed_Seeds_P Parameter: Age (day) Value: 4 vs. 2
  misc_feature: MA Experiment 108547 PARAMETER Experiment Name: Zm_Imbibed_Seeds_P Parameter: Organism Value: Zea mays
  misc_feature: MA Experiment 108547 PARAMETER Experiment Name: Zm_Imbibed_Seeds_P Parameter: Plant Line Value: 35A19
  misc_feature: MA Experiment 108547 PARAMETER Experiment Name: Zm_Imbibed_Seeds_P Parameter: Tissue Value: Aerial vs. Embryo
  misc_feature: MA Experiment ID: 108597 Result: Down-regulated in Transcription
  misc_feature: MA Experiment 108597 PARAMETER Experiment Name: Zm_100uM_ABA_P Parameter: Age (day) Value: 9
  misc_feature: MA Experiment 108597 PARAMETER Experiment Name: Zm_100uM_ABA_P Parameter: Organism Value: Zea mays
  misc_feature: MA Experiment 108597 PARAMETER Experiment Name: Zm_100uM_ABA_P Parameter: Plant Line Value: 35A19
  misc_feature: MA Experiment 108597 PARAMETER Experiment Name: Zm_100uM_ABA_P Parameter: Timepoint (hr) Value: 24
  misc_feature: MA Experiment 108597 PARAMETER Experiment Name: Zm_100uM_ABA_P Parameter: Tissue Value: Aerial
  misc_feature: MA Experiment 108597 PARAMETER Experiment Name: Zm_100uM_ABA_P Parameter: Treatment Value: 100uM ABA vs. No Treatment
  misc_feature: MA Experiment ID: 20000479 Result: Up-regulated in Transcription
  misc_feature: MA Experiment 20000479 PARAMETER Experiment Name: Zm_Drought_P Parameter: Age (day) Value: 10
  misc_feature: MA Experiment 20000479 PARAMETER Experiment Name: Zm_Drought_P Parameter: Organism Value: Zea mays
  misc_feature: MA Experiment 20000479 PARAMETER Experiment Name: Zm_Drought_P Parameter: Plant Line Value: 35A19
  misc_feature: MA Experiment 20000479 PARAMETER Experiment Name: Zm_Drought_P Parameter: Timepoint (hr) Value: 48
  misc_feature: MA Experiment 20000479 PARAMETER Experiment Name: Zm_Drought_P Parameter: Tissue Value: Aerial
  misc_feature: MA Experiment 20000479 PARAMETER Experiment Name: Zm_Drought_P Parameter: Treatment Value: Drought vs. No Drought
  misc_feature: MA Experiment ID: 20000480 Result: Up-regulated in Transcription
  misc_feature: MA Experiment 20000480 PARAMETER Experiment Name: Zm_Drought_P Parameter: Age (day) Value: 11
  misc_feature: MA Experiment 20000480 PARAMETER Experiment Name: Zm_Drought_P Parameter: Organism Value: Zea mays
  misc_feature: MA Experiment 20000480 PARAMETER Experiment Name: Zm_Drought_P Parameter: Plant Line Value: 35A19
  misc_feature: MA Experiment 20000480 PARAMETER Experiment Name: Zm_Drought_P Parameter: Timepoint (hr) Value: 72
  misc_feature: MA Experiment 20000480 PARAMETER Experiment Name: Zm_Drought_P Parameter: Tissue Value: Aerial
  misc_feature: MA Experiment 20000480 PARAMETER Experiment Name: Zm_Drought_P Parameter: Treatment Value: Drought vs. No Drought
  misc_feature: MA Experiment ID: 20000492 Result: Up-regulated in Transcription
  misc_feature: MA Experiment 20000492 PARAMETER Experiment Name: Zm_Hybrid_Seed_Dev_P Parameter: DAP Value: 12
  misc_feature: MA Experiment 20000492 PARAMETER Experiment Name: Zm_Hybrid_Seed_Dev_P Parameter: Organism Value: Zea mays
  misc_feature: MA Experiment 20000492 PARAMETER Experiment Name: Zm_Hybrid_Seed_Dev_P Parameter: Plant Line Value: 35A19
  misc_feature: MA Experiment 20000492 PARAMETER Experiment Name: Zm_Hybrid_Seed_Dev_P Parameter: Tissue Value: Fert Kernel vs. Unfert Floret
  misc_feature: MA Experiment ID: 20000535 Result: Down-regulated in Transcription
  misc_feature: MA Experiment 20000535 PARAMETER Experiment Name: Zm_Hybrid_Seed_Dev_P Parameter: DAP Value: 30 vs. 12
  misc_feature: MA Experiment 20000535 PARAMETER Experiment Name: Zm_Hybrid_Seed_Dev_P Parameter: Organism Value: Zea mays
  misc_feature: MA Experiment 20000535 PARAMETER Experiment Name: Zm_Hybrid_Seed_Dev_P Parameter: Plant Line Value: 35A19
  misc_feature: MA Experiment 20000535 PARAMETER Experiment Name: Zm_Hybrid_Seed_Dev_P Parameter: Tissue Value: Embryo vs. Unfert Floret
  misc_feature: MA Experiment ID: 20000626 Result: Up-regulated in Transcription
  misc_feature: MA Experiment 20000626 PARAMETER Experiment Name: Zm_Herbicide-Treatments_P Parameter: Timepoint (hr) Value: 12
  misc_feature: MA Experiment 20000626 PARAMETER Experiment Name: Zm_Herbicide-Treatments_P Parameter: Tissue Value: Aerial
  misc_feature: MA Experiment 20000626 PARAMETER Experiment Name: Zm_Herbicide-Treatments_P Parameter: Treatment Value: Roundup vs. No Treatment
  misc_feature: MA Experiment ID: 20001612 Result: Up-regulated in Transcription
  misc_feature: MA Experiment 20001612 PARAMETER Experiment Name: Zm_50ppm_KNO3_L-to-H_P Parameter: Age (day) Value: 19
  misc_feature: MA Experiment 20001612 PARAMETER Experiment Name: Zm_50ppm_KNO3_L-to-H_P Parameter: Organism Value: Zea mays
  misc_feature: MA Experiment 20001612 PARAMETER Experiment Name: Zm_50ppm_KNO3_L-to-H_P Parameter: Plant Line Value: 35A19
  misc_feature: MA Experiment 20001612 PARAMETER Experiment Name: Zm_50ppm_KNO3_L-to-H_P Parameter: Timepoint (hr) Value: 8
  misc_feature: MA Experiment 20001612 PARAMETER Experiment Name: Zm_50ppm_KNO3_L-to-H_P Parameter: Tissue Value: Roots
  misc_feature: MA Experiment 20001612 PARAMETER Experiment Name: Zm_50ppm_KNO3_L-to-H_P Parameter: Treatment Value: 50ppm KNO3 vs. 50ppm KCl
gcacgagaccattacctagaacatcctaatcgaaaaactagcagccctcgctcgcattctctcctcccagtcccctagtccttactccttaccatcccatatatccctagctagcgctctcggccgcatcgccggacgtctattaaaccgccgccgctcctcctcggcatgcgcggttctgctcgcctgcgacatggcgcctgcagcttccatcctctcggccaccgccgccgcctccgccaagcgcccggccacttccgacgctgatgagctcccgcacgacgactcctccgcgccccaccagcaggtgcagggcgacgagcccgcgcgcaagggccagcaaccgcggcagcagcagctggagtgcccgcgctgccgctccaccaacaccaagttctgctactacaacaactacagcacggcgcagccgcgccacttctgccgcgcgtgccgccgctactggacgcacgggggcacgctgcgcgacgtccccgtcggcggcgcctcgcgccgcgccgccactggcagcggcggcaagcggcgcagggtctccgccgagccctcatccccgccgccgtcggtcgcggacgcgtgcctgccgtccgccttcccgttcctcagcgacggcagcttcttcccgcagctcgacctcgtcggcggcgttgcgcttgcacccccggccttctcctcctcgtggcagtcggtgctggtcccggacttgtacgacgggctcgcgccgtgggacgacggagcaacggcgggcacgtggggcgacatcggtggcctcgacctcagctggacactgccggggaactgagtgccagccgccgtcgcgcgtcttgaggggctccggttttagcagtgcggcctcgtcaggttcagttcagttcagttcctagcatgcagagctctcacaattctcctatgtcgcctccactgtttcttctcgtccttactgcgaatgaaatggtggggctgctagttagatcagtgcatcttgatctgtagctagagccagagtgtaagatctgtgcagtgatttatcgtgacaataaaattaagtttgtgcc

SEQ ID NO: 17748 - protein, 210 aa, Zea mays subsp. mays
  peptide (1)..(210): Ceres Seq. ID no. 12364064
  misc_feature (1)..(177): Pfam Name: Equine herpesvirus glycoprotein gp2 Pfam Description: Equine herpesvirus glycoprotein gp2
  misc_feature (1)..(210): Homolog of NCBI NO: 13592175 NR Description: ppg3 [Leishmania major]
  misc_feature (1)..(205): Homolog of NCBI NO: 11360494 NR Description: antifreeze glycopeptide AFGP polyprotein
  misc_feature (1)..(210): Homolog of NCBI NO: 13592175 NR Description: ppg3 [Leishmania major]
  misc_feature (1)..(210): Homolog of NCBI NO: 13592175 NR Description: ppg3 [Leishmania major]
  misc_feature (1)..(210): Homolog of NCBI NO: 13592175 NR Description: ppg3 [Leishmania major]
  misc_feature (1)..(133): Homolog of NCBI NO: 11360494 NR Description: antifreeze glycopeptide AFGP polyprotein
  misc_feature (1)..(210): Homolog of NCBI NO: 13592175 NR Description: ppg3 [Leishmania major]
  misc_feature (1)..(170): Homolog of NCBI NO: 11360494 NR Description: antifreeze glycopeptide AFGP polyprotein
  misc_feature (1)..(183): Homolog of NCBI NO: 11360494 NR Description: antifreeze glycopeptide AFGP polyprotein
  misc_feature (1)..(202): Homolog of NCBI NO: 11360494 NR Description: antifreeze glycopeptide AFGP polyprotein
MSSRTTTPPRPTSRCRATSPRARASNRGSSSWSARAAAPPTPSSATTTTTARRSRATSAARAAATGRTGARCATSPSAAPRAAPPLAAAASGAGSPPSPHPRRRRSRTRACRPPSRSSATAASSRSSTSSAALRLHPRPSPPRGSRCWSRTCTTGSRRGTTEQRRARGATSVASTSAGHCRGTECQPPSRVLRGSGFSSAASSGSVQFSS

SEQ ID NO: 17749 - protein, 207 aa, Zea mays subsp. mays
  peptide (1)..(207): Ceres Seq. ID no. 12364065
  misc_feature (52)..(112): Pfam Name: Dof domain, zinc finger Pfam Description: Dof domain, zinc finger
  misc_feature (40)..(159): Homolog of NCBI NO: 30684022 NR Description: Dof zinc finger protein [Arabidopsis thaliana]
  misc_feature (40)..(159): Homolog of NCBI NO: 25352305 NR Description: probable DOF zinc finger protein
  misc_feature (19)..(166): Homolog of NCBI NO: 21538785 NR Description: dof zinc finger protein [Hordeum vulgare subsp.
  misc_feature (48)..(179): Homolog of NCBI NO: 34903500 NR Description: P0001B06.2 [Oryza sativa (japonica
  misc_feature (25)..(149): Homolog of NCBI NO: 3790264 NR Description: PBF protein [Triticum aestivum]
  misc_feature (25)..(167): Homolog of NCBI NO: 3777436 NR Description: DNA binding protein [Hordeum vulgare subsp.
  misc_feature (52)..(157): Homolog of NCBI NO: 1212759 NR Description: DNA binding protein [Arabidopsis thaliana]
  misc_feature (35)..(166): Homolog of NCBI NO: 15240134 NR Description: Dof zinc finger protein; protein id: At5g66940.1
  misc_feature (27)..(157): Homolog of NCBI NO: 15229744 NR Description: Dof zinc finger protein; protein id: At3g50410.1
  misc_feature (1)..(207): Homolog of NCBI NO: 38344208 NR Description: OSJNBa0064G10.24 [Oryza sativa (japonica
MAPAASILSATAAASAKRPATSDADELPHDDSSAPHQQVQGDEPARKGQQPRQQQLECPRCRSTNTKFCYYNNYSTAQPRHFCRACRRYWTHGGTLRDVPVGGASRRAATGSGGKRRRVSAEPSSPPPSVADACLPSAFPFLSDGSFFPQLDLVGGVALAPPAFSSSWQSVLVPDLYDGLAPWDDGATAGTWGDIGGLDLSWTLPGN

SEQ ID NO: 17750 - DNA, 2141 bp, Zea mays subsp. mays
  misc_feature (1)..(2141): Ceres Seq. ID no. 12435299
  misc_feature: MA Experiment ID: 108515 Result: Up-regulated in Transcription
  misc_feature: MA Experiment 108515 PARAMETER Experiment Name: Zm_2mM_SA_P Parameter: Age (day) Value: 8
  misc_feature: MA Experiment 108515 PARAMETER Experiment Name: Zm_2mM_SA_P Parameter: Organism Value: Zea mays
  misc_feature: MA Experiment 108515 PARAMETER Experiment Name: Zm_2mM_SA_P Parameter: Plant Line Value: 35A19
  misc_feature: MA Experiment 108515 PARAMETER Experiment Name: Zm_2mM_SA_P Parameter: Timepoint (hr) Value: 12
  misc_feature: MA Experiment 108515 PARAMETER Experiment Name: Zm_2mM_SA_P Parameter: Tissue Value: Aerial
  misc_feature: MA Experiment 108515 PARAMETER Experiment Name: Zm_2mM_SA_P Parameter: Treatment Value: 2mM SA vs. No Treatment
  misc_feature: MA Experiment ID: 108522 Result: Up-regulated in Transcription
  misc_feature: MA Experiment 108522 PARAMETER Experiment Name: Zm_42deg_Heat_P Parameter: Age (day) Value: 8
  misc_feature: MA Experiment 108522 PARAMETER Experiment Name: Zm_42deg_Heat_P Parameter: Organism Value: Zea mays
  misc_feature: MA Experiment 108522 PARAMETER Experiment Name: Zm_42deg_Heat_P Parameter: Plant Line Value: 35A19
  misc_feature: MA Experiment 108522 PARAMETER Experiment Name: Zm_42deg_Heat_P Parameter: Temperature (deg C) Value: 42 vs. 22
  misc_feature: MA Experiment 108522 PARAMETER Experiment Name: Zm_42deg_Heat_P Parameter: Timepoint (hr) Value: 1
  misc_feature: MA Experiment 108522 PARAMETER Experiment Name: Zm_42deg_Heat_P Parameter: Tissue Value: Aerial
  misc_feature: MA Experiment ID: 108527 Result: Up-regulated in Transcription
  misc_feature: MA Experiment 108527 PARAMETER Experiment Name: Zm_5mM_NO_P Parameter: Age (day) Value: 8
  misc_feature: MA Experiment 108527 PARAMETER Experiment Name: Zm_5mM_NO_P Parameter: Organism Value: Zea mays
  misc_feature: MA Experiment 108527 PARAMETER Experiment Name: Zm_5mM_NO_P Parameter: Plant Line Value: 35A19
  misc_feature: MA Experiment 108527 PARAMETER Experiment Name: Zm_5mM_NO_P Parameter: Timepoint (hr) Value: 6
  misc_feature: MA Experiment 108527 PARAMETER Experiment Name: Zm_5mM_NO_P Parameter: Tissue Value: Aerial
  misc_feature: MA Experiment 108527 PARAMETER Experiment Name: Zm_5mM_NO_P Parameter: Treatment Value: 5mM NO vs. No Treatment
  misc_feature: MA Experiment ID: 108532 Result: Down-regulated in Transcription
  misc_feature: MA Experiment 108532 PARAMETER Experiment Name: Zm_20uM_KNO3_H-to-L_P Parameter: Age (day) Value: 11
  misc_feature: MA Experiment 108532 PARAMETER Experiment Name: Zm_20uM_KNO3_H-to-L_P Parameter: Organism Value: Zea mays
  misc_feature: MA Experiment 108532 PARAMETER Experiment Name: Zm_20uM_KNO3_H-to-L_P Parameter: Plant Line Value: 35A19
  misc_feature: MA Experiment 108532 PARAMETER Experiment Name: Zm_20uM_KNO3_H-to-L_P Parameter: Timepoint (hr) Value: 16
  misc_feature: MA Experiment 108532 PARAMETER Experiment Name: Zm_20uM_KNO3_H-to-L_P Parameter: Tissue Value: Roots
  misc_feature: MA Experiment 108532 PARAMETER Experiment Name: Zm_20uM_KNO3_H-to-L_P Parameter: Treatment Value: 20uM KNO3 vs. 60mM KNO3
  misc_feature: MA Experiment ID: 108535 Result: Down-regulated in Transcription
  misc_feature: MA Experiment 108535 PARAMETER Experiment Name: Zm_Meristem_P Parameter: Age (day) Value: 8
  misc_feature: MA Experiment 108535 PARAMETER Experiment Name: Zm_Meristem_P Parameter: Organism Value: Zea mays
  misc_feature: MA Experiment 108535 PARAMETER Experiment Name: Zm_Meristem_P Parameter: Plant Line Value: 35A19
  misc_feature: MA Experiment 108535 PARAMETER Experiment Name: Zm_Meristem_P Parameter: Tissue Value: Root Meristem vs. Above Root Meristem
  misc_feature: MA Experiment ID: 108543 Result: Down-regulated in Transcription
  misc_feature: MA Experiment ID: 108547 Result: Down-regulated in Transcription
  misc_feature: MA Experiment 108547 PARAMETER Experiment Name: Zm_Imbibed_Seeds_P Parameter: Age (day) Value: 4 vs. 2
  misc_feature: MA Experiment 108547 PARAMETER Experiment Name: Zm_Imbibed_Seeds_P Parameter: Organism Value: Zea mays
  misc_feature: MA Experiment 108547 PARAMETER Experiment Name: Zm_Imbibed_Seeds_P Parameter: Plant Line Value: 35A19
  misc_feature: MA Experiment 108547 PARAMETER Experiment Name: Zm_Imbibed_Seeds_P Parameter: Tissue Value: Aerial vs. Embryo
  misc_feature: MA Experiment ID: 108559 Result: Up-regulated in Transcription
  misc_feature: MA Experiment 108559 PARAMETER Experiment Name: Zm_5mM_NO_P Parameter: Age (day) Value: 8
  misc_feature: MA Experiment 108559 PARAMETER Experiment Name: Zm_5mM_NO_P Parameter: Organism Value: Zea mays
  misc_feature: MA Experiment 108559 PARAMETER Experiment Name: Zm_5mM_NO_P Parameter: Plant Line Value: 35A19
  misc_feature: MA Experiment 108559 PARAMETER Experiment Name: Zm_5mM_NO_P Parameter: Timepoint (hr) Value: 12
  misc_feature: MA Experiment 108559 PARAMETER Experiment Name: Zm_5mM_NO_P Parameter: Tissue Value: Aerial
  misc_feature: MA Experiment 108559 PARAMETER Experiment Name: Zm_5mM_NO_P Parameter: Treatment Value: 5mM NO vs. No Treatment
  misc_feature: MA Experiment ID: 108687 Result: Down-regulated in Transcription
  misc_feature: MA Experiment 108687 PARAMETER Experiment Name: Zm_Embryos-Flowers__P Parameter: Tissue Value: Embryo vs. Aerial+
  misc_feature: MA Experiment ID: 20000477 Result: Up-regulated in Transcription
  misc_feature: MA Experiment 20000477 PARAMETER Experiment Name: Zm_5mM_SA_P Parameter: Age (day) Value: 10
  misc_feature: MA Experiment 20000477 PARAMETER Experiment Name: Zm_5mM_SA_P Parameter: Organism Value: Zea mays
  misc_feature: MA Experiment 20000477 PARAMETER Experiment Name: Zm_5mM_SA_P Parameter: Plant Line Value: 35A19
  misc_feature: MA Experiment 20000477 PARAMETER Experiment Name: Zm_5mM_SA_P Parameter: Timepoint (hr) Value: 48
  misc_feature: MA Experiment 20000477 PARAMETER Experiment Name: Zm_5mM_SA_P Parameter: Tissue Value: Aerial
  misc_feature: MA Experiment 20000477 PARAMETER Experiment Name: Zm_5mM_SA_P Parameter: Treatment Value: 5mM SA vs. No Treatment
  misc_feature: MA Experiment ID: 20000487 Result: Up-regulated in Transcription
  misc_feature: MA Experiment 20000487 PARAMETER Experiment Name: Zm_50mM_NH4NO3_L_to_H_P Parameter: Organism Value: Zea mays
  misc_feature: MA Experiment 20000487 PARAMETER Experiment Name: Zm_50mM_NH4NO3_L_to_H_P Parameter: Timepoint (hr) Value: 4
  misc_feature: MA Experiment 20000487 PARAMETER Experiment Name: Zm_50mM_NH4NO3_L_to_H_P Parameter: Tissue Value: Leaves
  misc_feature: MA Experiment 20000487 PARAMETER Experiment Name: Zm_50mM_NH4NO3_L_to_H_P Parameter: Treatment Value: 50mM NH4NO3 vs. 100mM Mannitol
  misc_feature: MA Experiment ID: 20000492 Result: Down-regulated in Transcription
  misc_feature: MA Experiment 20000492 PARAMETER Experiment Name: Zm_Hybrid_Seed_Dev_P Parameter: DAP Value: 12
  misc_feature: MA Experiment 20000492 PARAMETER Experiment Name: Zm_Hybrid_Seed_Dev_P Parameter: Organism Value: Zea mays
  misc_feature: MA Experiment 20000492 PARAMETER Experiment Name: Zm_Hybrid_Seed_Dev_P Parameter: Plant Line Value: 35A19
  misc_feature: MA Experiment 20000492 PARAMETER Experiment Name: Zm_Hybrid_Seed_Dev_P Parameter: Tissue Value: Fert Kernel vs. Unfert Floret
  misc_feature: MA Experiment ID: 20000532 Result: Up-regulated in Transcription
  misc_feature: MA Experiment 20000532 PARAMETER Experiment Name: Zm_0.001percent_MeJA_P Parameter: Age (day) Value: 10
  misc_feature: MA Experiment 20000532 PARAMETER Experiment Name: Zm_0.001percent_MeJA_P Parameter: Organism Value: Zea mays
  misc_feature: MA Experiment 20000532 PARAMETER Experiment Name: Zm_0.001percent_MeJA_P Parameter: Plant Line Value: 35A19
  misc_feature: MA Experiment 20000532 PARAMETER Experiment Name: Zm_0.001percent_MeJA_P Parameter: Timepoint (hr) Value: 48
  misc_feature: MA Experiment 20000532 PARAMETER Experiment Name: Zm_0.001percent_MeJA_P Parameter: Tissue Value: Aerial
  misc_feature: MA Experiment 20000532 PARAMETER Experiment Name: Zm_0.001percent_MeJA_P Parameter: Treatment Value: 0.001percent MeJA vs. No Treatment
  misc_feature: MA Experiment ID: 20000626 Result: Up-regulated in Transcription
  misc_feature: MA Experiment 20000626 PARAMETER Experiment Name: Zm_Herbicide-Treatments_P Parameter: Timepoint (hr) Value: 12
  misc_feature: MA Experiment 20000626 PARAMETER Experiment Name: Zm_Herbicide-Treatments_P Parameter: Tissue Value: Aerial
  misc_feature: MA Experiment 20000626 PARAMETER Experiment Name: Zm_Herbicide-Treatments_P Parameter: Treatment Value: Roundup vs. No Treatment
  misc_feature: MA Experiment ID: 20000629 Result: Up-regulated in Transcription
  misc_feature: MA Experiment 20000629 PARAMETER Experiment Name: Zm_Herbicide-Treatments_P Parameter: Timepoint (hr) Value: 12
  misc_feature: MA Experiment 20000629 PARAMETER Experiment Name: Zm_Herbicide-Treatments_P Parameter: Tissue Value: Aerial
  misc_feature: MA Experiment 20000629 PARAMETER Experiment Name: Zm_Herbicide-Treatments_P Parameter: Treatment Value: Trimec vs. No Treatment
  misc_feature: MA Experiment ID: 20000633 Result: Up-regulated in Transcription
  misc_feature: MA Experiment 20000633 PARAMETER Experiment Name: Zm_Herbicide-Treatments_P Parameter: Timepoint (hr) Value: 4
  misc_feature: MA Experiment 20000633 PARAMETER Experiment Name: Zm_Herbicide-Treatments_P Parameter: Tissue Value: Aerial
  misc_feature: MA Experiment 20000633 PARAMETER Experiment Name: Zm_Herbicide-Treatments_P Parameter: Treatment Value: Trimec vs. No Treatment
  misc_feature: MA Experiment ID: 20001608 Result: Down-regulated in Transcription
  misc_feature: MA Experiment 20001608 PARAMETER Experiment Name: Zm_50ppm_KNO3_L-to-H_P Parameter: Age (day) Value: 21
  misc_feature: MA Experiment 20001608 PARAMETER Experiment Name: Zm_50ppm_KNO3_L-to-H_P Parameter: Organism Value: Zea mays
  misc_feature: MA Experiment 20001608 PARAMETER Experiment Name: Zm_50ppm_KNO3_L-to-H_P Parameter: Plant Line Value: 35A19
  misc_feature: MA Experiment 20001608 PARAMETER Experiment Name: Zm_50ppm_KNO3_L-to-H_P Parameter: Timepoint (hr) Value: 48
  misc_feature: MA Experiment 20001608 PARAMETER Experiment Name: Zm_50ppm_KNO3_L-to-H_P Parameter: Tissue Value: Shoots
  misc_feature: MA Experiment 20001608 PARAMETER Experiment Name: Zm_50ppm_KNO3_L-to-H_P Parameter: Treatment Value: 50ppm KNO3 vs. 50ppm KCl
gcacgagaccattacctagaacatcctaatcaaaatcgcctcgccgtcgccgtcgtcatctcagctttaattcgcagcaggcgggcagtggcaggccaggccacggcgtccagcaccagctacgcctgtgcgcgcgcttgtgcagtacctacgttggtgggtgggtaggtagctagtgcggcggagcatcgatcgcgcggtactctcagttccatccgtcgagagatcgaccggtcgtcgatcgacatggcgggccggggaggagcctcggcggcggcgccgttgctggagaagacagcggcggcggcggagtcgggcggcgggtgctgctacgtggacgggtgccccgggtgcgccgtggaccggcacaaggcggcgaacccgggcattccctacggcaacttcatctacgtctggatcgtcaccctctgcacagccttaccgatatcgtcgctcttccccttcttgtatttcatgataagagacctgaatgtcgctaaaagaacagaagacatcgggttctacgctggttttgtaggtgcctcattcatgtttggtagatgcttgacttcaacagtatggggcatagcggcagaccgcgttgggaggaaacctgttgtcgtgttcggcatttcctctgtagttgtgttcaacacattgtttggtctgagtgtcaactactggatggcaatagctacccggtttctgcttggtgccttgaatggtttgcttggaccgataaaggcttatgccattgaagtttgccgacctgaacatgaagccctagcactatcacttgtcagcacagcatggggaataggtctcattattggtcctgctcttggaggctaccttgcactgcctgcagaaaattttccaactgtcttttcacctgactcaatctttggaaggttcccatatttcttaccatgcttatgcacgtcaatcttcgctgcggttgttctcataagctgcatatggatgccggagactttgcacaagcacaaagtccatgaaaatagaagtcggaacattgaagctttggaggcccgtctgattgattcaaatgaaaaggttgaagaaagtggtagtttagatagtaagaagagcctattcaggaattggccattgatgtcatcaataattgtctattgtgtcttctccttccatgacatggcttacacagaggtgttctctctatgggctgaaagcgacaagaagtatggtgggctgagtttatcatctgaggatgttggtcaagtgcttgcagtcacaggtgccagtcttcttgtataccaactctttctataccccagtatcaataaggttcttgggcctatcaaatcttctcgagttgcagctatcctgtgcatacccatcctctttgcctacccctacatgacgtacctgtcggaacctggattatcaatcgttttgaatattgcgtcagtgataaagaataatctcggtgtcaccatcattacaggcactttcatccttcaaaacaatgccgtgcctcaggaccagcgaggcgctgcgaatggactgtccatgactgggatgtcctttttcaaggcacttgctccagcaggagcaggcattgtgttctcatgggcgcagaaacgccagcatgcgtttttcttcccaggtgaccagatggtattcttcctcctgaacgccgtcgagctggtcgggcttctcctcacgttcaagcccttcctggcagtaccagagcagtacgatacgagatagttagacgatctatctatctatacaagttctggaacgttcaagacgattcatcgtgtgcggctgtaccagtgaaggagaagcgccaaagcgtgtgccctttacgccgcggaaggtctacaaacagggacatactcctatataggaagatgcaatgcaagagctgtggtgtacttttaattgtaggtgatgtagtagtgtatggtagtatcagcattttctgcattcatgaaatgcacacgcaggtggtgggaaatgtgggcatggatcgagagtcgctgcgctgttaagtagcaataaatgttaaggttcagtgactcgctgttatttgttgggaatgaaattactgggcatctgtaccctcgttgttttatatctggctgttggattct

SEQ ID NO: 17751 - protein, 501 aa, Zea mays subsp. mays
  peptide (1)..(501): Ceres Seq. ID no. 12435300
  misc_feature (102)..(497): Homolog of NCBI NO: 21555230 NR Description: transporter-like protein [Arabidopsis thaliana]
  misc_feature (102)..(497): Homolog of NCBI NO: 30684567 NR Description: transporter-related protein [Arabidopsis thaliana]
  misc_feature (31)..(493): Homolog of NCBI NO: 15229781 NR Description: transporter-like protein; protein id: At3g43790.1
  misc_feature (102)..(498): Homolog of NCBI NO: 23452819 NR Description: major facilitator superfamily antiporter [Zea
  misc_feature (42)..(469): Homolog of NCBI NO: 10177340 NR Description: transporter-like protein [Arabidopsis thaliana]
  misc_feature (42)..(492): Homolog of NCBI NO: 20260160 NR Description: transporter-like protein [Arabidopsis thaliana]
  misc_feature (29)..(492): Homolog of NCBI NO: 22326785 NR Description: transporter-like protein
  misc_feature (1)..(496): Homolog of NCBI NO: 23452821 NR Description: major facilitator superfamily antiporter
  misc_feature (31)..(497): Homolog of NCBI NO: 30684565 NR Description: transporter-related protein [Arabidopsis
  misc_feature (29)..(498): Homolog of NCBI NO: 23452823 NR Description: major facilitator superfamily antiporter
  misc_feature (102)..(497): Homolog of NCBI NO: 21555230 NR Description: transporter-like protein [Arabidopsis thaliana]
  misc_feature (102)..(497): Homolog of NCBI NO: 30684567 NR Description: transporter-related protein [Arabidopsis thaliana]
  misc_feature (31)..(493): Homolog of NCBI NO: 15229781 NR Description: transporter-like protein; protein id: At3g43790.1
  misc_feature (102)..(498): Homolog of NCBI NO: 23452819 NR Description: major facilitator superfamily antiporter [Zea
  misc_feature (42)..(469): Homolog of NCBI NO: 10177340 NR Description: transporter-like protein [Arabidopsis thaliana]
  misc_feature (42)..(492): Homolog of NCBI NO: 20260160 NR Description: transporter-like protein [Arabidopsis thaliana]
  misc_feature (29)..(492): Homolog of NCBI NO: 22326785 NR Description: transporter-like protein
  misc_feature (1)..(496): Homolog of NCBI NO: 23452821 NR Description: major facilitator superfamily antiporter
  misc_feature (31)..(497): Homolog of NCBI NO: 30684565 NR Description: transporter-related protein [Arabidopsis
  misc_feature (29)..(498): Homolog of NCBI NO: 23452823 NR Description: major facilitator superfamily antiporter
MAGRGGASAAAPLLEKTAAAAESGGGCCYVDGCPGCAVDRHKAANPGIPYGNFIYVWIVTLCTALPISSLFPFLYFMIRDLNVAKRTEDIGFYAGFVGASFMFGRCLTSTVWGIAADRVGRKPVVVFGISSVVVFNTLFGLSVNYWMAIATRFLLGALNGLLGPIKAYAIEVCRPEHEALALSLVSTAWGIGLIIGPALGGYLALPAENFPTVFSPDSIFGRFPYFLPCLCTSIFAAVVLISCIWMPETLHKHKVHENRSRNIEALEARLIDSNEKVEESGSLDSKKSLFRNWPLMSSIIVYCVFSFHDMAYTEVFSLWAESDKKYGGLSLSSEDVGQVLAVTGASLLVYQLFLYPSINKVLGPIKSSRVAAILCIPILFAYPYMTYLSEPGLSIVLNIASVIKNNLGVTIITGTFILQNNAVPQDQRGAANGLSMTGMSFFKALAPAGAGIVFSWAQKRQHAFFFPGDQMVFFLLNAVELVGLLLTFKPFLAVPEQYDTR

SEQ ID NO: 17752 - protein, 425 aa, Zea mays subsp. mays
  peptide (1)..(425): Ceres Seq. ID no. 12435301
  misc_feature (26)..(421): Homolog of NCBI NO: 21555230 NR Description: transporter-like protein [Arabidopsis thaliana]
  misc_feature (26)..(421): Homolog of NCBI NO: 30684567 NR Description: transporter-related protein [Arabidopsis thaliana]
  misc_feature (1)..(417): Homolog of NCBI NO: 15229781 NR Description: transporter-like protein; protein id: At3g43790.1
  misc_feature (26)..(422): Homolog of NCBI NO: 23452819 NR Description: major facilitator superfamily antiporter [Zea
  misc_feature (1)..(393): Homolog of NCBI NO: 10177340 NR Description: transporter-like protein [Arabidopsis thaliana]
  misc_feature (1)..(416): Homolog of NCBI NO: 20260160 NR Description: transporter-like protein [Arabidopsis thaliana]
  misc_feature (1)..(416): Homolog of NCBI NO: 22326785 NR Description: transporter-like protein
  misc_feature (1)..(420): Homolog of NCBI NO: 23452821 NR Description: major facilitator superfamily antiporter
  misc_feature (1)..(421): Homolog of NCBI NO: 30684565 NR Description: transporter-related protein [Arabidopsis
  misc_feature (1)..(422): Homolog of NCBI NO: 23452823 NR Description: major facilitator superfamily antiporter
  misc_feature (26)..(421): Homolog of NCBI NO: 21555230 NR Description: transporter-like protein [Arabidopsis thaliana]
  misc_feature (26)..(421): Homolog of NCBI NO: 30684567 NR Description: transporter-related protein [Arabidopsis thaliana]
  misc_feature (1)..(417): Homolog of NCBI NO: 15229781 NR Description: transporter-like protein; protein id: At3g43790.1
  misc_feature (26)..(422): Homolog of NCBI NO: 23452819 NR Description: major facilitator superfamily antiporter [Zea
  misc_feature (1)..(393): Homolog of NCBI NO: 10177340 NR Description: transporter-like protein [Arabidopsis thaliana]
  misc_feature (1)..(416): Homolog of NCBI NO: 20260160 NR Description: transporter-like protein [Arabidopsis thaliana]
  misc_feature (1)..(416): Homolog of NCBI NO: 22326785 NR Description: transporter-like protein
  misc_feature (1)..(420): Homolog of NCBI NO: 23452821 NR Description: major facilitator superfamily antiporter
  misc_feature (1)..(421): Homolog of NCBI NO: 30684565 NR Description: transporter-related protein [Arabidopsis
  misc_feature (1)..(422): Homolog of NCBI NO: 23452823 NR Description: major facilitator superfamily antiporter
MIRDLNVAKRTEDIGFYAGFVGASFMFGRCLTSTVWGIAADRVGRKPVVVFGISSVVVFNTLFGLSVNYWMAIATRFLLGALNGLLGPIKAYAIEVCRPEHEALALSLVSTAWGIGLIIGPALGGYLALPAENFPTVFSPDSIFGRFPYFLPCLCTSIFAAVVLISCIWMPETLHKHKVHENRSRNIEALEARLIDSNEKVEESGSLDSKKSLFRNWPLMSSIIVYCVFSFHDMAYTEVFSLWAESDKKYGGLSLSSEDVGQVLAVTGASLLVYQLFLYPSINKVLGPIKSSRVAAILCIPILFAYPYMTYLSEPGLSIVLNIASVIKNNLGVTIITGTFILQNNAVPQDQRGAANGLSMTGMSFFKALAPAGAGIVFSWAQKRQHAFFFPGDQMVFFLLNAVELVGLLLTFKPFLAVPEQYDTR

SEQ ID NO: 17753 - protein, 400 aa, Zea mays subsp. mays
  peptide (1)..(400): Ceres Seq. ID no. 12435302
  misc_feature (1)..(396): Homolog of NCBI NO: 21555230 NR Description: transporter-like protein [Arabidopsis thaliana]
  misc_feature (1)..(396): Homolog of NCBI NO: 30684567 NR Description: transporter-related protein [Arabidopsis thaliana]
  misc_feature (1)..(392): Homolog of NCBI NO: 15229781 NR Description: transporter-like protein; protein id: At3g43790.1
  misc_feature (1)..(397): Homolog of NCBI NO: 23452819 NR Description: major facilitator superfamily antiporter [Zea
  misc_feature (1)..(368): Homolog of NCBI NO: 10177340 NR Description: transporter-like protein [Arabidopsis thaliana]
  misc_feature (1)..(391): Homolog of NCBI NO: 20260160 NR Description: transporter-like protein [Arabidopsis thaliana]
  misc_feature (1)..(391): Homolog of NCBI NO: 22326785 NR Description: transporter-like protein
  misc_feature (1)..(395): Homolog of NCBI NO: 23452821 NR Description: major facilitator superfamily antiporter
  misc_feature (1)..(396): Homolog of NCBI NO: 30684565 NR Description: transporter-related protein [Arabidopsis
  misc_feature (1)..(397): Homolog of NCBI NO: 23452823 NR Description: major facilitator superfamily antiporter
  misc_feature (1)..(396): Homolog of NCBI NO: 21555230 NR Description: transporter-like protein [Arabidopsis thaliana]
  misc_feature (1)..(396): Homolog of NCBI NO: 30684567 NR Description: transporter-related protein [Arabidopsis thaliana]
  misc_feature (1)..(392): Homolog of NCBI NO: 15229781 NR Description: transporter-like protein; protein id: At3g43790.1
  misc_feature (1)..(397): Homolog of NCBI NO: 23452819 NR Description: major facilitator superfamily antiporter [Zea
  misc_feature (1)..(368): Homolog of NCBI NO: 10177340 NR Description: transporter-like protein [Arabidopsis thaliana]
  misc_feature (1)..(391): Homolog of NCBI NO: 20260160 NR Description: transporter-like protein [Arabidopsis thaliana]
  misc_feature (1)..(391): Homolog of NCBI NO: 22326785 NR Description: transporter-like protein
  misc_feature (1)..(395): Homolog of NCBI NO: 23452821 NR Description: major facilitator superfamily antiporter
  misc_feature (1)..(396): Homolog of NCBI NO: 30684565 NR Description: transporter-related protein [Arabidopsis
  misc_feature (1)..(397): Homolog of NCBI NO: 23452823 NR Description: major facilitator superfamily antiporter
MFGRCLTSTVWGIAADRVGRKPVVVFGISSVVVFNTLFGLSVNYWMAIATRFLLGALNGLLGPIKAYAIEVCRPEHEALALSLVSTAWGIGLIIGPALGGYLALPAENFPTVFSPDSIFGRFPYFLPCLCTSIFAAVVLISCIWMPETLHKHKVHENRSRNIEALEARLIDSNEKVEESGSLDSKKSLFRNWPLMSSIIVYCVFSFHDMAYTEVFSLWAESDKKYGGLSLSSEDVGQVLAVTGASLLVYQLFLYPSINKVLGPIKSSRVAAILCIPILFAYPYMTYLSEPGLSIVLNIASVIKNNLGVTIITGTFILQNNAVPQDQRGAANGLSMTGMSFFKALAPAGAGIVFSWAQKRQHAFFFPGDQMVFFLLNAVELVGLLLTFKPFLAVPEQYDTR

SEQ ID NO: 17754 - DNA, 789 bp, Zea mays subsp. mays; identical to SEQ ID NO: 1699
  misc_feature (1)..(789): Ceres Seq. ID no. 12355957
  misc_feature: MA Experiment ID: 108528 Result: Down-regulated in Transcription
  misc_feature: MA Experiment 108528 PARAMETER Experiment Name: Zm_Imbibed_Seeds_P Parameter: Age (day) Value: 5 vs. 2
  misc_feature: MA Experiment 108528 PARAMETER Experiment Name: Zm_Imbibed_Seeds_P Parameter: Organism Value: Zea mays
  misc_feature: MA Experiment 108528 PARAMETER Experiment Name: Zm_Imbibed_Seeds_P Parameter: Plant Line Value: 35A19
  misc_feature: MA Experiment 108528 PARAMETER Experiment Name: Zm_Imbibed_Seeds_P Parameter: Tissue Value: Aerial vs. Embryo
  misc_feature: MA Experiment ID: 108530 Result: Down-regulated in Transcription
  misc_feature: MA Experiment 108530 PARAMETER Experiment Name: Zm_Imbibed_Seeds_P Parameter: Age (day) Value: 6 vs. 2
  misc_feature: MA Experiment 108530 PARAMETER Experiment Name: Zm_Imbibed_Seeds_P Parameter: Organism Value: Zea mays
  misc_feature: MA Experiment 108530 PARAMETER Experiment Name: Zm_Imbibed_Seeds_P Parameter: Plant Line Value: 35A19
  misc_feature: MA Experiment 108530 PARAMETER Experiment Name: Zm_Imbibed_Seeds_P Parameter: Tissue Value: Aerial vs. Embryo
  misc_feature: MA Experiment ID: 108535 Result: Up-regulated in Transcription
  misc_feature: MA Experiment 108535 PARAMETER Experiment Name: Zm_Meristem_P Parameter: Age (day) Value: 8
  misc_feature: MA Experiment 108535 PARAMETER Experiment Name: Zm_Meristem_P Parameter: Organism Value: Zea mays
  misc_feature: MA Experiment 108535 PARAMETER Experiment Name: Zm_Meristem_P Parameter: Plant Line Value: 35A19
  misc_feature: MA Experiment 108535 PARAMETER Experiment Name: Zm_Meristem_P Parameter: Tissue Value: Root Meristem vs. Above Root Meristem
  misc_feature: MA Experiment ID: 20000488 Result: Up-regulated in Transcription
  misc_feature: MA Experiment 20000488 PARAMETER Experiment Name: Zm_50mM_NH4NO3_L_to_H_P Parameter: Organism Value: Zea mays
  misc_feature: MA Experiment 20000488 PARAMETER Experiment Name: Zm_50mM_NH4NO3_L_to_H_P Parameter: Timepoint (hr) Value: 8
  misc_feature: MA Experiment 20000488 PARAMETER Experiment Name: Zm_50mM_NH4NO3_L_to_H_P Parameter: Tissue Value: Leaves
  misc_feature: MA Experiment 20000488 PARAMETER Experiment Name: Zm_50mM_NH4NO3_L_to_H_P Parameter: Treatment Value: 50mM NH4NO3 vs. 100mM Mannitol
  misc_feature: MA Experiment ID: 20001606 Result: Up-regulated in Transcription
  misc_feature: MA Experiment 20001606 PARAMETER Experiment Name: Zm_50ppm_KNO3_L-to-H_P Parameter: Age (day) Value: 19
  misc_feature: MA Experiment 20001606 PARAMETER Experiment Name: Zm_50ppm_KNO3_L-to-H_P Parameter: Organism Value: Zea mays
  misc_feature: MA Experiment 20001606 PARAMETER Experiment Name: Zm_50ppm_KNO3_L-to-H_P Parameter: Plant Line Value: 35A19
  misc_feature: MA Experiment 20001606 PARAMETER Experiment Name: Zm_50ppm_KNO3_L-to-H_P Parameter: Timepoint (hr) Value: 8
  misc_feature: MA Experiment 20001606 PARAMETER Experiment Name: Zm_50ppm_KNO3_L-to-H_P Parameter: Tissue Value: Shoots
  misc_feature: MA Experiment 20001606 PARAMETER Experiment Name: Zm_50ppm_KNO3_L-to-H_P Parameter: Treatment Value: 50ppm KNO3 vs. 50ppm KCl
  misc_feature: MA Experiment ID: 20001612 Result: Up-regulated in Transcription
  misc_feature: MA Experiment 20001612 PARAMETER Experiment Name: Zm_50ppm_KNO3_L-to-H_P Parameter: Age (day) Value: 19
  misc_feature: MA Experiment 20001612 PARAMETER Experiment Name: Zm_50ppm_KNO3_L-to-H_P Parameter: Organism Value: Zea mays
  misc_feature: MA Experiment 20001612 PARAMETER Experiment Name: Zm_50ppm_KNO3_L-to-H_P Parameter: Plant Line Value: 35A19
  misc_feature: MA Experiment 20001612 PARAMETER Experiment Name: Zm_50ppm_KNO3_L-to-H_P Parameter: Timepoint (hr) Value: 8
  misc_feature: MA Experiment 20001612 PARAMETER Experiment Name: Zm_50ppm_KNO3_L-to-H_P Parameter: Tissue Value: Roots
  misc_feature: MA Experiment 20001612 PARAMETER Experiment Name: Zm_50ppm_KNO3_L-to-H_P Parameter: Treatment Value: 50ppm KNO3 vs. 50ppm KCl

SEQ ID NO: 17755 - protein, 161 aa, Zea mays subsp. mays; identical to SEQ ID NO: 1700
  peptide (1)..(161): Ceres Seq. ID no. 12355958
  misc_feature (3)..(73): Pfam Name: Ribosomal protein L24e Pfam Description: Ribosomal protein L24e
  misc_feature (3)..(73): Pfam Name: Ribosomal protein L24e Pfam Description: Ribosomal protein L24e
  misc_feature (3)..(73): Pfam Name: Ribosomal protein L24e Pfam Description: Ribosomal protein L24e
  misc_feature (1)..(161): Homolog of NCBI NO: 1710521 NR Description: 60S RIBOSOMAL PROTEIN L24 >gi|7440778|pir||T06178
  misc_feature (4)..(161): Homolog of NCBI NO: 34900364 NR Description: putative 60S ribosomal protein L24 [Oryza sativa
  misc_feature (1)..(160): Homolog of NCBI NO: 6094040 NR Description: 60S ribosomal protein L24
  misc_feature (1)..(156): Homolog of NCBI NO: 10180025 NR Description: 60S ribosomal protein L24 [Prunus avium]
  misc_feature (1)..(161): Homolog of NCBI NO: 18404176 NR Description: 60S ribosomal protein L24; protein id: supported by cDNA: 14564., supported by cDNA: gi_16604375, by cDNA: gi_18252830 [Arabidopsis thaliana]
  misc_feature (4)..(161): Homolog of NCBI NO: 34900364 NR Description: putative 60S ribosomal protein L24 [Oryza sativa
  misc_feature (1)..(156): Homolog of NCBI NO: 10180025 NR Description: 60S ribosomal protein L24 [Prunus avium]
  misc_feature (1)..(160): Homolog of NCBI NO: 6094040 NR Description: 60S ribosomal protein L24
  misc_feature (4)..(161): Homolog of NCBI NO: 34900364 NR Description: putative 60S ribosomal protein L24 [Oryza sativa
  misc_feature (1)..(161): Homolog of NCBI NO: 1710521 NR Description: 60S RIBOSOMAL PROTEIN L24 >gi|7440778|pir||T06178
  misc_feature (10)..(154): Homolog of NCBI NO: 40741063 NR Description: conserved hypothetical protein [Aspergillus
  misc_feature (3)..(150): Homolog of NCBI NO: 19115030 NR Description: 60S ribosomal protein L24 [Schizosaccharomyces
  misc_feature (3)..(150): Homolog of NCBI NO: 19075214 NR Description: 60s ribosomal protein L24 [Schizosaccharomyces
  misc_feature (5)..(161): Homolog of NCBI NO: 25295112 NR Description: 60S ribosomal protein L24 [imported] -
  misc_feature (1)..(161): Homolog of NCBI NO: 15231730 NR Description: 60S ribosomal protein - like; protein id: supported by cDNA: gi_16648705, supported by cDNA: gi_20260561 thaliana] >gi|26454659|sp|P38666|RL24_ARATH 60S ribosomal protein
  misc_feature (1)..(161): Homolog of NCBI NO: 18404176 NR Description: 60S ribosomal protein L24; protein id: supported by cDNA: 14564., supported by cDNA: gi_16604375, by cDNA: gi_18252830 [Arabidopsis thaliana]
  misc_feature (10)..(154): Homolog of NCBI NO: 40741063 NR Description: conserved hypothetical protein [Aspergillus
  misc_feature (3)..(150): Homolog of NCBI NO: 19115030 NR Description: 60S ribosomal protein L24 [Schizosaccharomyces
  misc_feature (3)..(150): Homolog of NCBI NO: 19075214 NR Description: 60s ribosomal protein L24 [Schizosaccharomyces
  misc_feature (5)..(161): Homolog of NCBI NO: 25295112 NR Description: 60S ribosomal protein L24 [imported] -
  misc_feature (1)..(161): Homolog of NCBI NO: 15231730 NR Description: 60S ribosomal protein - like; protein id: supported by cDNA: gi_16648705, supported by cDNA: gi_20260561 thaliana] >gi|26454659|sp|P38666|RL24_ARATH 60S ribosomal protein
  misc_feature (1)..(161): Homolog of NCBI NO: 18404176 NR Description: 60S ribosomal protein L24; protein id: supported by cDNA: 14564., supported by cDNA: gi_16604375, by cDNA: gi_18252830 [Arabidopsis thaliana]
  misc_feature (1)..(156): Homolog of NCBI NO: 10180025 NR Description: 60S ribosomal protein L24 [Prunus avium]
  misc_feature (1)..(160): Homolog of NCBI NO: 6094040 NR Description: 60S ribosomal protein L24
  misc_feature (1)..(161): Homolog of NCBI NO: 1710521 NR Description: 60S RIBOSOMAL PROTEIN L24 >gi|7440778|pir||T06178
  misc_feature (1)..(161): Homolog of NCBI NO: 15231730 NR Description: 60S ribosomal protein - like; protein id: supported by cDNA: gi_16648705, supported by cDNA: gi_20260561 thaliana] >gi|26454659|sp|P38666|RL24_ARATH 60S ribosomal protein
  misc_feature (5)..(161): Homolog of NCBI NO: 25295112 NR Description: 60S ribosomal protein L24 [imported] -
  misc_feature (3)..(150): Homolog of NCBI NO: 19075214 NR Description: 60s ribosomal protein L24 [Schizosaccharomyces
  misc_feature (3)..(150): Homolog of NCBI NO: 19115030 NR Description: 60S ribosomal protein L24 [Schizosaccharomyces
  misc_feature (10)..(154): Homolog of NCBI NO: 40741063 NR Description: conserved hypothetical protein [Aspergillus

SEQ ID NO: 17756 - protein, 106 aa, Zea mays subsp. mays; identical to SEQ ID NO: 1701
  peptide (1)..(106): Ceres Seq. ID no. 12355959
  misc_feature (1)..(99): Homolog of NCBI NO: 40741063 NR Description: conserved hypothetical protein [Aspergillus
  misc_feature (1)..(106): Homolog of NCBI NO: 1710521 NR Description: 60S RIBOSOMAL PROTEIN L24 >gi|7440778|pir||T06178
  misc_feature (1)..(106): Homolog of NCBI NO: 34900364 NR Description: putative 60S ribosomal protein L24 [Oryza sativa
  misc_feature (1)..(105): Homolog of NCBI NO: 6094040 NR Description: 60S ribosomal protein L24
  misc_feature (1)..(101): Homolog of NCBI NO: 10180025 NR Description: 60S ribosomal protein L24 [Prunus avium]
  misc_feature (1)..(106): Homolog of NCBI NO: 18404176 NR Description: 60S ribosomal protein L24; protein id: supported by cDNA: 14564., supported by cDNA: gi_16604375, by cDNA: gi_18252830 [Arabidopsis thaliana]
  misc_feature (1)..(106): Homolog of NCBI NO: 15231730 NR Description: 60S ribosomal protein - like; protein id: supported by cDNA: gi_16648705, supported by cDNA: gi_20260561 thaliana] >gi|26454659|sp|P38666|RL24_ARATH 60S ribosomal protein
  misc_feature (1)..(106): Homolog of NCBI NO: 25295112 NR Description: 60S ribosomal protein L24 [imported] -
  misc_feature (1)..(95): Homolog of NCBI NO: 19075214 NR Description: 60s ribosomal protein L24 [Schizosaccharomyces
  misc_feature (1)..(95): Homolog of NCBI NO: 19115030 NR Description: 60S ribosomal protein L24 [Schizosaccharomyces
  misc_feature (1)..(106): Homolog of NCBI NO: 1710521 NR Description: 60S RIBOSOMAL PROTEIN L24 >gi|7440778|pir||T06178
  misc_feature (1)..(106): Homolog of NCBI NO: 34900364 NR Description: putative 60S ribosomal protein L24 [Oryza sativa
  misc_feature (1)..(105): Homolog of NCBI NO: 6094040 NR Description: 60S ribosomal protein L24
  misc_feature (1)..(101): Homolog of NCBI NO: 10180025 NR Description: 60S ribosomal protein L24 [Prunus avium]
  misc_feature (1)..(106): Homolog of NCBI NO: 18404176 NR Description: 60S ribosomal protein L24; protein id: supported by cDNA: 14564., supported by cDNA: gi_16604375, by cDNA: gi_18252830 [Arabidopsis thaliana]
  misc_feature (1)..(106): Homolog of NCBI NO: 15231730 NR Description: 60S ribosomal protein - like; protein id: supported by cDNA: gi_16648705, supported by cDNA: gi_20260561 thaliana] >gi|26454659|sp|P38666|RL24_ARATH 60S ribosomal protein
  misc_feature (1)..(106): Homolog of NCBI NO: 25295112 NR Description: 60S ribosomal protein L24 [imported] -
  misc_feature (1)..(95): Homolog of NCBI NO: 19075214 NR Description: 60s ribosomal protein L24 [Schizosaccharomyces
  misc_feature (1)..(95): Homolog of NCBI NO: 19115030 NR Description: 60S ribosomal protein L24 [Schizosaccharomyces
  misc_feature (1)..(99): Homolog of NCBI NO: 40741063 NR Description: conserved hypothetical protein [Aspergillus
  misc_feature (1)..(106): Homolog of NCBI NO: 1710521 NR Description: 60S RIBOSOMAL PROTEIN L24 >gi|7440778|pir||T06178
  misc_feature (1)..(106): Homolog of NCBI NO: 34900364 NR Description: putative 60S ribosomal protein L24 [Oryza sativa
  misc_feature (1)..(105): Homolog of NCBI NO: 6094040 NR Description: 60S ribosomal protein L24
  misc_feature (1)..(101): Homolog of NCBI NO: 10180025 NR Description: 60S ribosomal protein L24 [Prunus avium]
  misc_feature (1)..(106): Homolog of NCBI NO: 18404176 NR Description: 60S ribosomal protein L24; protein id: supported by cDNA: 14564., supported by cDNA: gi_16604375, by cDNA: gi_18252830 [Arabidopsis thaliana]
  misc_feature (1)..(106): Homolog of NCBI NO: 15231730 NR Description: 60S ribosomal protein - like; protein id: supported by cDNA: gi_16648705, supported by cDNA: gi_20260561 thaliana] >gi|26454659|sp|P38666|RL24_ARATH 60S ribosomal protein
  misc_feature (1)..(106): Homolog of NCBI NO: 25295112 NR Description: 60S ribosomal protein L24 [imported] -
  misc_feature (1)..(95): Homolog of NCBI NO: 19075214 NR Description: 60s ribosomal protein L24 [Schizosaccharomyces
  misc_feature (1)..(95): Homolog of NCBI NO: 19115030 NR Description: 60S ribosomal protein L24 [Schizosaccharomyces
  misc_feature (1)..(99): Homolog of NCBI NO: 40741063 NR Description: conserved hypothetical protein [Aspergillus

SEQ ID NO: 17757 - DNA, 2101 bp, Zea mays subsp. mays
  misc_feature (1)..(2101): Ceres Seq. ID no. 12435356
  misc_feature: MA Experiment ID: 108529 Result: Down-regulated in Transcription
  misc_feature: MA Experiment 108529 PARAMETER Experiment Name: Zm_Imbibed_Seeds_P Parameter: Age (day) Value: 5 vs. 2
  misc_feature: MA Experiment 108529 PARAMETER Experiment Name: Zm_Imbibed_Seeds_P Parameter: Organism Value: Zea mays
  misc_feature: MA Experiment 108529 PARAMETER Experiment Name: Zm_Imbibed_Seeds_P Parameter: Plant Line Value: 35A19
  misc_feature: MA Experiment 108529 PARAMETER Experiment Name: Zm_Imbibed_Seeds_P Parameter: Tissue Value: Roots vs. Embryo
  misc_feature: MA Experiment ID: 108535 Result: Up-regulated in Transcription
  misc_feature: MA Experiment 108535 PARAMETER Experiment Name: Zm_Meristem_P Parameter: Age (day) Value: 8
  misc_feature: MA Experiment 108535 PARAMETER Experiment Name: Zm_Meristem_P Parameter: Organism Value: Zea mays
  misc_feature: MA Experiment 108535 PARAMETER Experiment Name: Zm_Meristem_P Parameter: Plant Line Value: 35A19
  misc_feature: MA Experiment 108535 PARAMETER Experiment Name: Zm_Meristem_P Parameter: Tissue Value: Root Meristem vs. Above Root Meristem
  misc_feature: MA Experiment ID: 108543 Result: Up-regulated in Transcription
  misc_feature: MA Experiment ID: 108545 Result: Up-regulated in Transcription
  misc_feature: MA Experiment 108545 PARAMETER Experiment Name: Zm_Imbibed_Seeds_P Parameter: Age (day) Value: 3 vs. 2
  misc_feature: MA Experiment 108545 PARAMETER Experiment Name: Zm_Imbibed_Seeds_P Parameter: Organism Value: Zea mays
  misc_feature: MA Experiment 108545 PARAMETER Experiment Name: Zm_Imbibed_Seeds_P Parameter: Plant Line Value: 35A19
  misc_feature: MA Experiment 108545 PARAMETER Experiment Name: Zm_Imbibed_Seeds_P Parameter: Tissue Value: Aerial vs. Embryo
  misc_feature: MA Experiment ID: 108546 Result: Down-regulated in Transcription
  misc_feature: MA Experiment 108546 PARAMETER Experiment Name: Zm_Imbibed_Seeds_P Parameter: Age (day) Value: 3 vs. 2
  misc_feature: MA Experiment 108546 PARAMETER Experiment Name: Zm_Imbibed_Seeds_P Parameter: Organism Value: Zea mays
  misc_feature: MA Experiment 108546 PARAMETER Experiment Name: Zm_Imbibed_Seeds_P Parameter: Plant Line Value: 35A19
  misc_feature: MA Experiment 108546 PARAMETER Experiment Name: Zm_Imbibed_Seeds_P Parameter: Tissue Value: Roots vs. Embryo
  misc_feature: MA Experiment ID: 108556 Result: Down-regulated in Transcription
  misc_feature: MA Experiment 108556 PARAMETER Experiment Name: Zm_Drought_P Parameter: Age (day) Value: 9
  misc_feature: MA Experiment 108556 PARAMETER Experiment Name: Zm_Drought_P Parameter: Organism Value: Zea mays
  misc_feature: MA Experiment 108556 PARAMETER Experiment Name: Zm_Drought_P Parameter: Plant Line Value: 35A19
  misc_feature: MA Experiment 108556 PARAMETER Experiment Name: Zm_Drought_P Parameter: Timepoint (hr) Value: 24
  misc_feature: MA Experiment 108556 PARAMETER Experiment Name: Zm_Drought_P Parameter: Tissue Value: Aerial
  misc_feature: MA Experiment 108556 PARAMETER Experiment Name: Zm_Drought_P Parameter: Treatment Value: Drought vs. No Drought
  misc_feature: MA Experiment ID: 108687 Result: Down-regulated in Transcription
  misc_feature: MA Experiment 108687 PARAMETER Experiment Name: Zm_Embryos-Flowers__P Parameter: Tissue Value: Embryo vs. Aerial+
  misc_feature: MA Experiment ID: 108689 Result: Down-regulated in Transcription
  misc_feature: MA Experiment 108689 PARAMETER Experiment Name: Zm_Drought_Roots_P Parameter: Age (day) Value: 9
  misc_feature: MA Experiment 108689 PARAMETER Experiment Name: Zm_Drought_Roots_P Parameter: Organism Value: Zea mays
  misc_feature: MA Experiment 108689 PARAMETER Experiment Name: Zm_Drought_Roots_P Parameter: Plant Line Value: 35A19
  misc_feature: MA Experiment 108689 PARAMETER Experiment Name: Zm_Drought_Roots_P Parameter: Timepoint (hr) Value: 24
  misc_feature: MA Experiment 108689 PARAMETER Experiment Name: Zm_Drought_Roots_P Parameter: Tissue Value: Roots
  misc_feature: MA Experiment 108689 PARAMETER Experiment Name: Zm_Drought_Roots_P Parameter: Treatment Value: Drought vs. No Drought
  misc_feature: MA Experiment ID: 20000477 Result: Down-regulated in Transcription
  misc_feature: MA Experiment 20000477 PARAMETER Experiment Name: Zm_5mM_SA_P Parameter: Age (day) Value: 10
  misc_feature: MA Experiment 20000477 PARAMETER Experiment Name: Zm_5mM_SA_P Parameter: Organism Value: Zea mays
  misc_feature: MA Experiment 20000477 PARAMETER Experiment Name: Zm_5mM_SA_P Parameter: Plant Line Value: 35A19
  misc_feature: MA Experiment 20000477 PARAMETER Experiment Name: Zm_5mM_SA_P Parameter: Timepoint (hr) Value: 48
  misc_feature: MA Experiment 20000477 PARAMETER Experiment Name: Zm_5mM_SA_P Parameter: Tissue Value: Aerial
  misc_feature: MA Experiment 20000477 PARAMETER Experiment Name: Zm_5mM_SA_P Parameter: Treatment Value: 5mM SA vs. No Treatment
  misc_feature: MA Experiment ID: 20000478 Result: Down-regulated in Transcription
  misc_feature: MA Experiment 20000478 PARAMETER Experiment Name: Zm_5mM_SA_P Parameter: Age (day) Value: 11
  misc_feature: MA Experiment 20000478 PARAMETER Experiment Name: Zm_5mM_SA_P Parameter: Organism Value: Zea mays
  misc_feature: MA Experiment 20000478 PARAMETER Experiment Name: Zm_5mM_SA_P Parameter: Plant Line Value: 35A19
  misc_feature: MA Experiment 20000478 PARAMETER Experiment Name: Zm_5mM_SA_P Parameter: Timepoint (hr) Value: 72
  misc_feature: MA Experiment 20000478 PARAMETER Experiment Name: Zm_5mM_SA_P Parameter: Tissue Value: Aerial
  misc_feature: MA Experiment 20000478 PARAMETER Experiment Name: Zm_5mM_SA_P Parameter: Treatment Value: 5mM SA vs. No Treatment
  misc_feature: MA Experiment ID: 20000479 Result: Down-regulated in Transcription
  misc_feature: MA Experiment 20000479 PARAMETER Experiment Name: Zm_Drought_P Parameter: Age (day) Value: 10
  misc_feature: MA Experiment 20000479 PARAMETER Experiment Name: Zm_Drought_P Parameter: Organism Value: Zea mays
  misc_feature: MA Experiment 20000479 PARAMETER Experiment Name: Zm_Drought_P Parameter: Plant Line Value: 35A19
  misc_feature: MA Experiment 20000479 PARAMETER Experiment Name: Zm_Drought_P Parameter: Timepoint (hr) Value: 48
  misc_feature: MA Experiment 20000479 PARAMETER Experiment Name: Zm_Drought_P Parameter: Tissue Value: Aerial
  misc_feature: MA Experiment 20000479 PARAMETER Experiment Name: Zm_Drought_P Parameter: Treatment Value: Drought vs. No Drought
  misc_feature: MA Experiment ID: 20000480 Result: Down-regulated in Transcription
  misc_feature: MA Experiment 20000480 PARAMETER Experiment Name: Zm_Drought_P Parameter: Age (day) Value: 11
  misc_feature: MA Experiment 20000480 PARAMETER Experiment Name: Zm_Drought_P Parameter: Organism Value: Zea mays
  misc_feature: MA Experiment 20000480 PARAMETER Experiment Name: Zm_Drought_P Parameter: Plant Line Value: 35A19
  misc_feature: MA Experiment 20000480 PARAMETER Experiment Name: Zm_Drought_P Parameter: Timepoint (hr) Value: 72
  misc_feature: MA Experiment 20000480 PARAMETER Experiment Name: Zm_Drought_P Parameter: Tissue Value: Aerial
  misc_feature: MA Experiment 20000480 PARAMETER Experiment Name: Zm_Drought_P Parameter: Treatment Value: Drought vs. No Drought
  misc_feature: MA Experiment ID: 20000535 Result: Up-regulated in Transcription
  misc_feature: MA Experiment 20000535 PARAMETER Experiment Name: Zm_Hybrid_Seed_Dev_P Parameter: DAP Value: 30 vs. 12
  misc_feature: MA Experiment 20000535 PARAMETER Experiment Name: Zm_Hybrid_Seed_Dev_P Parameter: Organism Value: Zea mays
  misc_feature: MA Experiment 20000535 PARAMETER Experiment Name: Zm_Hybrid_Seed_Dev_P Parameter: Plant Line Value: 35A19
  misc_feature: MA Experiment 20000535 PARAMETER Experiment Name: Zm_Hybrid_Seed_Dev_P Parameter: Tissue Value: Embryo vs. Unfert Floret
  misc_feature: MA Experiment ID: 20000632 Result: Down-regulated in Transcription
  misc_feature: MA Experiment 20000632 PARAMETER Experiment Name: Zm_Herbicide-Treatments_P Parameter: Timepoint (hr) Value: 4
  misc_feature: MA Experiment 20000632 PARAMETER Experiment Name: Zm_Herbicide-Treatments_P Parameter: Tissue Value: Aerial
  misc_feature: MA Experiment 20000632 PARAMETER Experiment Name: Zm_Herbicide-Treatments_P Parameter: Treatment Value: Glean vs. No Treatment
acaaccacccccgccgcaatggacaagattgagacgacgacgaggaggaggaggaaagggagaagcagcagcagccgccgccgccagggggcacggggaccggcgggcctcgtagccacggccttggccctcctctgcgcctgcgccttctccacgcctgccgccacggctctcaccccggacggcgaggcgttgctggagctcaagctggccttcaacgccaccgtgcatcatcggctcaccagctggcggcgcagcgaccccaacccctgtgtctgggagggcatctcctgctccgtccccgacctcagggtacaatccataaatctcccatacatgcagcttgggggcatcatttcgcccagcatcgggaggctggacaagctgcagagactagctctgcaccagaacagcttgcacggcccaatccccgcagagatcaagaactgcaccgagctcagggcaatttacctgagagccaactacctgcaaggaggtatcccttcggagattggcgagctcgtgcacctcaccatcttggacctgtcaagcaatctgttgaggggaacgataccggcctccatcggaagcctcactcaccttcgcttcctgaacctgtctactaatttcttctccggagagatcccaaatgtcggtgtcctcggagccttcaaaagcagctcgttcgttggaaatctggagctctgtggcctgtccatccagaaagcttgccgtggaaccctcggctttcctgccgtgctgccccactccgatccgctctcttcagctggcggtgtctctccaatcagtaacaacaagaagaagacatcgcgctttctgaatggcgtcgtgatcggctcgatgtcaaccttggctcttgccctgatcgctgtgctcggattcctgtggatctgcttgctgtccaggaagaagagcgtcggtggaaactacgtaaagatggacaagaaaactgttcctgacggcgcgaagcttgtgacgtaccagtggaaccttccgtactcgtcgagtgagatcattagaaggctggagctgcttgacgaagaggatgtggttggctgcgggggcttcggcacggtgtacagaatggtgatggacgatggcacgtcgttcgccgtcaagaggattgatctcagccgccaaagccgcgacaggaccatggagaaggagctcgagttcctgggcagcatcaggcacataaatcttgtcactttgcgaggctactgccggctgctccctgcagcaaagctactcgtatacgatttcgttgagctgggcagcttggactgctaccttcatggagatggacaagaggaccagccgttgaactggaacgcgcgtatgaagatcgcccttggctcggctcgaggcctggcatatctgcaccatgattgctcgcctgggatcgtgcacagggacatcaaggccagcaatatcctgctggacagaagcttggagcctcgtgtctctgattttggacttgcaaagctgcttgtagacaatgccgccgcccatgttaccactgttgtggcgggcacctttggatacctagcaccagagtacttgcaaaacgggcatgctactgagaaatcagacgtgtatagctttggagtgcttttgctggagctagtgacgggaaagaggccaaccgattcatgcttcatcaagaagggactgaacattgttggctggctgaacaccctgacgggggagcaccggctggaggatatcgttgacgagcgatgcggcgacgtcgaggtggaagccgtggaagccatcctggacatcgcagcgatgtgcaccgacgcagacccggcgcagcggccgtccatgagcgctgtcctcaagatgctggaggaagagatcctgtccccctgcatgagcgagctgtgctacgagcagcacctggagctctgagccgaggaagcctgacctgactacgatgcagtgcatgatggatgagactgtgtaggaaacaaaagttttgtagatatgacgatgatgaaccgcgtacgtagtgtaggtgtttgtgagcagctcaaaagtaggacaagtgcagaaccaacaacctgatcggcacgtt

SEQ ID NO: 17758 - protein, 644 aa, Zea mays subsp. mays
  peptide (1)..(644): Ceres Seq. ID no. 12435357
  misc_feature (340)..(630): Homolog of NCBI NO: 15219817 NR Description: receptor-like kinase, putative; protein id:
  misc_feature (40)..(242): Homolog of NCBI NO: 15240747 NR Description: receptor-like protein kinase-like protein
  misc_feature (344)..(626): Homolog of NCBI NO: 15240747 NR Description: receptor-like protein kinase-like protein
  misc_feature (40)..(231): Homolog of NCBI NO: 23304947 NR Description: extra sporogenous cells [Arabidopsis thaliana]
  misc_feature (344)..(626): Homolog of NCBI NO: 23304947 NR Description: extra sporogenous cells [Arabidopsis thaliana]
  misc_feature (132)..(635): Homolog of NCBI NO: 15227455 NR Description: putative receptor-like protein kinase; protein
  misc_feature (132)..(635): Homolog of NCBI NO: 30692520 NR Description: leucine-rich repeat transmembrane protein kinase,
  misc_feature (132)..(635): Homolog of NCBI NO: 25403114 NR Description: probable protein kinase [imported] - Arabidopsis
  misc_feature (62)..(631): Homolog of NCBI NO: 10177448 NR Description: receptor-like protein kinase [Arabidopsis
  misc_feature (38)..(631): Homolog of NCBI NO: 30697726 NR Description: leucine rich repeat protein family [Arabidopsis
TTTPAAMDKIETTTRRRRKGRSSSSRRRQGARGPAGLVATALALLCACAFSTPAATALTPDGEALLELKLAFNATVHHRLTSWRRSDPNPCVWEGISCSVPDLRVQSINLPYMQLGGIISPSIGRLDKLQRLALHQNSLHGPIPAEIKNCTELRAIYLRANYLQGGIPSEIGELVHLTILDLSSNLLRGTIPASIGSLTHLRFLNLSTNFFSGEIPNVGVLGAFKSSSFVGNLELCGLSIQKACRGTLGFPAVLPHSDPLSSAGGVSPISNNKKKTSRFLNGVVIGSMSTLALALIAVLGFLWICLLSRKKSVGGNYVKMDKKTVPDGAKLVTYQWNLPYSSSEIIRRLELLDEEDVVGCGGFGTVYRMVMDDGTSFAVKRIDLSRQSRDRTMEKELEFLGSIRHINLVTLRGYCRLLPAAKLLVYDFVELGSLDCYLHGDGQEDQPLNWNARMKIALGSARGLAYLHHDCSPGIVHRDIKASNILLDRSLEPRVSDFGLAKLLVDNAAAHVTTVVAGTFGYLAPEYLQNGHATEKSDVYSFGVLLLELVTGKRPTDSCFIKKGLNIVGWLNTLTGEHRLEDIVDERCGDVEVEAVEAILDIAAMCTDADPAQRPSMSAVLKMLEEEILSPCMSELCYEQHLEL

SEQ ID NO: 17759 - protein, 638 aa, Zea mays subsp. mays
  peptide (1)..(638): Ceres Seq. ID no. 12435358
  misc_feature (334)..(624): Homolog of NCBI NO: 15219817 NR Description: receptor-like kinase, putative; protein id:
  misc_feature (34)..(236): Homolog of NCBI NO: 15240747 NR Description: receptor-like protein kinase-like protein
  misc_feature (338)..(620): Homolog of NCBI NO: 15240747 NR Description: receptor-like protein kinase-like protein
  misc_feature (34)..(225): Homolog of NCBI NO: 23304947 NR Description: extra sporogenous cells [Arabidopsis thaliana]
  misc_feature (338)..(620): Homolog of NCBI NO: 23304947 NR Description: extra sporogenous cells [Arabidopsis thaliana]
  misc_feature (126)..(629): Homolog of NCBI NO: 15227455 NR Description: putative receptor-like protein kinase; protein
  misc_feature (126)..(629): Homolog of NCBI NO: 30692520 NR Description: leucine-rich repeat transmembrane protein kinase,
  misc_feature (126)..(629): Homolog of NCBI NO: 25403114 NR Description: probable protein kinase [imported] - Arabidopsis
  misc_feature (56)..(625): Homolog of NCBI NO: 10177448 NR Description: receptor-like protein kinase [Arabidopsis
  misc_feature (32)..(625): Homolog of NCBI NO: 30697726 NR Description: leucine rich repeat protein family [Arabidopsis
MDKIETTTRRRRKGRSSSSRRRQGARGPAGLVATALALLCACAFSTPAATALTPDGEALLELKLAFNATVHHRLTSWRRSDPNPCVWEGISCSVPDLRVQSINLPYMQLGGIISPSIGRLDKLQRLALHQNSLHGPIPAEIKNCTELRAIYLRANYLQGGIPSEIGELVHLTILDLSSNLLRGTIPASIGSLTHLRFLNLSTNFFSGEIPNVGVLGAFKSSSFVGNLELCGLSIQKACRGTLGFPAVLPHSDPLSSAGGVSPISNNKKKTSRFLNGVVIGSMSTLALALIAVLGFLWICLLSRKKSVGGNYVKMDKKTVPDGAKLVTYQWNLPYSSSEIIRRLELLDEEDVVGCGGFGTVYRMVMDDGTSFAVKRIDLSRQSRDRTMEKELEFLGSIRHINLVTLRGYCRLLPAAKLLVYDFVELGSLDCYLHGDGQEDQPLNWNARMKIALGSARGLAYLHHDCSPGIVHRDIKASNILLDRSLEPRVSDFGLAKLLVDNAAAHVTTVVAGTFGYLAPEYLQNGHATEKSDVYSFGVLLLELVTGKRPTDSCFIKKGLNIVGWLNTLTGEHRLEDIVDERCGDVEVEAVEAILDIAAMCTDADPAQRPSMSAVLKMLEEEILSPCMSELCYEQHLEL

SEQ ID NO: 17760 - protein, 532 aa, Zea mays subsp. mays
  peptide (1)..(532): Ceres Seq. ID no. 12435359
  misc_feature (228)..(518): Homolog of NCBI NO: 15219817 NR Description: receptor-like kinase, putative; protein id:
  misc_feature (1)..(130): Homolog of NCBI NO: 15240747 NR Description: receptor-like protein kinase-like protein
  misc_feature (232)..(514): Homolog of NCBI NO: 15240747 NR Description: receptor-like protein kinase-like protein
  misc_feature (1)..(119): Homolog of NCBI NO: 23304947 NR Description: extra sporogenous cells [Arabidopsis thaliana]
  misc_feature (232)..(514): Homolog of NCBI NO: 23304947 NR Description: extra sporogenous cells [Arabidopsis thaliana]
  misc_feature (20)..(523): Homolog of NCBI NO: 15227455 NR Description: putative receptor-like protein kinase; protein
  misc_feature (20)..(523): Homolog of NCBI NO: 30692520 NR Description: leucine-rich repeat transmembrane protein kinase,
  misc_feature (20)..(523): Homolog of NCBI NO: 25403114 NR Description: probable protein kinase [imported] - Arabidopsis
  misc_feature (1)..(519): Homolog of NCBI NO: 10177448 NR Description: receptor-like protein kinase [Arabidopsis
  misc_feature (1)..(519): Homolog of NCBI NO: 30697726 NR Description: leucine rich repeat protein family [Arabidopsis
MQLGGIISPSIGRLDKLQRLALHQNSLHGPIPAEIKNCTELRAIYLRANYLQGGIPSEIGELVHLTILDLSSNLLRGTIPASIGSLTHLRFLNLSTNFFSGEIPNVGVLGAFKSSSFVGNLELCGLSIQKACRGTLGFPAVLPHSDPLSSAGGVSPISNNKKKTSRFLNGVVIGSMSTLALALIAVLGFLWICLLSRKKSVGGNYVKMDKKTVPDGAKLVTYQWNLPYSSSEIIRRLELLDEEDVVGCGGFGTVYRMVMDDGTSFAVKRIDLSRQSRDRTMEKELEFLGSIRHINLVTLRGYCRLLPAAKLLVYDFVELGSLDCYLHGDGQEDQPLNWNARMKIALGSARGLAYLHHDCSPGIVHRDIKASNILLDRSLEPRVSDFGLAKLLVDNAAAHVTTVVAGTFGYLAPEYLQNGHATEKSDVYSFGVLLLELVTGKRPTDSCFIKKGLNIVGWLNTLTGEHRLEDIVDERCGDVEVEAVEAILDIAAMCTDADPAQRPSMSAVLKMLEEEILSPCMSELCYEQHLEL

SEQ ID NO: 17761 - DNA, 1062 bp, Zea mays subsp. mays
  misc_feature (1)..(1062): Ceres Seq. ID no. 12364415
  misc_feature: MA Experiment ID: 108543 Result: Down-regulated in Transcription
aacttgccgaccgcaggaatccagccgacccagcacttcccccggttcctcccagcagagtcttctctgcatccgttccgttccacggcctctcgcacatccaccgccaccgagccgcgtgcgtcttccatgaaggacccgttcgaggcggacgtcgaggagcaggactcgccgccggagtcgccggcgccgcccgaggatgaacccggcgccgcgggccccgcggaggaccccgaggactacgacggcggcccgcccccgcgccagccgtcggccccggcgtcgcacgcagtcacagccggtgccaaggccaaggcccgtatccatagggagcagcaggaggatgacgacgaggacgaggaccagattgaggtcgacctcgagaagcttcccagcagcactggcgacccagacaagctcgctaagatgaatgctatactgtcccaatttacacaacagcagatgaaccgttatgagtcattccgaagatctggatttcagaaatctaacatgaaaaggctgttggcaagcatcactggaagtcagaagatttctatccctacttcaattgtggtatcgggaatcgccaaaatatttgttggtgagctaattgaaacagcaagagtggtcatgagcgagaggaaggattcaggacccattaggccttgccacatcagggaggcatacagaagattgaagcttgaagggaagatcccacggcgatctgttcctaggctcttccgctagaattgaagcatgtatattacacatgtgtctggagtcctgacagatgtgtgccatgaggtgaggagtttctagtaccagcttgttgcagtttctggacagaaacctgaccagactctcacagcttctgttgagaaatcctgtcaaatgtcatatcatctttaagatggaattagaaagagttaaaacgtccctaccacggggcctaaaatcgcctggggttgttatttgtactgagggctactttgaaaacctcaaatccccttcgggattggaggggattgaggtggaaatgaactaattttctcttgagtttcc

SEQ ID NO: 17762 - protein, 248 aa, Zea mays subsp. mays
  peptide (1)..(248): Ceres Seq. ID no. 12364416
  misc_feature (143)..(232): Pfam Name: hTAFII28-like protein conserved region Pfam Description: hTAFII28-like protein conserved region
  misc_feature (138)..(239): Homolog of NCBI NO: 12835252 NR Description: unnamed protein product [Mus musculus]
  misc_feature (49)..(239): Homolog of NCBI NO: 27704824 NR Description: similar to Transcription initiation factor TFIID
  misc_feature (44)..(239): Homolog of NCBI NO: 27674899 NR Description: similar to Transcription initiation factor TFIID
  misc_feature (49)..(239): Homolog of NCBI NO: 30794436 NR Description: TAF11 RNA polymerase II, TATA box binding protein
  misc_feature (54)..(239): Homolog of NCBI NO: 5032151 NR Description: TBP-associated factor 11
  misc_feature (118)..(248): Homolog of NCBI NO: 25316525 NR Description: T20H2.22 protein - Arabidopsis thaliana
  misc_feature (118)..(248): Homolog of NCBI NO: 15223727 NR Description: hypothetical protein; protein id: At1g20000.1
  misc_feature (45)..(248): Homolog of NCBI NO: 7447999 NR Description: hypothetical protein F1C12.195 - Arabidopsis
  misc_feature (45)..(248): Homolog of NCBI NO: 15235369 NR Description: putative protein
  misc_feature (27)..(219): Homolog of NCBI NO: 34911174 NR Description: B1144G04.34 [Oryza sativa (japonica
NLPTAGIQPTQHFPRFLPAESSLHPFRSTASRTSTATEPRASSMKDPFEADVEEQDSPPESPAPPEDEPGAAGPAEDPEDYDGGPPPRQPSAPASHAVTAGAKAKARIHREQQEDDDEDEDQIEVDLEKLPSSTGDPDKLAKMNAILSQFTQQQMNRYESFRRSGFQKSNMKRLLASITGSQKISIPTSIVVSGIAKIFVGELIETARVVMSERKDSGPIRPCHIREAYRRLKLEGKIPRRSVPRLFR

SEQ ID NO: 17763 - protein, 205 aa, Zea mays subsp. mays
  peptide (1)..(205): Ceres Seq. ID no. 12364417
  misc_feature (100)..(189): Pfam Name: hTAFII28-like protein conserved region Pfam Description: hTAFII28-like protein conserved region
  misc_feature (95)..(196): Homolog of NCBI NO: 12835252 NR Description: unnamed protein product [Mus musculus]
  misc_feature (6)..(196): Homolog of NCBI NO: 27704824 NR Description: similar to Transcription initiation factor TFIID
  misc_feature (1)..(196): Homolog of NCBI NO: 27674899 NR Description: similar to Transcription initiation factor TFIID
  misc_feature (6)..(196): Homolog of NCBI NO: 30794436 NR Description: TAF11 RNA polymerase II, TATA box binding protein
  misc_feature (11)..(196): Homolog of NCBI NO: 5032151 NR Description: TBP-associated factor 11
  misc_feature (75)..(205): Homolog of NCBI NO: 25316525 NR Description: T20H2.22 protein - Arabidopsis thaliana
  misc_feature (75)..(205): Homolog of NCBI NO: 15223727 NR Description: hypothetical protein; protein id: At1g20000.1
  misc_feature (2)..(205): Homolog of NCBI NO: 7447999 NR Description: hypothetical protein F1C12.195 - Arabidopsis
  misc_feature (2)..(205): Homolog of NCBI NO: 15235369 NR Description: putative protein
  misc_feature (1)..(176): Homolog of NCBI NO: 34911174 NR Description: B1144G04.34 [Oryza sativa (japonica
MKDPFEADVEEQDSPPESPAPPEDEPGAAGPAEDPEDYDGGPPPRQPSAPASHAVTAGAKAKARIHREQQEDDDEDEDQIEVDLEKLPSSTGDPDKLAKMNAILSQFTQQQMNRYESFRRSGFQKSNMKRLLASITGSQKISIPTSIVVSGIAKIFVGELIETARVVMSERKDSGPIRPCHIREAYRRLKLEGKIPRRSVPRLFR

SEQ ID NO: 17764 - DNA, 1063 bp, Zea mays subsp. mays
  misc_feature (1)..(1063): Ceres Seq. ID no. 12417560
  misc_feature: MA Experiment ID: 108528 Result: Up-regulated in Transcription
  misc_feature: MA Experiment 108528 PARAMETER Experiment Name: Zm_Imbibed_Seeds_P Parameter: Age (day) Value: 5 vs. 2
  misc_feature: MA Experiment 108528 PARAMETER Experiment Name: Zm_Imbibed_Seeds_P Parameter: Organism Value: Zea mays
  misc_feature: MA Experiment 108528 PARAMETER Experiment Name: Zm_Imbibed_Seeds_P Parameter: Plant Line Value: 35A19
  misc_feature: MA Experiment 108528 PARAMETER Experiment Name: Zm_Imbibed_Seeds_P Parameter: Tissue Value: Aerial vs. Embryo
  misc_feature: MA Experiment ID: 108529 Result: Down-regulated in Transcription
  misc_feature: MA Experiment 108529 PARAMETER Experiment Name: Zm_Imbibed_Seeds_P Parameter: Age (day) Value: 5 vs. 2
  misc_feature: MA Experiment 108529 PARAMETER Experiment Name: Zm_Imbibed_Seeds_P Parameter: Organism Value: Zea mays
  misc_feature: MA Experiment 108529 PARAMETER Experiment Name: Zm_Imbibed_Seeds_P Parameter: Plant Line Value: 35A19
  misc_feature: MA Experiment 108529 PARAMETER Experiment Name: Zm_Imbibed_Seeds_P Parameter: Tissue Value: Roots vs. Embryo
  misc_feature: MA Experiment ID: 108530 Result: Up-regulated in Transcription
  misc_feature: MA Experiment 108530 PARAMETER Experiment Name: Zm_Imbibed_Seeds_P Parameter: Age (day) Value: 6 vs. 2
  misc_feature: MA Experiment 108530 PARAMETER Experiment Name: Zm_Imbibed_Seeds_P Parameter: Organism Value: Zea mays
  misc_feature: MA Experiment 108530 PARAMETER Experiment Name: Zm_Imbibed_Seeds_P Parameter: Plant Line Value: 35A19
  misc_feature: MA Experiment 108530 PARAMETER Experiment Name: Zm_Imbibed_Seeds_P Parameter: Tissue Value: Aerial vs. Embryo
  misc_feature: MA Experiment ID: 108534 Result: Down-regulated in Transcription
  misc_feature: MA Experiment 108534 PARAMETER Experiment Name: Zm_4deg_Cold_P Parameter: Age (hr) Value: 8
  misc_feature: MA Experiment 108534 PARAMETER Experiment Name: Zm_4deg_Cold_P Parameter: Organism Value: Zea mays
  misc_feature: MA Experiment 108534 PARAMETER Experiment Name: Zm_4deg_Cold_P Parameter: Plant Line Value: 35A19
  misc_feature: MA Experiment 108534 PARAMETER Experiment Name: Zm_4deg_Cold_P Parameter: Temperature (deg C) Value: 4 vs. 22
  misc_feature: MA Experiment 108534 PARAMETER Experiment Name: Zm_4deg_Cold_P Parameter: Timepoint (hr) Value: 6
  misc_feature: MA Experiment 108534 PARAMETER Experiment Name: Zm_4deg_Cold_P Parameter: Tissue Value: Aerial
  misc_feature: MA Experiment ID: 108535 Result: Down-regulated in Transcription
  misc_feature: MA Experiment 108535 PARAMETER Experiment Name: Zm_Meristem_P Parameter: Age (day) Value: 8
  misc_feature: MA Experiment 108535 PARAMETER Experiment Name: Zm_Meristem_P Parameter: Organism Value: Zea mays
  misc_feature: MA Experiment 108535 PARAMETER Experiment Name: Zm_Meristem_P Parameter: Plant Line Value: 35A19
  misc_feature: MA Experiment 108535 PARAMETER Experiment Name: Zm_Meristem_P Parameter: Tissue Value: Root Meristem vs. Above Root Meristem
  misc_feature: MA Experiment ID: 108536 Result: Down-regulated in Transcription
  misc_feature: MA Experiment 108536 PARAMETER Experiment Name: Zm_Meristem_P Parameter: Age (day) Value: 8
  misc_feature: MA Experiment 108536 PARAMETER Experiment Name: Zm_Meristem_P Parameter: Organism Value: Zea mays
  misc_feature: MA Experiment 108536 PARAMETER Experiment Name: Zm_Meristem_P Parameter: Plant Line Value: 35A19
  misc_feature: MA Experiment 108536 PARAMETER Experiment Name: Zm_Meristem_P Parameter: Tissue Value: Shoot Meristem vs. Above Shoot Meristem
  misc_feature: MA Experiment ID: 108544 Result: Up-regulated in Transcription
  misc_feature: MA Experiment ID: 108546 Result: Down-regulated in Transcription
  misc_feature: MA Experiment 108546 PARAMETER Experiment Name: Zm_Imbibed_Seeds_P Parameter: Age (day) Value: 3 vs. 2
  misc_feature: MA Experiment 108546 PARAMETER Experiment Name: Zm_Imbibed_Seeds_P Parameter: Organism Value: Zea mays
  misc_feature: MA Experiment 108546 PARAMETER Experiment Name: Zm_Imbibed_Seeds_P Parameter: Plant Line Value: 35A19
  misc_feature: MA Experiment 108546 PARAMETER Experiment Name: Zm_Imbibed_Seeds_P Parameter: Tissue Value: Roots vs. Embryo
  misc_feature: MA Experiment ID: 108547 Result: Up-regulated in Transcription
  misc_feature: MA Experiment 108547 PARAMETER Experiment Name: Zm_Imbibed_Seeds_P Parameter: Age (day) Value: 4 vs. 2
  misc_feature: MA Experiment 108547 PARAMETER Experiment Name: Zm_Imbibed_Seeds_P Parameter: Organism Value: Zea mays
  misc_feature: MA Experiment 108547 PARAMETER Experiment Name: Zm_Imbibed_Seeds_P Parameter: Plant Line Value: 35A19
  misc_feature: MA Experiment 108547 PARAMETER Experiment Name: Zm_Imbibed_Seeds_P Parameter: Tissue Value: Aerial vs. Embryo
  misc_feature: MA Experiment ID: 108556 Result: Up-regulated in Transcription
  misc_feature: MA Experiment 108556 PARAMETER Experiment Name: Zm_Drought_P Parameter: Age (day) Value: 9
  misc_feature: MA Experiment 108556 PARAMETER Experiment Name: Zm_Drought_P Parameter: Organism Value: Zea mays
  misc_feature: MA Experiment 108556 PARAMETER Experiment Name: Zm_Drought_P Parameter: Plant Line Value: 35A19
  misc_feature: MA Experiment 108556 PARAMETER Experiment Name: Zm_Drought_P Parameter: Timepoint (hr) Value: 24
  misc_feature: MA Experiment 108556 PARAMETER Experiment Name: Zm_Drought_P Parameter: Tissue Value: Aerial
  misc_feature: MA Experiment 108556 PARAMETER Experiment Name: Zm_Drought_P Parameter: Treatment Value: Drought vs. No Drought
  misc_feature: MA Experiment ID: 108687 Result: Down-regulated in Transcription
  misc_feature: MA Experiment 108687 PARAMETER Experiment Name: Zm_Embryos-Flowers__P Parameter: Tissue Value: Embryo vs. Aerial+
  misc_feature: MA Experiment ID: 20000477 Result: Up-regulated in Transcription
  misc_feature: MA Experiment 20000477 PARAMETER Experiment Name: Zm_5mM_SA_P Parameter: Age (day) Value: 10
  misc_feature: MA Experiment 20000477 PARAMETER Experiment Name: Zm_5mM_SA_P Parameter: Organism Value: Zea mays
  misc_feature: MA Experiment 20000477 PARAMETER Experiment Name: Zm_5mM_SA_P Parameter: Plant Line Value: 35A19
  misc_feature: MA Experiment 20000477 PARAMETER Experiment Name: Zm_5mM_SA_P Parameter: Timepoint (hr) Value: 48
  misc_feature: MA Experiment 20000477 PARAMETER Experiment Name: Zm_5mM_SA_P Parameter: Tissue Value: Aerial
  misc_feature: MA Experiment 20000477 PARAMETER Experiment Name: Zm_5mM_SA_P Parameter: Treatment Value: 5mM SA vs. No Treatment
  misc_feature: MA Experiment ID: 20000478 Result: Up-regulated in Transcription
  misc_feature: MA Experiment 20000478 PARAMETER Experiment Name: Zm_5mM_SA_P Parameter: Age (day) Value: 11
  misc_feature: MA Experiment 20000478 PARAMETER Experiment Name: Zm_5mM_SA_P Parameter: Organism Value: Zea mays
  misc_feature: MA Experiment 20000478 PARAMETER Experiment Name: Zm_5mM_SA_P Parameter: Plant Line Value: 35A19
  misc_feature: MA Experiment 20000478 PARAMETER Experiment Name: Zm_5mM_SA_P Parameter: Timepoint (hr) Value: 72
  misc_feature: MA Experiment 20000478 PARAMETER Experiment Name: Zm_5mM_SA_P Parameter: Tissue Value: Aerial
  misc_feature: MA Experiment 20000478 PARAMETER Experiment Name: Zm_5mM_SA_P Parameter: Treatment Value: 5mM SA vs. No Treatment
  misc_feature: MA Experiment ID: 20000479 Result: Up-regulated in Transcription
  misc_feature: MA Experiment 20000479 PARAMETER Experiment Name: Zm_Drought_P Parameter: Age (day) Value: 10
  misc_feature: MA Experiment 20000479 PARAMETER Experiment Name: Zm_Drought_P Parameter: Organism Value: Zea mays
  misc_feature: MA Experiment 20000479 PARAMETER Experiment Name: Zm_Drought_P Parameter: Plant Line Value: 35A19
  misc_feature: MA Experiment 20000479 PARAMETER Experiment Name: Zm_Drought_P Parameter: Timepoint (hr) Value: 48
  misc_feature: MA Experiment 20000479 PARAMETER Experiment Name: Zm_Drought_P Parameter: Tissue Value: Aerial
  misc_feature: MA Experiment 20000479 PARAMETER Experiment Name: Zm_Drought_P Parameter: Treatment Value: Drought vs. No Drought
  misc_feature: MA Experiment ID: 20000480 Result: Up-regulated in Transcription
  misc_feature: MA Experiment 20000480 PARAMETER Experiment Name: Zm_Drought_P Parameter: Age (day) Value: 11
  misc_feature: MA Experiment 20000480 PARAMETER Experiment Name: Zm_Drought_P Parameter: Organism Value: Zea mays
  misc_feature: MA Experiment 20000480 PARAMETER Experiment Name: Zm_Drought_P Parameter: Plant Line Value: 35A19
  misc_feature: MA Experiment 20000480 PARAMETER Experiment Name: Zm_Drought_P Parameter: Timepoint (hr) Value: 72
  misc_feature: MA Experiment 20000480 PARAMETER Experiment Name: Zm_Drought_P Parameter: Tissue Value: Aerial
  misc_feature: MA Experiment 20000480 PARAMETER Experiment Name: Zm_Drought_P Parameter: Treatment Value: Drought vs. No Drought
  misc_feature: MA Experiment ID: 20000492 Result: Down-regulated in Transcription
  misc_feature: MA Experiment 20000492 PARAMETER Experiment Name: Zm_Hybrid_Seed_Dev_P Parameter: DAP Value: 12
  misc_feature: MA Experiment 20000492 PARAMETER Experiment Name: Zm_Hybrid_Seed_Dev_P Parameter: Organism Value: Zea mays
  misc_feature: MA Experiment 20000492 PARAMETER Experiment Name: Zm_Hybrid_Seed_Dev_P Parameter: Plant Line Value: 35A19
  misc_feature: MA Experiment 20000492 PARAMETER Experiment Name: Zm_Hybrid_Seed_Dev_P Parameter: Tissue Value: Fert Kernel vs. Unfert Floret
  misc_feature: MA Experiment ID: 20000532 Result: Up-regulated in Transcription
  misc_feature: MA Experiment 20000532 PARAMETER Experiment Name: Zm_0.001percent_MeJA_P Parameter: Age (day) Value: 10
  misc_feature: MA Experiment 20000532 PARAMETER Experiment Name: Zm_0.001percent_MeJA_P Parameter: Organism Value: Zea mays
  misc_feature: MA Experiment 20000532 PARAMETER Experiment Name: Zm_0.001percent_MeJA_P Parameter: Plant Line Value: 35A19
  misc_feature: MA Experiment 20000532 PARAMETER Experiment Name: Zm_0.001percent_MeJA_P Parameter: Timepoint (hr) Value: 48
  misc_feature: MA Experiment 20000532 PARAMETER Experiment Name: Zm_0.001percent_MeJA_P Parameter: Tissue Value: Aerial
  misc_feature: MA Experiment 20000532 PARAMETER Experiment Name: Zm_0.001percent_MeJA_P Parameter: Treatment Value: 0.001percent MeJA vs. No Treatment
  misc_feature: MA Experiment ID: 20000533 Result: Up-regulated in Transcription
  misc_feature: MA Experiment 20000533 PARAMETER Experiment Name: Zm_0.001percent_MeJA_P Parameter: Age (day) Value: 11
  misc_feature: MA Experiment 20000533 PARAMETER Experiment Name: Zm_0.001percent_MeJA_P Parameter: Organism Value: Zea mays
  misc_feature: MA Experiment 20000533 PARAMETER Experiment Name: Zm_0.001percent_MeJA_P Parameter: Plant Line Value: 35A19
  misc_feature: MA Experiment 20000533 PARAMETER Experiment Name: Zm_0.001percent_MeJA_P Parameter: Timepoint (hr) Value: 72
  misc_feature: MA Experiment 20000533 PARAMETER Experiment Name: Zm_0.001percent_MeJA_P Parameter: Tissue Value: Aerial
  misc_feature: MA Experiment 20000533 PARAMETER Experiment Name: Zm_0.001percent_MeJA_P Parameter: Treatment Value: 0.001percent MeJA vs. No Treatment
  misc_feature: MA Experiment ID: 20000535 Result: Down-regulated in Transcription
  misc_feature: MA Experiment 20000535 PARAMETER Experiment Name: Zm_Hybrid_Seed_Dev_P Parameter: DAP Value: 30 vs. 12
  misc_feature: MA Experiment 20000535 PARAMETER Experiment Name: Zm_Hybrid_Seed_Dev_P Parameter: Organism Value: Zea mays
  misc_feature: MA Experiment 20000535 PARAMETER Experiment Name: Zm_Hybrid_Seed_Dev_P Parameter: Plant Line Value: 35A19
  misc_feature: MA Experiment 20000535 PARAMETER Experiment Name: Zm_Hybrid_Seed_Dev_P Parameter: Tissue Value: Embryo vs. Unfert Floret
  misc_feature: MA Experiment ID: 20000626 Result: Up-regulated in Transcription
  misc_feature: MA Experiment 20000626 PARAMETER Experiment Name: Zm_Herbicide-Treatments_P Parameter: Timepoint (hr) Value: 12
  misc_feature: MA Experiment 20000626 PARAMETER Experiment Name: Zm_Herbicide-Treatments_P Parameter: Tissue Value: Aerial
  misc_feature: MA Experiment 20000626 PARAMETER Experiment Name: Zm_Herbicide-Treatments_P Parameter: Treatment Value: Roundup vs. No Treatment
aggaaggtaggaggagaaccgtcagcagagagacatggcgccccaccaccagcagcgggcgctgctcctgttcccactcgtcttcctcctcctcctccttgccccgcccctcgccggcgcgtggggaaaggagggccacatcatggtctgcaagatcgccgagaagtacctgtcggagaaggcggcggcggcggtgcaggcgctgctgccggagtcggcgggcggggagctgtcgacggtgtgcccgtgggcgtaccaggtgcgctggcactaccactgggccagcccgctccactacgccaacaccccccaagtctgcaacttcaagtattctcgggactgccacaattctcggggccagcaagggatgtgcgtcgtcggggctatcaacaactacacggaccagctctacagctacggccagaagacttcgtataacctgacggaaagcctgatgttcctggcacacttcgtcggcgacgtccaccagccgctgcacgtaggcttcgaagatgacgagggcggtaacaccatcaccgtccactggtaccggaggaaagcaaacctccatcacgtgtgggatgtcagcattattgatacggcaatcaaggacttctacaacaagagcatggataccatggtagaggctctcaagatgaatcttacagatggatggtctgacgacatcgtccactgggaaaattgcaagaacaaacacgcgacctgcgcgaacgactatgcgattgagagcatccattattcctgcaactacgcctacaaagatgtggagcaagacatcactctaggagatgattattttttcagtaggtacccgattgtggagaagaggttagcgcaggctggaatcagattggcgttggtacttaatcggatatttggtggaggtgaagcggatgatataccactaaaagtacagtaacagctgtaataaaaggaagcatagctattacaaggatttgtccattacgtcgtctatacatcaataaattggcatgaatttgtaactccattgctatacatcaataaattggcatgaatttgt

SEQ ID NO: 17765 - protein, 301 aa, Zea mays subsp. mays
  peptide (1)..(301): Ceres Seq. ID no. 12417561
  misc_feature (10)..(290): Homolog of NCBI NO: 7489371 NR Description: endonuclease (EC 3.1.30.-) precursor - barley
  misc_feature (7)..(289): Homolog of NCBI NO: 21554516 NR Description: putative bifunctional nuclease [Arabidopsis
  misc_feature (16)..(288): Homolog of NCBI NO: 4099835 NR Description: bifunctional nuclease [Zinnia elegans]
  misc_feature (10)..(290): Homolog of NCBI NO: 5672692 NR Description: nuclease I [Hordeum vulgare]
  misc_feature (7)..(289): Homolog of NCBI NO: 15221343 NR Description: putative bifunctional nuclease
  misc_feature (10)..(290): Homolog of NCBI NO: 13274190 NR Description: putative nuclease [Hordeum vulgare subsp. vulgare]
  misc_feature (19)..(288): Homolog of NCBI NO: 22328857 NR Description: expressed protein; protein id: At4g21585.1
  misc_feature (11)..(292): Homolog of NCBI NO: 38345900 NR Description: OSJNBa0060D06.10 [Oryza sativa (japonica
  misc_feature (2)..(301): Homolog of NCBI NO: 34895514 NR Description: putative bifunctional nuclease
  misc_feature (2)..(301): Homolog of NCBI NO: 9558456 NR Description: unnamed protein product [Oryza sativa (japonica
MAPHHQQRALLLFPLVFLLLLLAPPLAGAWGKEGHIMVCKIAEKYLSEKAAAAVQALLPESAGGELSTVCPWAYQVRWHYHWASPLHYANTPQVCNFKYSRDCHNSRGQQGMCVVGAINNYTDQLYSYGQKTSYNLTESLMFLAHFVGDVHQPLHVGFEDDEGGNTITVHWYRRKANLHHVWDVSIIDTAIKDFYNKSMDTMVEALKMNLTDGWSDDIVHWENCKNKHATCANDYAIESIHYSCNYAYKDVEQDITLGDDYFFSRYPIVEKRLAQAGIRLALVLNRIFGGGEADDIPLKVQ

SEQ ID NO: 17766 - protein, 265 aa, Zea mays subsp. mays
  peptide (1)..(265): Ceres Seq. ID no. 12417562
  misc_feature (1)..(254): Homolog of NCBI NO: 7489371 NR Description: endonuclease (EC 3.1.30.-) precursor - barley
  misc_feature (1)..(253): Homolog of NCBI NO: 21554516 NR Description: putative bifunctional nuclease [Arabidopsis
  misc_feature (1)..(252): Homolog of NCBI NO: 4099835 NR Description: bifunctional nuclease [Zinnia elegans]
  misc_feature (1)..(254): Homolog of NCBI NO: 5672692 NR Description: nuclease I [Hordeum vulgare]
  misc_feature (1)..(253): Homolog of NCBI NO: 15221343 NR Description: putative bifunctional nuclease
  misc_feature (1)..(254): Homolog of NCBI NO: 13274190 NR Description: putative nuclease [Hordeum vulgare subsp. vulgare]
  misc_feature (1)..(252): Homolog of NCBI NO: 22328857 NR Description: expressed protein; protein id: At4g21585.1
  misc_feature (1)..(256): Homolog of NCBI NO: 38345900 NR Description: OSJNBa0060D06.10 [Oryza sativa (japonica
  misc_feature (1)..(265): Homolog of NCBI NO: 34895514 NR Description: putative bifunctional nuclease
  misc_feature (1)..(265): Homolog of NCBI NO: 9558456 NR Description: unnamed protein product [Oryza sativa (japonica
MVCKIAEKYLSEKAAAAVQALLPESAGGELSTVCPWAYQVRWHYHWASPLHYANTPQVCNFKYSRDCHNSRGQQGMCVVGAINNYTDQLYSYGQKTSYNLTESLMFLAHFVGDVHQPLHVGFEDDEGGNTITVHWYRRKANLHHVWDVSIIDTAIKDFYNKSMDTMVEALKMNLTDGWSDDIVHWENCKNKHATCANDYAIESIHYSCNYAYKDVEQDITLGDDYFFSRYPIVEKRLAQAGIRLALVLNRIFGGGEADDIPLKVQ

SEQ ID NO: 17767 - protein, 190 aa, Zea mays subsp. mays
  peptide (1)..(190): Ceres Seq. ID no. 12417563
  misc_feature (1)..(179): Homolog of NCBI NO: 7489371 NR Description: endonuclease (EC 3.1.30.-) precursor - barley
  misc_feature (1)..(178): Homolog of NCBI NO: 21554516 NR Description: putative bifunctional nuclease [Arabidopsis
  misc_feature (1)..(177): Homolog of NCBI NO: 4099835 NR Description: bifunctional nuclease [Zinnia elegans]
  misc_feature (1)..(179): Homolog of NCBI NO: 5672692 NR Description: nuclease I [Hordeum vulgare]
  misc_feature (1)..(178): Homolog of NCBI NO: 15221343 NR Description: putative bifunctional nuclease
  misc_feature (1)..(179): Homolog of NCBI NO: 13274190 NR Description: putative nuclease [Hordeum vulgare subsp. vulgare]
  misc_feature (1)..(177): Homolog of NCBI NO: 22328857 NR Description: expressed protein; protein id: At4g21585.1
  misc_feature (1)..(181): Homolog of NCBI NO: 38345900 NR Description: OSJNBa0060D06.10 [Oryza sativa (japonica
  misc_feature (1)..(190): Homolog of NCBI NO: 34895514 NR Description: putative bifunctional nuclease
  misc_feature (1)..(190): Homolog of NCBI NO: 9558456 NR Description: unnamed protein product [Oryza sativa (japonica
MCVVGAINNYTDQLYSYGQKTSYNLTESLMFLAHFVGDVHQPLHVGFEDDEGGNTITVHWYRRKANLHHVWDVSIIDTAIKDFYNKSMDTMVEALKMNLTDGWSDDIVHWENCKNKHATCANDYAIESIHYSCNYAYKDVEQDITLGDDYFFSRYPIVEKRLAQAGIRLALVLNRIFGGGEADDIPLKVQ

SEQ ID NO: 17768 - DNA, 2214 bp, Zea mays subsp. mays
  misc_feature (1)..(2214): Ceres Seq. ID no. 13494953
  misc_feature: MA Experiment ID: 108527 Result: Up-regulated in Transcription
  misc_feature: MA Experiment 108527 PARAMETER Experiment Name: Zm_5mM_NO_P Parameter: Age (day) Value: 8
  misc_feature: MA Experiment 108527 PARAMETER Experiment Name: Zm_5mM_NO_P Parameter: Organism Value: Zea mays
  misc_feature: MA Experiment 108527 PARAMETER Experiment Name: Zm_5mM_NO_P Parameter: Plant Line Value: 35A19
  misc_feature: MA Experiment 108527 PARAMETER Experiment Name: Zm_5mM_NO_P Parameter: Timepoint (hr) Value: 6
  misc_feature: MA Experiment 108527 PARAMETER Experiment Name: Zm_5mM_NO_P Parameter: Tissue Value: Aerial
  misc_feature: MA Experiment 108527 PARAMETER Experiment Name: Zm_5mM_NO_P Parameter: Treatment Value: 5mM NO vs. No Treatment
  misc_feature: MA Experiment ID: 108528 Result: Up-regulated in Transcription
  misc_feature: MA Experiment 108528 PARAMETER Experiment Name: Zm_Imbibed_Seeds_P Parameter: Age (day) Value: 5 vs. 2
  misc_feature: MA Experiment 108528 PARAMETER Experiment Name: Zm_Imbibed_Seeds_P Parameter: Organism Value: Zea mays
  misc_feature: MA Experiment 108528 PARAMETER Experiment Name: Zm_Imbibed_Seeds_P Parameter: Plant Line Value: 35A19
  misc_feature: MA Experiment 108528 PARAMETER Experiment Name: Zm_Imbibed_Seeds_P Parameter: Tissue Value: Aerial vs. Embryo
  misc_feature: MA Experiment ID: 108529 Result: Up-regulated in Transcription
  misc_feature: MA Experiment 108529 PARAMETER Experiment Name: Zm_Imbibed_Seeds_P Parameter: Age (day) Value: 5 vs. 2
  misc_feature: MA Experiment 108529 PARAMETER Experiment Name: Zm_Imbibed_Seeds_P Parameter: Organism Value: Zea mays
  misc_feature: MA Experiment 108529 PARAMETER Experiment Name: Zm_Imbibed_Seeds_P Parameter: Plant Line Value: 35A19
  misc_feature: MA Experiment 108529 PARAMETER Experiment Name: Zm_Imbibed_Seeds_P Parameter: Tissue Value: Roots vs. Embryo
  misc_feature: MA Experiment ID: 108533 Result: Down-regulated in Transcription
  misc_feature: MA Experiment 108533 PARAMETER Experiment Name: Zm_4deg_Cold_P Parameter: Age (hr) Value: 8
  misc_feature: MA Experiment 108533 PARAMETER Experiment Name: Zm_4deg_Cold_P Parameter: Organism Value: Zea mays
  misc_feature: MA Experiment 108533 PARAMETER Experiment Name: Zm_4deg_Cold_P Parameter: Plant Line Value: 35A19
  misc_feature: MA Experiment 108533 PARAMETER Experiment Name: Zm_4deg_Cold_P Parameter: Temperature (deg C) Value: 4 vs. 22
  misc_feature: MA Experiment 108533 PARAMETER Experiment Name: Zm_4deg_Cold_P Parameter: Timepoint (hr) Value: 1
  misc_feature: MA Experiment 108533 PARAMETER Experiment Name: Zm_4deg_Cold_P Parameter: Tissue Value: Aerial
  misc_feature: MA Experiment ID: 108534 Result: Down-regulated in Transcription
  misc_feature: MA Experiment 108534 PARAMETER Experiment Name: Zm_4deg_Cold_P Parameter: Age (hr) Value: 8
  misc_feature: MA Experiment 108534 PARAMETER Experiment Name: Zm_4deg_Cold_P Parameter: Organism Value: Zea mays
  misc_feature: MA Experiment 108534 PARAMETER Experiment Name: Zm_4deg_Cold_P Parameter: Plant Line Value: 35A19
  misc_feature: MA Experiment 108534 PARAMETER Experiment Name: Zm_4deg_Cold_P Parameter: Temperature (deg C) Value: 4 vs. 22
  misc_feature: MA Experiment 108534 PARAMETER Experiment Name: Zm_4deg_Cold_P Parameter: Timepoint (hr) Value: 6
  misc_feature: MA Experiment 108534 PARAMETER Experiment Name: Zm_4deg_Cold_P Parameter: Tissue Value: Aerial
  misc_feature: MA Experiment ID: 108535 Result: Down-regulated in Transcription
  misc_feature: MA Experiment 108535 PARAMETER Experiment Name: Zm_Meristem_P Parameter: Age (day) Value: 8
  misc_feature: MA Experiment 108535 PARAMETER Experiment Name: Zm_Meristem_P Parameter: Organism Value: Zea mays
  misc_feature: MA Experiment 108535 PARAMETER Experiment Name: Zm_Meristem_P Parameter: Plant Line Value: 35A19
  misc_feature: MA Experiment 108535 PARAMETER Experiment Name: Zm_Meristem_P Parameter: Tissue Value: Root Meristem vs. Above Root Meristem
  misc_feature: MA Experiment ID: 108546 Result: Up-regulated in Transcription
  misc_feature: MA Experiment 108546 PARAMETER Experiment Name: Zm_Imbibed_Seeds_P Parameter: Age (day) Value: 3 vs. 2
  misc_feature: MA Experiment 108546 PARAMETER Experiment Name: Zm_Imbibed_Seeds_P Parameter: Organism Value: Zea mays
  misc_feature: MA Experiment 108546 PARAMETER Experiment Name: Zm_Imbibed_Seeds_P Parameter: Plant Line Value: 35A19
  misc_feature: MA Experiment 108546 PARAMETER Experiment Name: Zm_Imbibed_Seeds_P Parameter: Tissue Value: Roots vs. Embryo
  misc_feature: MA Experiment ID: 108547 Result: Up-regulated in Transcription
  misc_feature: MA Experiment 108547 PARAMETER Experiment Name: Zm_Imbibed_Seeds_P Parameter: Age (day) Value: 4 vs. 2
  misc_feature: MA Experiment 108547 PARAMETER Experiment Name: Zm_Imbibed_Seeds_P Parameter: Organism Value: Zea mays
  misc_feature: MA Experiment 108547 PARAMETER Experiment Name: Zm_Imbibed_Seeds_P Parameter: Plant Line Value: 35A19
  misc_feature: MA Experiment 108547 PARAMETER Experiment Name: Zm_Imbibed_Seeds_P Parameter: Tissue Value: Aerial vs. Embryo
  misc_feature: MA Experiment ID: 108556 Result: Up-regulated in Transcription
  misc_feature: MA Experiment 108556 PARAMETER Experiment Name: Zm_Drought_P Parameter: Age (day) Value: 9
  misc_feature: MA Experiment 108556 PARAMETER Experiment Name: Zm_Drought_P Parameter: Organism Value: Zea mays
  misc_feature: MA Experiment 108556 PARAMETER Experiment Name: Zm_Drought_P Parameter: Plant Line Value: 35A19
  misc_feature: MA Experiment 108556 PARAMETER Experiment Name: Zm_Drought_P Parameter: Timepoint (hr) Value: 24
  misc_feature: MA Experiment 108556 PARAMETER Experiment Name: Zm_Drought_P Parameter: Tissue Value: Aerial
  misc_feature: MA Experiment 108556 PARAMETER Experiment Name: Zm_Drought_P Parameter: Treatment Value: Drought vs. No Drought
  misc_feature: MA Experiment ID: 108687 Result: Down-regulated in Transcription
  misc_feature: MA Experiment 108687 PARAMETER Experiment Name: Zm_Embryos-Flowers__P Parameter: Tissue Value: Embryo vs. Aerial+
  misc_feature: MA Experiment ID: 20000478 Result: Up-regulated in Transcription
  misc_feature: MA Experiment 20000478 PARAMETER Experiment Name: Zm_5mM_SA_P Parameter: Age (day) Value: 11
  misc_feature: MA Experiment 20000478 PARAMETER Experiment Name: Zm_5mM_SA_P Parameter: Organism Value: Zea mays
  misc_feature: MA Experiment 20000478 PARAMETER Experiment Name: Zm_5mM_SA_P Parameter: Plant Line Value: 35A19
  misc_feature: MA Experiment 20000478 PARAMETER Experiment Name: Zm_5mM_SA_P Parameter: Timepoint (hr) Value: 72
  misc_feature: MA Experiment 20000478 PARAMETER Experiment Name: Zm_5mM_SA_P Parameter: Tissue Value: Aerial
  misc_feature: MA Experiment 20000478 PARAMETER Experiment Name: Zm_5mM_SA_P Parameter: Treatment Value: 5mM SA vs. No Treatment
  misc_feature: MA Experiment ID: 20000479 Result: Up-regulated in Transcription
  misc_feature: MA Experiment 20000479 PARAMETER Experiment Name: Zm_Drought_P Parameter: Age (day) Value: 10
  misc_feature: MA Experiment 20000479 PARAMETER Experiment Name: Zm_Drought_P Parameter: Organism Value: Zea mays
  misc_feature: MA Experiment 20000479 PARAMETER Experiment Name: Zm_Drought_P Parameter: Plant Line Value: 35A19
  misc_feature: MA Experiment 20000479 PARAMETER Experiment Name: Zm_Drought_P Parameter: Timepoint (hr) Value: 48
  misc_feature: MA Experiment 20000479 PARAMETER Experiment Name: Zm_Drought_P Parameter: Tissue Value: Aerial
  misc_feature: MA Experiment 20000479 PARAMETER Experiment Name: Zm_Drought_P Parameter: Treatment Value: Drought vs. No Drought
  misc_feature: MA Experiment ID: 20000535 Result: Down-regulated in Transcription
  misc_feature: MA Experiment 20000535 PARAMETER Experiment Name: Zm_Hybrid_Seed_Dev_P Parameter: DAP Value: 30 vs. 12
  misc_feature: MA Experiment 20000535 PARAMETER Experiment Name: Zm_Hybrid_Seed_Dev_P Parameter: Organism Value: Zea mays
  misc_feature: MA Experiment 20000535 PARAMETER Experiment Name: Zm_Hybrid_Seed_Dev_P Parameter: Plant Line Value: 35A19
  misc_feature: MA Experiment 20000535 PARAMETER Experiment Name: Zm_Hybrid_Seed_Dev_P Parameter: Tissue Value: Embryo vs. Unfert Floret
  misc_feature: MA Experiment ID: 20001612 Result: Up-regulated in Transcription
  misc_feature: MA Experiment 20001612 PARAMETER Experiment Name: Zm_50ppm_KNO3_L-to-H_P Parameter: Age (day) Value: 19
  misc_feature: MA Experiment 20001612 PARAMETER Experiment Name: Zm_50ppm_KNO3_L-to-H_P Parameter: Organism Value: Zea mays
  misc_feature: MA Experiment 20001612 PARAMETER Experiment Name: Zm_50ppm_KNO3_L-to-H_P Parameter: Plant Line Value: 35A19
  misc_feature: MA Experiment 20001612 PARAMETER Experiment Name: Zm_50ppm_KNO3_L-to-H_P Parameter: Timepoint (hr) Value: 8
  misc_feature: MA Experiment 20001612 PARAMETER Experiment Name: Zm_50ppm_KNO3_L-to-H_P Parameter: Tissue Value: Roots
  misc_feature: MA Experiment 20001612 PARAMETER Experiment Name: Zm_50ppm_KNO3_L-to-H_P Parameter: Treatment Value: 50ppm KNO3 vs. 50ppm KCl
agaccattacctagaagatcctaatcgaaaaaaacgatccatcctcaccaccattcgactccacagctggaggctgaagctccgcagtcacagcattcaaatcaatctctctctttctctctctctctctcacaggagataagccatggcagagttgcctttggcagcggggctgatggaccttcgcaactgcaagctctctccgaagccagcgccgcccttgccactccccgcgctccgccgcatgcacacaagcgccacggctacgacggccccgtccccgcgccatgcggtccccgaactccactccactaccgagctggcggacgggagcatcgtcttccgtttcggccatcctaagtccaaggcgctggagccggagccggcgagcgtaaagaccagcccttactccagagttgcccctgcctcgggcgctgtgcccggcagccagatggagccggagattgactctgaacatggattagacggcgtgcgaataggcaccacggctggggttgagaagccgagcccgaatgccgcagccgaggcctggccgacacctccacctcctgacgccggcgcggtaaccggtgccacttccgctgcgctagaggaggcgccggagcaggaggcgggttccaatgctgccgttgaggaggtggacaccaggccatcatccgcagagtctcttgtcccgtcgagatcagaggatgggccaaagggcgacggcgtcgctgttgaggctggcatgccgaccagtggtgctgccatggatacgattgagactgctttggaggggcgcggggcaagcgaggatgactcagcagttgatgtgagtggtggcttggatgaggcggcgacttccggtttggaggactccgaagccgcatcggaaggctccactgcacaggatttctacaccgacgttgaaacggagtccagcggctccagcagcgacgagcagagagctgagttcggcttttccttaccaccaccggaacaagttagcaacaaggcggattggaaaaatgacacttcagaggtgaagagttctgataggatgattccaatagctcaacggacacgtgtgttatcgtcaggtgctgcaatattgcctcatccgtcaaaggtagcaacaggtggagaagatgcatatttcattgcagccaatggctggtttggtgtagcagatggagttggccagtggtcatttgaaggaatcaacgcagggctttatgcaagagaactaatggatggctgcaaaaagttcgttaccgagaatcaaggggatccagatcttagaccagagcagatcctttccaaagcagtagatgaagcatgttcacctggttcttgcactgtattagttgctcattttgatggccaggcccttcaagcatcaaatattggggactctgggtttatagtgataagaaatggagaagtgttcaaaaagtctaaacctacgctttatggtttcaatttcccactacaaattcagaagggagatgacccctcaaagtttgtacagaattatgctattgatctagaggacggcgatgcaattgtgacagcaaccgatggcctttttgataatgtatacgagcatgaaatagctggaattgtctccaaatcgttacaggcagatctagaaccagcggagattgcggaacacttggctgtgaaggcccaggaagtagggaggtctggggctgggagaagcccattttcagatgctgctctctcggctgggtaccttggctacagtgggggcaaactggatgacatagccgtcgttgtatcaattgtccggactgaaattcaagaggataggctaagatgactatgcagaaaagaagctcatgttttgtggaagctcaacaccaagcgaccacgcgggttgccctatcagtattctgtactgctagaactgcagctatgtggcgatttctggaaagttaagggcgtatgcatcagcatcatacaccgtgctcgatcatcaataggcgggccaataaccattggacatcagcattgtagcgaagccccttcctgttgcccttgccagtgcaccggcgccacattttgatttttggtttcgctataaaaatataaggcatttagatgttgcccttgccattaaaccaatgtcatgtactccttctgtcataaattaaaattcgttttggtttctaatggattcatataatactt

SEQ ID NO: 17769 - protein, 565 aa, Zea mays subsp. mays
  peptide (1)..(565): Ceres Seq. ID no. 13494954
  misc_feature (328)..(524): Pfam Name: Protein phosphatase 2C Pfam Description: Protein phosphatase 2C
  misc_feature (137)..(344): Homolog of NCBI NO: 37533570 NR Description: putative protein phosphatase 2C
  misc_feature (316)..(555): Homolog of NCBI NO: 18402284 NR Description: expressed protein [Arabidopsis thaliana]
  misc_feature (302)..(563): Homolog of NCBI NO: 30683717 NR Description: expressed protein [Arabidopsis thaliana]
  misc_feature (316)..(555): Homolog of NCBI NO: 15240071 NR Description: expressed protein [Arabidopsis thaliana]
  misc_feature (162)..(556): Homolog of NCBI NO: 18418226 NR Description: protein phosphatase 2C (PP2C) -related
  misc_feature (1)..(184): Homolog of NCBI NO: 37533570 NR Description: putative protein phosphatase 2C
  misc_feature (148)..(556): Homolog of NCBI NO: 7485658 NR Description: hypothetical protein F17M5.260 - Arabidopsis
  misc_feature (271)..(563): Homolog of NCBI NO: 25366932 NR Description: hypothetical protein dl4315c [imported] -
  misc_feature (305)..(562): Homolog of NCBI NO: 34896100 NR Description: B1189A09.35 [Oryza sativa (japonica
  misc_feature (328)..(559): Homolog of NCBI NO: 37533570 NR Description: putative protein phosphatase 2C
MAELPLAAGLMDLRNCKLSPKPAPPLPLPALRRMHTSATATTAPSPRHAVPELHSTTELADGSIVFRFGHPKSKALEPEPASVKTSPYSRVAPASGAVPGSQMEPEIDSEHGLDGVRIGTTAGVEKPSPNAAAEAWPTPPPPDAGAVTGATSAALEEAPEQEAGSNAAVEEVDTRPSSAESLVPSRSEDGPKGDGVAVEAGMPTSGAAMDTIETALEGRGASEDDSAVDVSGGLDEAATSGLEDSEAASEGSTAQDFYTDVETESSGSSSDEQRAEFGFSLPPPEQVSNKADWKNDTSEVKSSDRMIPIAQRTRVLSSGAAILPHPSKVATGGEDAYFIAANGWFGVADGVGQWSFEGINAGLYARELMDGCKKFVTENQGDPDLRPEQILSKAVDEACSPGSCTVLVAHFDGQALQASNIGDSGFIVIRNGEVFKKSKPTLYGFNFPLQIQKGDDPSKFVQNYAIDLEDGDAIVTATDGLFDNVYEHEIAGIVSKSLQADLEPAEIAEHLAVKAQEVGRSGAGRSPFSDAALSAGYLGYSGGKLDDIAVVVSIVRTEIQEDRLR

SEQ ID NO: 17770 - protein, 555 aa, Zea mays subsp. mays
  peptide (1)..(555): Ceres Seq. ID no. 13494955
  misc_feature (318)..(514): Pfam Name: Protein phosphatase 2C Pfam Description: Protein phosphatase 2C
  misc_feature (306)..(545): Homolog of NCBI NO: 18402284 NR Description: expressed protein [Arabidopsis thaliana]
  misc_feature (295)..(552): Homolog of NCBI NO: 34896100 NR Description: B1189A09.35 [Oryza sativa (japonica
  misc_feature (292)..(553): Homolog of NCBI NO: 30683717 NR Description: expressed protein [Arabidopsis thaliana]
  misc_feature (261)..(553): Homolog of NCBI NO: 25366932 NR Description: hypothetical protein dl4315c [imported] -
  misc_feature (306)..(545): Homolog of NCBI NO: 15240071 NR Description: expressed protein [Arabidopsis thaliana]
  misc_feature (138)..(546): Homolog of NCBI NO: 7485658 NR Description: hypothetical protein F17M5.260 - Arabidopsis
  misc_feature (152)..(546): Homolog of NCBI NO: 18418226 NR Description: protein phosphatase 2C (PP2C) -related
  misc_feature (1)..(174): Homolog of NCBI NO: 37533570 NR Description: putative protein phosphatase 2C
  misc_feature (127)..(334): Homolog of NCBI NO: 37533570 NR Description: putative protein phosphatase 2C
  misc_feature (318)..(549): Homolog of NCBI NO: 37533570 NR Description: putative protein phosphatase 2C
MDLRNCKLSPKPAPPLPLPALRRMHTSATATTAPSPRHAVPELHSTTELADGSIVFRFGHPKSKALEPEPASVKTSPYSRVAPASGAVPGSQMEPEIDSEHGLDGVRIGTTAGVEKPSPNAAAEAWPTPPPPDAGAVTGATSAALEEAPEQEAGSNAAVEEVDTRPSSAESLVPSRSEDGPKGDGVAVEAGMPTSGAAMDTIETALEGRGASEDDSAVDVSGGLDEAATSGLEDSEAASEGSTAQDFYTDVETESSGSSSDEQRAEFGFSLPPPEQVSNKADWKNDTSEVKSSDRMIPIAQRTRVLSSGAAILPHPSKVATGGEDAYFIAANGWFGVADGVGQWSFEGINAGLYARELMDGCKKFVTENQGDPDLRPEQILSKAVDEACSPGSCTVLVAHFDGQALQASNIGDSGFIVIRNGEVFKKSKPTLYGFNFPLQIQKGDDPSKFVQNYAIDLEDGDAIVTATDGLFDNVYEHEIAGIVSKSLQADLEPAEIAEHLAVKAQEVGRSGAGRSPFSDAALSAGYLGYSGGKLDDIAVVVSIVRTEIQEDRLR

SEQ ID NO: 17771 - protein, 532 aa, Zea mays subsp. mays
  peptide (1)..(532): Ceres Seq. ID no. 13494956
  misc_feature (295)..(491): Pfam Name: Protein phosphatase 2C Pfam Description: Protein phosphatase 2C
  misc_feature (283)..(522): Homolog of NCBI NO: 18402284 NR Description: expressed protein [Arabidopsis thaliana]
  misc_feature (272)..(529): Homolog of NCBI NO: 34896100 NR Description: B1189A09.35 [Oryza sativa (japonica
  misc_feature (269)..(530): Homolog of NCBI NO: 30683717 NR Description: expressed protein [Arabidopsis thaliana]
  misc_feature (238)..(530): Homolog of NCBI NO: 25366932 NR Description: hypothetical protein dl4315c [imported] -
  misc_feature (283)..(522): Homolog of NCBI NO: 15240071 NR Description: expressed protein [Arabidopsis thaliana]
  misc_feature (115)..(523): Homolog of NCBI NO: 7485658 NR Description: hypothetical protein F17M5.260 - Arabidopsis
  misc_feature (129)..(523): Homolog of NCBI NO: 18418226 NR Description: protein phosphatase 2C (PP2C) -related
  misc_feature (1)..(151): Homolog of NCBI NO: 37533570 NR Description: putative protein phosphatase 2C
  misc_feature (104)..(311): Homolog of NCBI NO: 37533570 NR Description: putative protein phosphatase 2C
  misc_feature (295)..(526): Homolog of NCBI NO: 37533570 NR Description: putative protein phosphatase 2C
MHTSATATTAPSPRHAVPELHSTTELADGSIVFRFGHPKSKALEPEPASVKTSPYSRVAPASGAVPGSQMEPEIDSEHGLDGVRIGTTAGVEKPSPNAAAEAWPTPPPPDAGAVTGATSAALEEAPEQEAGSNAAVEEVDTRPSSAESLVPSRSEDGPKGDGVAVEAGMPTSGAAMDTIETALEGRGASEDDSAVDVSGGLDEAATSGLEDSEAASEGSTAQDFYTDVETESSGSSSDEQRAEFGFSLPPPEQVSNKADWKNDTSEVKSSDRMIPIAQRTRVLSSGAAILPHPSKVATGGEDAYFIAANGWFGVADGVGQWSFEGINAGLYARELMDGCKKFVTENQGDPDLRPEQILSKAVDEACSPGSCTVLVAHFDGQALQASNIGDSGFIVIRNGEVFKKSKPTLYGFNFPLQIQKGDDPSKFVQNYAIDLEDGDAIVTATDGLFDNVYEHEIAGIVSKSLQADLEPAEIAEHLAVKAQEVGRSGAGRSPFSDAALSAGYLGYSGGKLDDIAVVVSIVRTEIQEDRLR

SEQ ID NO: 17772 - DNA, 2028 bp, Zea mays subsp. mays
  misc_feature (1)..(2028): Ceres Seq. ID no. 12382545
  misc_feature: MA Experiment ID: 108527 Result: Down-regulated in Transcription
  misc_feature: MA Experiment 108527 PARAMETER Experiment Name: Zm_5mM_NO_P Parameter: Age (day) Value: 8
  misc_feature: MA Experiment 108527 PARAMETER Experiment Name: Zm_5mM_NO_P Parameter: Organism Value: Zea mays
  misc_feature: MA Experiment 108527 PARAMETER Experiment Name: Zm_5mM_NO_P Parameter: Plant Line Value: 35A19
  misc_feature: MA Experiment 108527 PARAMETER Experiment Name: Zm_5mM_NO_P Parameter: Timepoint (hr) Value: 6
  misc_feature: MA Experiment 108527 PARAMETER Experiment Name: Zm_5mM_NO_P Parameter: Tissue Value: Aerial
  misc_feature: MA Experiment 108527 PARAMETER Experiment Name: Zm_5mM_NO_P Parameter: Treatment Value: 5mM NO vs. No Treatment
  misc_feature: MA Experiment ID: 108528 Result: Up-regulated in Transcription
  misc_feature: MA Experiment 108528 PARAMETER Experiment Name: Zm_Imbibed_Seeds_P Parameter: Age (day) Value: 5 vs. 2
  misc_feature: MA Experiment 108528 PARAMETER Experiment Name: Zm_Imbibed_Seeds_P Parameter: Organism Value: Zea mays
  misc_feature: MA Experiment 108528 PARAMETER Experiment Name: Zm_Imbibed_Seeds_P Parameter: Plant Line Value: 35A19
  misc_feature: MA Experiment 108528 PARAMETER Experiment Name: Zm_Imbibed_Seeds_P Parameter: Tissue Value: Aerial vs. Embryo
  misc_feature: MA Experiment ID: 108530 Result: Up-regulated in Transcription
  misc_feature: MA Experiment 108530 PARAMETER Experiment Name: Zm_Imbibed_Seeds_P Parameter: Age (day) Value: 6 vs. 2
  misc_feature: MA Experiment 108530 PARAMETER Experiment Name: Zm_Imbibed_Seeds_P Parameter: Organism Value: Zea mays
  misc_feature: MA Experiment 108530 PARAMETER Experiment Name: Zm_Imbibed_Seeds_P Parameter: Plant Line Value: 35A19
  misc_feature: MA Experiment 108530 PARAMETER Experiment Name: Zm_Imbibed_Seeds_P Parameter: Tissue Value: Aerial vs. Embryo
  misc_feature: MA Experiment ID: 108543 Result: Up-regulated in Transcription
  misc_feature: MA Experiment ID: 108544 Result: Up-regulated in Transcription
  misc_feature: MA Experiment ID: 108545 Result: Up-regulated in Transcription
  misc_feature: MA Experiment 108545 PARAMETER Experiment Name: Zm_Imbibed_Seeds_P Parameter: Age (day) Value: 3 vs. 2
  misc_feature: MA Experiment 108545 PARAMETER Experiment Name: Zm_Imbibed_Seeds_P Parameter: Organism Value: Zea mays
  misc_feature: MA Experiment 108545 PARAMETER Experiment Name: Zm_Imbibed_Seeds_P Parameter: Plant Line Value: 35A19
  misc_feature: MA Experiment 108545 PARAMETER Experiment Name: Zm_Imbibed_Seeds_P Parameter: Tissue Value: Aerial vs. Embryo
  misc_feature: MA Experiment ID: 108547 Result: Up-regulated in Transcription
  misc_feature: MA Experiment 108547 PARAMETER Experiment Name: Zm_Imbibed_Seeds_P Parameter: Age (day) Value: 4 vs. 2
  misc_feature: MA Experiment 108547 PARAMETER Experiment Name: Zm_Imbibed_Seeds_P Parameter: Organism Value: Zea mays
  misc_feature: MA Experiment 108547 PARAMETER Experiment Name: Zm_Imbibed_Seeds_P Parameter: Plant Line Value: 35A19
  misc_feature: MA Experiment 108547 PARAMETER Experiment Name: Zm_Imbibed_Seeds_P Parameter: Tissue Value: Aerial vs. Embryo
  misc_feature: MA Experiment ID: 20000534 Result: Down-regulated in Transcription
  misc_feature: MA Experiment 20000534 PARAMETER Experiment Name: Zm_Hybrid_Pollen_P Parameter: Age (day) Value: 8
  misc_feature: MA Experiment 20000534 PARAMETER Experiment Name: Zm_Hybrid_Pollen_P Parameter: Organism Value: Zea mays
  misc_feature: MA Experiment 20000534 PARAMETER Experiment Name: Zm_Hybrid_Pollen_P Parameter: Plant Line Value: 35A19
  misc_feature: MA Experiment 20000534 PARAMETER Experiment Name: Zm_Hybrid_Pollen_P Parameter: Tissue Value: Pollen vs. Aerial
  misc_feature: MA Experiment ID: 20000626 Result: Down-regulated in Transcription
  misc_feature: MA Experiment 20000626 PARAMETER Experiment Name: Zm_Herbicide-Treatments_P Parameter: Timepoint (hr) Value: 12
  misc_feature: MA Experiment 20000626 PARAMETER Experiment Name: Zm_Herbicide-Treatments_P Parameter: Tissue Value: Aerial
  misc_feature: MA Experiment 20000626 PARAMETER Experiment Name: Zm_Herbicide-Treatments_P Parameter: Treatment Value: Roundup vs. No Treatment
aggtcgtgaaattgattgaaatacctggggcttgagcgtgatatatagagggtggtagagaccaagcgacgttgggcgagcggcgccgccagggctgcgttggtcccttcaccggtgatgagcatccaccagatacaggaatgaacaacattgtgtaggcacctcatccagacatctaaggcgaaaaatgctgcgcctgcaccaccatagtgcacctgtctctccgcacgctgcgatttgtccaccgagtaggcttgcttgttcttgcatatgtaacaagccaaacagcagaatcaccgcttcccaggggtggtcttccataaggcggcgaatcaccactgttgccagtggccagtcagtaccaggatacacacctgatgatggcgatcaatgccttgaaacaggcaacaagctctcttttgctactgtgaaggaggctttcatcagccctgaactctgtgggtgtcagaagtgagctaattcttctagctctaccagcagtcttgggtcaagctattgatccaatagcacaacttatggagactgcatacatcggtagattaggtgcactggaattggcatcggctggtattggtatatcgatttttaatattgtgtcaaagatcttcaacataccactgttgagcattgcaacctcatttgtggcagaggatatttctaggagtgctaccaagcatcctagttcaggcaaattggagctgacatctgtatcatctgccctgatcttagctgctggaattggtataatggaagcattagcattgttcctaggatcaggattgtttcttaaactaatgggcgtgtcacctgtatctccaatgcacagacctgctaaactctttctttcattgagagctctcggagcacctgcaaatgtgattatgttggcagtccaaggtatctttcggggattcaaggatacaaagactccggtgttttatataggtttgggcaatctttctgctgtagcccttcttcctctacttatatatggctttaagcttggcataactggtgctgcaatttctacagttgtgtcccagtacattattacagttcttcttatttggtctctaagtaaaagagctgttttgcttcctccgcgaatagatcaattagagtttggtggatatctaaaatctggtggaatgctgttgggaagaactctttcaattctgctaactatgaccattggtacatcaatggctgctcggcaaggcccaacagcgatggctgctcatcagatttgtttgcaagtatggcttgctgtatccttgcttgcagatgcattagctgtttctgcccaggcgctgatagcaagctcttatgcaatattggactacaaaaaagttcaaaagacagcaatgtttgcgttgcagataggagtgtttagtgggttagctttggccattggattgtatgcctcatttggcaatatatctagactgtttaccagtgacccagaggtcctaacggttgtcaaatcttgtgcactgtcagcccatcaatgccctggccttcatctttgacggtctacattatggtgtatcagattttgaatatgtggctcaagctactatcgtggtgggtgttacgtcttcactcgtcctgttatgggctccgtctgtatttggcttggctggagtttgggctggtttgactacactcatggggttgcgtatggctgcaggcatcctgaggttgctacagaaagcgggcccttggtcgtttatgcacgaggagccataagctgaggtgtatcaactaccagcctgcgcagtttggagctgctaacttacttctgggagtttacatcactgcaaagattatccgagtgtcatggactcgctgaagatgttacccctgttactcctccggctcagaacaaaatctgacttcattgaatttcttaaaatcagtctgctagatggcatggtttggtttggattggtttggtgaaggcgtgaggcccatctgaacatcggtgcggcctctattttttttggc

SEQ ID NO: 17773 - protein, 337 aa, Zea mays subsp. mays
  peptide (1)..(337): Ceres Seq. ID no. 12382546
  misc_feature (1)..(46): Homolog of NCBI NO: 19386721 NR Description: P0678F11.10 [Oryza sativa (japonica
  misc_feature (38)..(322): Homolog of NCBI NO: 19386721 NR Description: P0678F11.10 [Oryza sativa (japonica
  misc_feature (1)..(68): Homolog of NCBI NO: 37532300 NR Description: putative membrane protein
  misc_feature (62)..(319): Homolog of NCBI NO: 37532300 NR Description: putative membrane protein
  misc_feature (1)..(46): Homolog of NCBI NO: 25405456 NR Description: hypothetical protein F11M15.20 [imported] -
  misc_feature (37)..(322): Homolog of NCBI NO: 25405456 NR Description: hypothetical protein F11M15.20 [imported] -
  misc_feature (1)..(70): Homolog of NCBI NO: 15231918 NR Description: MATE efflux family protein, putative
  misc_feature (48)..(319): Homolog of NCBI NO: 15231918 NR Description: MATE efflux family protein, putative
  misc_feature (1)..(327): Homolog of NCBI NO: 7487160 NR Description: hypothetical protein At2g38330 [imported] -
  misc_feature (1)..(327): Homolog of NCBI NO: 30687474 NR Description: MATE efflux protein family [Arabidopsis thaliana]
METAYIGRLGALELASAGIGISIFNIVSKIFNIPLLSIATSFVAEDISRSATKHPSSGKLELTSVSSALILAAGIGIMEALALFLGSGLFLKLMGVSPVSPMHRPAKLFLSLRALGAPANVIMLAVQGIFRGFKDTKTPVFYIGLGNLSAVALLPLLIYGFKLGITGAAISTVVSQYIITVLLIWSLSKRAVLLPPRIDQLEFGGYLKSGGMLLGRTLSILLTMTIGTSMAARQGPTAMAAHQICLQVWLAVSLLADALAVSAQALIASSYAILDYKKVQKTAMFALQIGVFSGLALAIGLYASFGNISRLFTSDPEVLTVVKSCALSAHQCPGLHL

SEQ ID NO: 17774 - protein, 260 aa, Zea mays subsp. mays
  peptide (1)..(260): Ceres Seq. ID no. 12382547
  misc_feature (1)..(180): Homolog of NCBI NO: 18403476 NR Description: expressed protein
  misc_feature (1)..(242): Homolog of NCBI NO: 20270057 NR Description: Putative membrane protein [Oryza sativa (japonica
  misc_feature (1)..(36): Homolog of NCBI NO: 15233839 NR Description: putative protein; protein id: At4g38380.1
  misc_feature (62)..(204): Homolog of NCBI NO: 15233839 NR Description: putative protein; protein id: At4g38380.1
  misc_feature (1)..(245): Homolog of NCBI NO: 19386721 NR Description: P0678F11.10 [Oryza sativa (japonica
  misc_feature (1)..(242): Homolog of NCBI NO: 37532300 NR Description: putative membrane protein
  misc_feature (1)..(245): Homolog of NCBI NO: 25405456 NR Description: hypothetical protein F11M15.20 [imported] -
  misc_feature (1)..(242): Homolog of NCBI NO: 15231918 NR Description: MATE efflux family protein, putative
  misc_feature (1)..(250): Homolog of NCBI NO: 7487160 NR Description: hypothetical protein At2g38330 [imported] -
  misc_feature (1)..(250): Homolog of NCBI NO: 30687474 NR Description: MATE efflux protein family [Arabidopsis thaliana]
MEALALFLGSGLFLKLMGVSPVSPMHRPAKLFLSLRALGAPANVIMLAVQGIFRGFKDTKTPVFYIGLGNLSAVALLPLLIYGFKLGITGAAISTVVSQYIITVLLIWSLSKRAVLLPPRIDQLEFGGYLKSGGMLLGRTLSILLTMTIGTSMAARQGPTAMAAHQICLQVWLAVSLLADALAVSAQALIASSYAILDYKKVQKTAMFALQIGVFSGLALAIGLYASFGNISRLFTSDPEVLTVVKSCALSAHQCPGLHL

SEQ ID NO: 17775 - protein, 244 aa, Zea mays subsp. mays
  peptide (1)..(244): Ceres Seq. ID no. 12382548
  misc_feature (1)..(164): Homolog of NCBI NO: 18403476 NR Description: expressed protein
  misc_feature (1)..(226): Homolog of NCBI NO: 20270057 NR Description: Putative membrane protein [Oryza sativa (japonica
  misc_feature (1)..(20): Homolog of NCBI NO: 15233839 NR Description: putative protein; protein id: At4g38380.1
  misc_feature (46)..(188): Homolog of NCBI NO: 15233839 NR Description: putative protein; protein id: At4g38380.1
  misc_feature (1)..(229): Homolog of NCBI NO: 19386721 NR Description: P0678F11.10 [Oryza sativa (japonica
  misc_feature (1)..(226): Homolog of NCBI NO: 37532300 NR Description: putative membrane protein
  misc_feature (1)..(229): Homolog of NCBI NO: 25405456 NR Description: hypothetical protein F11M15.20 [imported] -
  misc_feature (1)..(226): Homolog of NCBI NO: 15231918 NR Description: MATE efflux family protein, putative
  misc_feature (1)..(234): Homolog of NCBI NO: 7487160 NR Description: hypothetical protein At2g38330 [imported] -
  misc_feature (1)..(234): Homolog of NCBI NO: 30687474 NR Description: MATE efflux protein family [Arabidopsis thaliana]
MGVSPVSPMHRPAKLFLSLRALGAPANVIMLAVQGIFRGFKDTKTPVFYIGLGNLSAVALLPLLIYGFKLGITGAAISTVVSQYIITVLLIWSLSKRAVLLPPRIDQLEFGGYLKSGGMLLGRTLSILLTMTIGTSMAARQGPTAMAAHQICLQVWLAVSLLADALAVSAQALIASSYAILDYKKVQKTAMFALQIGVFSGLALAIGLYASFGNISRLFTSDPEVLTVVKSCALSAHQCPGLHL

SEQ ID NO: 17776 - DNA, 2013 bp, Zea mays subsp. mays; identical to SEQ ID NO: 15420
  misc_feature (1)..(2013): Ceres Seq. ID no. 12417337
  misc_feature: MA Experiment ID: 108522 Result: Down-regulated in Transcription
  misc_feature: MA Experiment 108522 PARAMETER Experiment Name: Zm_42deg_Heat_P Parameter: Age (day) Value: 8
  misc_feature: MA Experiment 108522 PARAMETER Experiment Name: Zm_42deg_Heat_P Parameter: Organism Value: Zea mays
  misc_feature: MA Experiment 108522 PARAMETER Experiment Name: Zm_42deg_Heat_P Parameter: Plant Line Value: 35A19
  misc_feature: MA Experiment 108522 PARAMETER Experiment Name: Zm_42deg_Heat_P Parameter: Temperature (deg C) Value: 42 vs. 22
  misc_feature: MA Experiment 108522 PARAMETER Experiment Name: Zm_42deg_Heat_P Parameter: Timepoint (hr) Value: 1
  misc_feature: MA Experiment 108522 PARAMETER Experiment Name: Zm_42deg_Heat_P Parameter: Tissue Value: Aerial
  misc_feature: MA Experiment ID: 108534 Result: Up-regulated in Transcription
  misc_feature: MA Experiment 108534 PARAMETER Experiment Name: Zm_4deg_Cold_P Parameter: Age (hr) Value: 8
  misc_feature: MA Experiment 108534 PARAMETER Experiment Name: Zm_4deg_Cold_P Parameter: Organism Value: Zea mays
  misc_feature: MA Experiment 108534 PARAMETER Experiment Name: Zm_4deg_Cold_P Parameter: Plant Line Value: 35A19
  misc_feature: MA Experiment 108534 PARAMETER Experiment Name: Zm_4deg_Cold_P Parameter: Temperature (deg C) Value: 4 vs. 22
  misc_feature: MA Experiment 108534 PARAMETER Experiment Name: Zm_4deg_Cold_P Parameter: Timepoint (hr) Value: 6
  misc_feature: MA Experiment 108534 PARAMETER Experiment Name: Zm_4deg_Cold_P Parameter: Tissue Value: Aerial
  misc_feature: MA Experiment ID: 108536 Result: Up-regulated in Transcription
  misc_feature: MA Experiment 108536 PARAMETER Experiment Name: Zm_Meristem_P Parameter: Age (day) Value: 8
  misc_feature: MA Experiment 108536 PARAMETER Experiment Name: Zm_Meristem_P Parameter: Organism Value: Zea mays
  misc_feature: MA Experiment 108536 PARAMETER Experiment Name: Zm_Meristem_P Parameter: Plant Line Value: 35A19
  misc_feature: MA Experiment 108536 PARAMETER Experiment Name: Zm_Meristem_P Parameter: Tissue Value: Shoot Meristem vs. Above Shoot Meristem
  misc_feature: MA Experiment ID: 108543 Result: Down-regulated in Transcription
  misc_feature: MA Experiment ID: 108544 Result: Up-regulated in Transcription
  misc_feature: MA Experiment ID: 108545 Result: Down-regulated in Transcription
  misc_feature: MA Experiment 108545 PARAMETER Experiment Name: Zm_Imbibed_Seeds_P Parameter: Age (day) Value: 3 vs. 2
  misc_feature: MA Experiment 108545 PARAMETER Experiment Name: Zm_Imbibed_Seeds_P Parameter: Organism Value: Zea mays
  misc_feature: MA Experiment 108545 PARAMETER Experiment Name: Zm_Imbibed_Seeds_P Parameter: Plant Line Value: 35A19
  misc_feature: MA Experiment 108545 PARAMETER Experiment Name: Zm_Imbibed_Seeds_P Parameter: Tissue Value: Aerial vs. Embryo
  misc_feature: MA Experiment ID: 20000535 Result: Down-regulated in Transcription
  misc_feature: MA Experiment 20000535 PARAMETER Experiment Name: Zm_Hybrid_Seed_Dev_P Parameter: DAP Value: 30 vs. 12
  misc_feature: MA Experiment 20000535 PARAMETER Experiment Name: Zm_Hybrid_Seed_Dev_P Parameter: Organism Value: Zea mays
  misc_feature: MA Experiment 20000535 PARAMETER Experiment Name: Zm_Hybrid_Seed_Dev_P Parameter: Plant Line Value: 35A19
  misc_feature: MA Experiment 20000535 PARAMETER Experiment Name: Zm_Hybrid_Seed_Dev_P Parameter: Tissue Value: Embryo vs. Unfert Floret

SEQ ID NO: 17777 - protein, 536 aa, Zea mays subsp. mays; identical to SEQ ID NO: 15421
  peptide (1)..(536): Ceres Seq. ID no. 12417338
  misc_feature (116)..(272): Pfam Name: Chalcone and stilbene synthases, N-terminal domain Pfam Description: Chalcone and stilbene synthases, N-terminal
  misc_feature (1)..(324): Homolog of NCBI NO: 17979464 NR Description: At1g68530/T26J14_10 [Arabidopsis thaliana]
  misc_feature (5)..(324): Homolog of NCBI NO: 21618184 NR Description: fatty acid condensing enzyme CUT1, putative
  misc_feature (1)..(324): Homolog of NCBI NO: 15221431 NR Description: very-long-chain fatty acid condensing enzyme protein id: At1g68530.1, supported by cDNA: 36276. [Arabidopsis
  misc_feature (5)..(324): Homolog of NCBI NO: 15222592 NR Description: fatty acid condensing enzyme CUT1, putative; id: At1g25450.1, supported by cDNA: 99793. [Arabidopsis thaliana]
  misc_feature (5)..(324): Homolog of NCBI NO: 21593111 NR Description: very-long-chain fatty acid condensing enzyme CUT1
  misc_feature (5)..(324): Homolog of NCBI NO: 28393607 NR Description: putative fatty acid condensing enzyme CUT1
  misc_feature (12)..(324): Homolog of NCBI NO: 34913436 NR Description: putative fatty acid condensing enzyme CUT1 [Oryza
  misc_feature (7)..(324): Homolog of NCBI NO: 15223556 NR Description: very-long-chain fatty acid condensing enzyme putative; protein id: At1g19440.1, supported by cDNA: 158882.
  misc_feature (7)..(324): Homolog of NCBI NO: 15226724 NR Description: putative beta-ketoacyl-CoA synthase; protein id:
  misc_feature (4)..(324): Homolog of NCBI NO: 15236133 NR Description: putative ketoacyl-CoA synthase; protein id:

SEQ ID NO: 17778 - protein, 534 aa, Zea mays subsp. mays; identical to SEQ ID NO: 15422
  peptide (1)..(534): Ceres Seq. ID no. 12417339
  misc_feature (114)..(270): Pfam Name: Chalcone and stilbene synthases, N-terminal domain Pfam Description: Chalcone and stilbene synthases, N-terminal
  misc_feature (1)..(322): Homolog of NCBI NO: 17979464 NR Description: At1g68530/T26J14_10 [Arabidopsis thaliana]
  misc_feature (3)..(322): Homolog of NCBI NO: 21618184 NR Description: fatty acid condensing enzyme CUT1, putative
  misc_feature (1)..(322): Homolog of NCBI NO: 15221431 NR Description: very-long-chain fatty acid condensing enzyme protein id: At1g68530.1, supported by cDNA: 36276. [Arabidopsis
  misc_feature (3)..(322): Homolog of NCBI NO: 15222592 NR Description: fatty acid condensing enzyme CUT1, putative; id: At1g25450.1, supported by cDNA: 99793. [Arabidopsis thaliana]
  misc_feature (3)..(322): Homolog of NCBI NO: 21593111 NR Description: very-long-chain fatty acid condensing enzyme CUT1
  misc_feature (3)..(322): Homolog of NCBI NO: 28393607 NR Description: putative fatty acid condensing enzyme CUT1
  misc_feature (10)..(322): Homolog of NCBI NO: 34913436 NR Description: putative fatty acid condensing enzyme CUT1 [Oryza
  misc_feature (5)..(322): Homolog of NCBI NO: 15223556 NR Description: very-long-chain fatty acid condensing enzyme putative; protein id: At1g19440.1, supported by cDNA: 158882.
  misc_feature (5)..(322): Homolog of NCBI NO: 15226724 NR Description: putative beta-ketoacyl-CoA synthase; protein id:
  misc_feature (2)..(322): Homolog of NCBI NO: 15236133 NR Description: putative ketoacyl-CoA synthase; protein id:

SEQ ID NO: 17779 - protein, 466 aa, Zea mays subsp. mays; identical to SEQ ID NO: 15423
  peptide (1)..(466): Ceres Seq. ID no. 12417340
  misc_feature (46)..(202): Pfam Name: Chalcone and stilbene synthases, N-terminal domain Pfam Description: Chalcone and stilbene synthases, N-terminal
  misc_feature (1)..(254): Homolog of NCBI NO: 17979464 NR Description: At1g68530/T26J14_10 [Arabidopsis thaliana]
  misc_feature (1)..(254): Homolog of NCBI NO: 21618184 NR Description: fatty acid condensing enzyme CUT1, putative
  misc_feature (1)..(254): Homolog of NCBI NO: 15221431 NR Description: very-long-chain fatty acid condensing enzyme protein id: At1g68530.1, supported by cDNA: 36276. [Arabidopsis
  misc_feature (1)..(254): Homolog of NCBI NO: 15222592 NR Description: fatty acid condensing enzyme CUT1, putative; id: At1g25450.1, supported by cDNA: 99793. [Arabidopsis thaliana]
  misc_feature (1)..(254): Homolog of NCBI NO: 21593111 NR Description: very-long-chain fatty acid condensing enzyme CUT1
  misc_feature (1)..(254): Homolog of NCBI NO: 28393607 NR Description: putative fatty acid condensing enzyme CUT1
  misc_feature (1)..(254): Homolog of NCBI NO: 34913436 NR Description: putative fatty acid condensing enzyme CUT1 [Oryza
  misc_feature (1)..(254): Homolog of NCBI NO: 15223556 NR Description: very-long-chain fatty acid condensing enzyme putative; protein id: At1g19440.1, supported by cDNA: 158882.
  misc_feature (1)..(254): Homolog of NCBI NO: 15226724 NR Description: putative beta-ketoacyl-CoA synthase; protein id:
  misc_feature (1)..(254): Homolog of NCBI NO: 15236133 NR Description: putative ketoacyl-CoA synthase; protein id:

SEQ ID NO: 17780 - DNA, 2195 bp, Zea mays subsp. mays
  misc_feature (1)..(2195): Ceres Seq. ID no. 12368028
  misc_feature: MA Experiment ID: 108535 Result: Up-regulated in Transcription
  misc_feature: MA Experiment 108535 PARAMETER Experiment Name: Zm_Meristem_P Parameter: Age (day) Value: 8
  misc_feature: MA Experiment 108535 PARAMETER Experiment Name: Zm_Meristem_P Parameter: Organism Value: Zea mays
  misc_feature: MA Experiment 108535 PARAMETER Experiment Name: Zm_Meristem_P Parameter: Plant Line Value: 35A19
  misc_feature: MA Experiment 108535 PARAMETER Experiment Name: Zm_Meristem_P Parameter: Tissue Value: Root Meristem vs. Above Root Meristem
  misc_feature: MA Experiment ID: 20000108 Result: Up-regulated in Transcription
  misc_feature: MA Experiment 20000108 PARAMETER Experiment Name: Zm_Root-Tips_P Parameter: Age (day) Value: 12
  misc_feature: MA Experiment 20000108 PARAMETER Experiment Name: Zm_Root-Tips_P Parameter: Organism Value: Zea mays
  misc_feature: MA Experiment 20000108 PARAMETER Experiment Name: Zm_Root-Tips_P Parameter: Tissue Value: Root tips vs. Root mid region    35
  misc_feature: MA Experiment 20000108 PARAMETER Experiment Name: Zm_Root-Tips_P Parameter: Tissue Value: Root tips vs. Root mid region   Sequence Listing-Misc Features (4)
taatcgaaaagcacacgcacggacggccccgagggtttagagcccaacttctctcttcacatcgccgcgaagccagctccccgatgcgatctggccgagggaagatggcgactccgccgccgccaatccgccccgccgccgcgctcctcctcctcgtcctcgctggcgtcctcgcctccgccgcgagcgccgatctcgtcatctccaaggcagatcggagggttgatctgacctcgcatatcgttcgcgtcctcgcttccctcaaggctgaaaatgttggaccagaccctgtctctcaagttttactgccttttcccaatattcaagccaagaacttggcagctattagagcattcggcagtgaagggaaagtgaagggtcaaagtactgttctgccaattgaagttgttcaaccttctggagctcccccggagctgacattcttttcagcattgttgcccaaacctttggaaaaaggaaagactctgtacttggatgttctgactgtgttcacacactctcttcaaccattcccagaagaaatcactcaagccgaagcacaacttgttgtctatcaggatagtgctcactatctgtcaccttaccctgttaaggctcagacacttgctatcagattgcctggtggaagggttgaatcatacacaaggcatccaaacgcaaaacttgtggattcagaactgaaatatggaccatttcatgaccttcccccgttctcctacttacctgtgattgtgcattttgagaacaacaatccttttgcagttgcaaaggaagttataagggagattgagatatctcactggggaaatgtacagattacggaacactacaacattgctcatggtggtgccagactcaagggtgaattttccaggattgattatcaatctagaccttacgtaaggggtgtttcatcttttagacatcttattgcaaaactgcctccaagggcacactctatttattaccgagatgagattggtaatatttccacatcacatttgtggagtgattctatgaagacccaactggaaatagaaccaaggtttccattgtttggtgggtggcaaacaaccttcactgttggttatggtttaccacttgaagactttgttttctattctgatggaaagagatttctcaatatcacatttggttctccattggaggaaattctcattgaaaagcttatcgtaaaggttgttctacctgaagggtcaaaggatatcgaagtttcagctccctttccaacacagcagcagcaagaggttaagtattcacaccttgacattgtcggaagaccagttgttgtcttggagaaacctgatgttattccagagcataatttgtatttccaggtttactacagattcaacaacatatccttgctcagagagccgttgatgctgattactggtttcttcctcctgtttgtggcctgtattgtttacatgcgtactgatatgtcaatatccaagagctctccttcctacttggccaagctgcaatgggatgaggtgcaagcaactgttcagaaaatccagggtatctttgagcaatgcttagcagttcatgataaactggaggcctcattgcgggatttgtctaggacaggagacattcagtcttgcaaggcagctcgtaaagctgctgacacgcagtttaaggagctatcgaaagatctgaagccactgttggcgactctacagtcatctccccagtcttatcagatattgccaaaggtagaggacttgatcgtaaaggagagagagatgcaggagaagctcatgacaaggcattccaccgttgtcgacagctttgagaagaagctgcgcgggcaagatgtagagaacaggattgctttgcagcagcagaaaattgctgccctgaggcaggaggttgaatctcttttagagtacattagtgagatttgagcaaatgagtgctgctgtggcgtgatacatctttagcgattagactgcctttgtttggtttagggtttaccccaatattgaaatctactactctgagattgtgtcggtaaccatctagtttcccagttgagagacctggaagttgcaatgaccttgtaacatgataatcagtgtaattctggagctgactaaatttttgcatttaatatcaatatcacaggaaccgtcatcttttggacc

SEQ ID NO: 17781 - protein, 650 aa, Zea mays subsp. mays
  peptide (1)..(650): Ceres Seq. ID no. 12368029
  misc_feature (64)..(491): Pfam Name: Ribophorin I Pfam Description: Ribophorin I
  misc_feature (50)..(647): Homolog of NCBI NO: 29570391 NR Description: Hypothetical protein T22D1.4 [Caenorhabditis
  misc_feature (173)..(645): Homolog of NCBI NO: 29179446 NR Description: Similar to ribophorin I [Danio rerio]
  misc_feature (45)..(647): Homolog of NCBI NO: 40674542 NR Description: Unknown (protein for MGC:76266) [Silurana
  misc_feature (44)..(647): Homolog of NCBI NO: 9857227 NR Description: ribophorin I [Sus scrofa]
  misc_feature (45)..(624): Homolog of NCBI NO: 28175644 NR Description: Similar to ribophorin I [Xenopus laevis]
  misc_feature (44)..(647): Homolog of NCBI NO: 4506675 NR Description: ribophorin I [Homo sapiens]
  misc_feature (386)..(650): Homolog of NCBI NO: 5918187 NR Description: ribophorin I [Hordeum vulgare]
  misc_feature (47)..(497): Homolog of NCBI NO: 15226341 NR Description: putative ribophorin I; protein id: At2g01720.1
  misc_feature (48)..(650): Homolog of NCBI NO: 15223039 NR Description: putative ribophorin I
  misc_feature (39)..(512): Homolog of NCBI NO: 7489438 NR Description: ribophorin I homolog - barley (fragment)
IEKHTHGRPRGFRAQLLSSHRREASSPMRSGRGKMATPPPPIRPAAALLLLVLAGVLASAASADLVISKADRRVDLTSHIVRVLASLKAENVGPDPVSQVLLPFPNIQAKNLAAIRAFGSEGKVKGQSTVLPIEVVQPSGAPPELTFFSALLPKPLEKGKTLYLDVLTVFTHSLQPFPEEITQAEAQLVVYQDSAHYLSPYPVKAQTLAIRLPGGRVESYTRHPNAKLVDSELKYGPFHDLPPFSYLPVIVHFENNNPFAVAKEVIREIEISHWGNVQITEHYNIAHGGARLKGEFSRIDYQSRPYVRGVSSFRHLIAKLPPRAHSIYYRDEIGNISTSHLWSDSMKTQLEIEPRFPLFGGWQTTFTVGYGLPLEDFVFYSDGKRFLNITFGSPLEEILIEKLIVKVVLPEGSKDIEVSAPFPTQQQQEVKYSHLDIVGRPVVVLEKPDVIPEHNLYFQVYYRFNNISLLREPLMLITGFFLLFVACIVYMRTDMSISKSSPSYLAKLQWDEVQATVQKIQGIFEQCLAVHDKLEASLRDLSRTGDIQSCKAARKAADTQFKELSKDLKPLLATLQSSPQSYQILPKVEDLIVKEREMQEKLMTRHSTVVDSFEKKLRGQDVENRIALQQQKIAALRQEVESLLEYISEI

SEQ ID NO: 17782 - protein, 623 aa, Zea mays subsp. mays
  peptide (1)..(623): Ceres Seq. ID no. 12368030
  misc_feature (37)..(464): Pfam Name: Ribophorin I Pfam Description: Ribophorin I
  misc_feature (23)..(620): Homolog of NCBI NO: 29570391 NR Description: Hypothetical protein T22D1.4 [Caenorhabditis
  misc_feature (146)..(618): Homolog of NCBI NO: 29179446 NR Description: Similar to ribophorin I [Danio rerio]
  misc_feature (18)..(620): Homolog of NCBI NO: 40674542 NR Description: Unknown (protein for MGC:76266) [Silurana
  misc_feature (17)..(620): Homolog of NCBI NO: 9857227 NR Description: ribophorin I [Sus scrofa]
  misc_feature (18)..(597): Homolog of NCBI NO: 28175644 NR Description: Similar to ribophorin I [Xenopus laevis]
  misc_feature (17)..(620): Homolog of NCBI NO: 4506675 NR Description: ribophorin I [Homo sapiens]
  misc_feature (359)..(623): Homolog of NCBI NO: 5918187 NR Description: ribophorin I [Hordeum vulgare]
  misc_feature (20)..(470): Homolog of NCBI NO: 15226341 NR Description: putative ribophorin I; protein id: At2g01720.1
  misc_feature (21)..(623): Homolog of NCBI NO: 15223039 NR Description: putative ribophorin I
  misc_feature (12)..(485): Homolog of NCBI NO: 7489438 NR Description: ribophorin I homolog - barley (fragment)
MRSGRGKMATPPPPIRPAAALLLLVLAGVLASAASADLVISKADRRVDLTSHIVRVLASLKAENVGPDPVSQVLLPFPNIQAKNLAAIRAFGSEGKVKGQSTVLPIEVVQPSGAPPELTFFSALLPKPLEKGKTLYLDVLTVFTHSLQPFPEEITQAEAQLVVYQDSAHYLSPYPVKAQTLAIRLPGGRVESYTRHPNAKLVDSELKYGPFHDLPPFSYLPVIVHFENNNPFAVAKEVIREIEISHWGNVQITEHYNIAHGGARLKGEFSRIDYQSRPYVRGVSSFRHLIAKLPPRAHSIYYRDEIGNISTSHLWSDSMKTQLEIEPRFPLFGGWQTTFTVGYGLPLEDFVFYSDGKRFLNITFGSPLEEILIEKLIVKVVLPEGSKDIEVSAPFPTQQQQEVKYSHLDIVGRPVVVLEKPDVIPEHNLYFQVYYRFNNISLLREPLMLITGFFLLFVACIVYMRTDMSISKSSPSYLAKLQWDEVQATVQKIQGIFEQCLAVHDKLEASLRDLSRTGDIQSCKAARKAADTQFKELSKDLKPLLATLQSSPQSYQILPKVEDLIVKEREMQEKLMTRHSTVVDSFEKKLRGQDVENRIALQQQKIAALRQEVESLLEYISEI

SEQ ID NO: 17783 - protein, 616 aa, Zea mays subsp. mays
  peptide (1)..(616): Ceres Seq. ID no. 12368031
  misc_feature (30)..(457): Pfam Name: Ribophorin I Pfam Description: Ribophorin I
  misc_feature (16)..(613): Homolog of NCBI NO: 29570391 NR Description: Hypothetical protein T22D1.4 [Caenorhabditis
  misc_feature (139)..(611): Homolog of NCBI NO: 29179446 NR Description: Similar to ribophorin I [Danio rerio]
  misc_feature (11)..(613): Homolog of NCBI NO: 40674542 NR Description: Unknown (protein for MGC:76266) [Silurana
  misc_feature (10)..(613): Homolog of NCBI NO: 9857227 NR Description: ribophorin I [Sus scrofa]
  misc_feature (11)..(590): Homolog of NCBI NO: 28175644 NR Description: Similar to ribophorin I [Xenopus laevis]
  misc_feature (10)..(613): Homolog of NCBI NO: 4506675 NR Description: ribophorin I [Homo sapiens]
  misc_feature (352)..(616): Homolog of NCBI NO: 5918187 NR Description: ribophorin I [Hordeum vulgare]
  misc_feature (13)..(463): Homolog of NCBI NO: 15226341 NR Description: putative ribophorin I; protein id: At2g01720.1
  misc_feature (14)..(616): Homolog of NCBI NO: 15223039 NR Description: putative ribophorin I
  misc_feature (5)..(478): Homolog of NCBI NO: 7489438 NR Description: ribophorin I homolog - barley (fragment)
MATPPPPIRPAAALLLLVLAGVLASAASADLVISKADRRVDLTSHIVRVLASLKAENVGPDPVSQVLLPFPNIQAKNLAAIRAFGSEGKVKGQSTVLPIEVVQPSGAPPELTFFSALLPKPLEKGKTLYLDVLTVFTHSLQPFPEEITQAEAQLVVYQDSAHYLSPYPVKAQTLAIRLPGGRVESYTRHPNAKLVDSELKYGPFHDLPPFSYLPVIVHFENNNPFAVAKEVIREIEISHWGNVQITEHYNIAHGGARLKGEFSRIDYQSRPYVRGVSSFRHLIAKLPPRAHSIYYRDEIGNISTSHLWSDSMKTQLEIEPRFPLFGGWQTTFTVGYGLPLEDFVFYSDGKRFLNITFGSPLEEILIEKLIVKVVLPEGSKDIEVSAPFPTQQQQEVKYSHLDIVGRPVVVLEKPDVIPEHNLYFQVYYRFNNISLLREPLMLITGFFLLFVACIVYMRTDMSISKSSPSYLAKLQWDEVQATVQKIQGIFEQCLAVHDKLEASLRDLSRTGDIQSCKAARKAADTQFKELSKDLKPLLATLQSSPQSYQILPKVEDLIVKEREMQEKLMTRHSTVVDSFEKKLRGQDVENRIALQQQKIAALRQEVESLLEYISEI

SEQ ID NO: 17784 - DNA, 485 bp, Zea mays subsp. mays
  misc_feature (1)..(485): Ceres Seq. ID no. 4612700
  misc_feature: MA Experiment ID: 108528 Result: Down-regulated in Transcription
  misc_feature: MA Experiment 108528 PARAMETER Experiment Name: Zm_Imbibed_Seeds_P Parameter: Age (day) Value: 5 vs. 2
  misc_feature: MA Experiment 108528 PARAMETER Experiment Name: Zm_Imbibed_Seeds_P Parameter: Organism Value: Zea mays
  misc_feature: MA Experiment 108528 PARAMETER Experiment Name: Zm_Imbibed_Seeds_P Parameter: Plant Line Value: 35A19
  misc_feature: MA Experiment 108528 PARAMETER Experiment Name: Zm_Imbibed_Seeds_P Parameter: Tissue Value: Aerial vs. Embryo
agtcgcctccttcctgcgccgccgccgccgccgccgctaccaccgcctcgcggccgcctgcggctccgcgtttccgcacggagaggtgattaggtgtgactgtagtcactgtcatgcagttggtgaaggtttcttgaggctgagaacatggtgctgaagacggaactttgccgcttcagcggccagaagatttatcctgggaaaggcattagatttatccgtgctgattctcaggtcttcctttttgccaactcgaaatgcaagcgctacttccacaactgcctgaagcctgcaaagcttacctggacagcaatgtacaggaagcagcacaagaaggatatccatgctgaagcggtaaagaagaggcgccgcgccaccaagaagccatactccaggtcaattgtgggtgcttccttggaagtaatccagaagaagagagctgagaagccagaggtccgcgatgctgctagagaagctgctcttcg

SEQ ID NO: 17785 - protein, 112 aa, Zea mays subsp. mays
  peptide (1)..(112): Ceres Seq. ID no. 4612701
  misc_feature (3)..(73): Pfam Name: Ribosomal protein L24e Pfam Description: Ribosomal protein L24e
  misc_feature (1)..(111): Homolog of NCBI NO: 28174943 NR Description: Similar to ribosomal protein L24 [Mus musculus]
  misc_feature (3)..(111): Homolog of NCBI NO: 19115030 NR Description: 60S ribosomal protein L24 [Schizosaccharomyces
  misc_feature (3)..(111): Homolog of NCBI NO: 19075214 NR Description: 60s ribosomal protein L24 [Schizosaccharomyces
  misc_feature (5)..(111): Homolog of NCBI NO: 25295112 NR Description: 60S ribosomal protein L24 [imported] -
  misc_feature (1)..(111): Homolog of NCBI NO: 6094040 NR Description: 60S ribosomal protein L24
  misc_feature (1)..(111): Homolog of NCBI NO: 18404176 NR Description: 60S ribosomal protein L24
  misc_feature (1)..(111): Homolog of NCBI NO: 15231730 NR Description: 60S ribosomal protein - like
  misc_feature (1)..(111): Homolog of NCBI NO: 10180025 NR Description: 60S ribosomal protein L24 [Prunus avium]
  misc_feature (4)..(111): Homolog of NCBI NO: 34900364 NR Description: putative 60S ribosomal protein L24
  misc_feature (1)..(111): Homolog of NCBI NO: 1710521 NR Description: 60S RIBOSOMAL PROTEIN L24
MVLKTELCRFSGQKIYPGKGIRFIRADSQVFLFANSKCKRYFHNCLKPAKLTWTAMYRKQHKKDIHAEAVKKRRRATKKPYSRSIVGASLEVIQKKRAEKPEVRDAAREAAL

SEQ ID NO: 17786 - protein, 57 aa, Zea mays subsp. mays
  peptide (1)..(57): Ceres Seq. ID no. 4612702
  misc_feature (1)..(56): Homolog of NCBI NO: 28174943 NR Description: Similar to ribosomal protein L24 [Mus musculus]
  misc_feature (1)..(56): Homolog of NCBI NO: 19115030 NR Description: 60S ribosomal protein L24 [Schizosaccharomyces
  misc_feature (1)..(56): Homolog of NCBI NO: 19075214 NR Description: 60s ribosomal protein L24 [Schizosaccharomyces
  misc_feature (1)..(56): Homolog of NCBI NO: 25295112 NR Description: 60S ribosomal protein L24 [imported] -
  misc_feature (1)..(56): Homolog of NCBI NO: 6094040 NR Description: 60S ribosomal protein L24
  misc_feature (1)..(56): Homolog of NCBI NO: 18404176 NR Description: 60S ribosomal protein L24
  misc_feature (1)..(56): Homolog of NCBI NO: 15231730 NR Description: 60S ribosomal protein - like
  misc_feature (1)..(56): Homolog of NCBI NO: 10180025 NR Description: 60S ribosomal protein L24 [Prunus avium]
  misc_feature (1)..(56): Homolog of NCBI NO: 34900364 NR Description: putative 60S ribosomal protein L24
  misc_feature (1)..(56): Homolog of NCBI NO: 1710521 NR Description: 60S RIBOSOMAL PROTEIN L24
MYRKQHKKDIHAEAVKKRRRATKKPYSRSIVGASLEVIQKKRAEKPEVRDAAREAAL

SEQ ID NO: 17787 - DNA, 1295 bp, Zea mays subsp. mays
  misc_feature (1)..(1295): Ceres Seq. ID no. 12417381
  misc_feature: MA Experiment ID: 108543 Result: Up-regulated in Transcription
  misc_feature: MA Experiment ID: 108544 Result: Up-regulated in Transcription
gcacgagaccattacctagaacattaatcgaaaaaaccacctccaattacttcacagcagcgcggcgccgagaagatggcttccccctcgtacaggcttgcggcggcgatcacggccccctctaccggcgagttcctcgtcgtccggcagccgcgcccgccatccccacccgaggaggaagaggattaccggcgcttcgtcgacagcgatctctacgacctcccgtccgcgcccctcgggccactcgagggggcaccccggtcggaggtggccatcggcggcgcggactctgtcgccagccgcctcgacctctcgcgcctcgacgtgtccgccgcccttgatcagatttttcaccaatttggcttgccggttgggatgagtggggagtggaggctcctgaagtatgtggaggaagcagaatttggcccggatgctggcgttaacacggtgtacattgtcggatctcttgagttgagattggatgatctgccagagtcatgtaaatggatgtccaaggagtgtgcattgaggttgctttcggaagcgaaaccaggtaatgatcgcataggacagtatgcatatattggacttctgaattcggagctgtcatcaaactgcacagcttctcctgcattgcccttccccccgcctccactaccccactcccaggagccgcccaggtacgtcgccggcggcgatgacgacgcgcttcaagaagaaccgcaagaagcgcggccacgtgtccgccgggcacggccgcatcggcaagcaccggaagcatcccggaggtcgcggtaacgccggtggcatgcaccaccaccgcatcctcttcgacaagtaccatcccggctacttcggtaaggtcggcatgcgctacttccacaagctccgcaacaagttctactgccccgcggtcaacatcgagcgcctctggtcgatggtgcccgccgaaaaggcggcggaagccggcggcgacaaggccccgcagatcgacgtcacgcagttcggcttcttcaaggtgctcgggaagggggtgctgccgcccaagcccatcgtcgtcaaggccaagctcatctccaaggtcgccgagaagaagatcaaggccgccggcggcgccgtcgtgctcaccgcctagttttcagtccttattcgcctcttggttttgagatctatatctgaactagcagtctttcttgtctcacctatttgtgttaagaagacgtagtttttaaatccatggctccttcctgtttggacagtgctttcatatcaaatatttcaggtatattagagcg

SEQ ID NO: 17788 - protein, 240 aa, Zea mays subsp. mays
  peptide (1)..(240): Ceres Seq. ID no. 12417382
  misc_feature (7)..(191): Homolog of NCBI NO: 11761474 NR Description: unknown protein [Arabidopsis thaliana]
  misc_feature (7)..(191): Homolog of NCBI NO: 25518652 NR Description: hypothetical protein F4F7.22 - Arabidopsis
  misc_feature (7)..(191): Homolog of NCBI NO: 18395656 NR Description: expressed protein
MASPSYRLAAAITAPSTGEFLVVRQPRPPSPPEEEEDYRRFVDSDLYDLPSAPLGPLEGAPRSEVAIGGADSVASRLDLSRLDVSAALDQIFHQFGLPVGMSGEWRLLKYVEEAEFGPDAGVNTVYIVGSLELRLDDLPESCKWMSKECALRLLSEAKPGNDRIGQYAYIGLLNSELSSNCTASPALPFPPPPLPHSQEPPRYVAGGDDDALQEEPQEARPRVRRARPHRQAPEASRRSR

SEQ ID NO: 17789 - protein, 145 aa, Zea mays subsp. mays
  peptide (1)..(145): Ceres Seq. ID no. 12417383
  misc_feature (107)..(139): Pfam Name: Ribosomal protein L15 Pfam Description: Ribosomal protein L15
  misc_feature (1)..(145): Homolog of NCBI NO: 15223190 NR Description: 60S ribosomal protein L27A
  misc_feature (1)..(145): Homolog of NCBI NO: 23237917 NR Description: putative 60S ribosomal protein L27a
  misc_feature (1)..(145): Homolog of NCBI NO: 1350711 NR Description: 60S RIBOSOMAL PROTEIN L27A
  misc_feature (1)..(145): Homolog of NCBI NO: 15220698 NR Description: 60s ribosomal protein l27a.
  misc_feature (1)..(145): Homolog of NCBI NO: 7959355 NR Description: 60S ribosomal protein L27a [Panax ginseng]
  misc_feature (1)..(145): Homolog of NCBI NO: 3608481 NR Description: ribosomal protein L27a [Petunia x hybrida]
  misc_feature (1)..(145): Homolog of NCBI NO: 21553702 NR Description: 60S ribosomal protein L27A [Arabidopsis thaliana]
  misc_feature (3)..(145): Homolog of NCBI NO: 22758850 NR Description: ribosomal protein L22 [Argopecten irradians]
  misc_feature (1)..(145): Homolog of NCBI NO: 17509867 NR Description: Ribosomal protein L15 (16.2 kD) [Caenorhabditis
  misc_feature (1)..(145): Homolog of NCBI NO: 30017566 NR Description: putative ribosomal protein L27a
MTTRFKKNRKKRGHVSAGHGRIGKHRKHPGGRGNAGGMHHHRILFDKYHPGYFGKVGMRYFHKLRNKFYCPAVNIERLWSMVPAEKAAEAGGDKAPQIDVTQFGFFKVLGKGVLPPKPIVVKAKLISKVAEKKIKAAGGAVVLTA

SEQ ID NO: 17790 - protein, 140 aa, Zea mays subsp. mays
  peptide (1)..(140): Ceres Seq. ID no. 12417384
  misc_feature (1)..(91): Homolog of NCBI NO: 11761474 NR Description: unknown protein [Arabidopsis thaliana]
  misc_feature (1)..(91): Homolog of NCBI NO: 25518652 NR Description: hypothetical protein F4F7.22 - Arabidopsis
  misc_feature (1)..(91): Homolog of NCBI NO: 18395656 NR Description: expressed protein
MSGEWRLLKYVEEAEFGPDAGVNTVYIVGSLELRLDDLPESCKWMSKECALRLLSEAKPGNDRIGQYAYIGLLNSELSSNCTASPALPFPPPPLPHSQEPPRYVAGGDDDALQEEPQEARPRVRRARPHRQAPEASRRSR

SEQ ID NO: 17791 - DNA, 2397 bp, Zea mays subsp. mays
  misc_feature (1)..(2397): Ceres Seq. ID no. 12363062
  misc_feature: MA Experiment ID: 108543 Result: Down-regulated in Transcription
  misc_feature: MA Experiment ID: 20000492 Result: Down-regulated in Transcription
  misc_feature: MA Experiment 20000492 PARAMETER Experiment Name: Zm_Hybrid_Seed_Dev_P Parameter: DAP Value: 12
  misc_feature: MA Experiment 20000492 PARAMETER Experiment Name: Zm_Hybrid_Seed_Dev_P Parameter: Organism Value: Zea mays
  misc_feature: MA Experiment 20000492 PARAMETER Experiment Name: Zm_Hybrid_Seed_Dev_P Parameter: Plant Line Value: 35A19
  misc_feature: MA Experiment 20000492 PARAMETER Experiment Name: Zm_Hybrid_Seed_Dev_P Parameter: Tissue Value: Fert Kernel vs. Unfert Floret
gcacgagaccattacctagaacatcctaatcaaaaaattccatttcttcttcgtcctcgcaccagtccctcctccttggaagcgagggaggagagtggagggagagggaggagcgaggcaccggtgagctcgggaggcggcgtggggcttgcacgccggccctacccccagctcactcaccacgctcttgtctgaccaactctctctctctcttatctccttccaagattcccccatttttttgttgttgtccccccattcttgctaggatcattccttgatctttcgctcgctccagtacgcctgttttccagctccggagatcccatctcggccacctcctgcggtctccaagctccaagaggccagattccagcacaaatttgaggtcaatttgcccgctgagctcgaatcaatccgctcggcaacaagtgtcatttgttcccccgatccccgggcttcgattcgatcgaatccgacctaattttattgtgtgtgtgtgtgtttaaccttctctcgctgcacttttcctttctcctccctgtcgcaaacgcaaagtgggttccatcgcgtcacccgcacggctcctctgatcgggcggagaaagaaagcgcataaaaggcgagctcttgatgcggtcttggtcgtagcaacagcagctccactgctcccggcatcgcctgctgttgtttatccatatacggacggagcagcgggcgctccggcagaggcagtggcagcgcgctccccccgtcagcgcgtgctgatgcttgcccccctgctcgccgccttcgctgtcgtcttcctgctcctcctgtccaggccatgcgcccgtgacatgagactgttcctcgcctccctgtgccagcagctcgtgctgtccctgctcgggttcctggcaggcctccgcctgctcagcggcgtcgcggccgcctccgcggccacagagaccatgccgctcatgccctccttcaagaggaagcgggcctcggccacggtggagaatgcggaggaggcggccgccacggccggcggcggcgagacgtcggtgctcgacctgccggagctggccatcgattgcattctggagaagctgcggccggcggagctgcggagcatggccgccgtctgccgctccatgcgcgagcgctgccgcggcgaccacctctgggagcgccacatgacaaacaggtggggccgtgtcctgggccgcgccgccagggacgaatggaggacgcacctggcgtccgccagcgagtcccgcgcggcgggcggcggcggcggcggcggcaagcgccggaggtggctcgccgcgctgtcctgcgtttgcccggtggtgtcctggatgcggcccagggccgacggtggcaagtcgtccgcccccgtgctggacgattccatcatgtcgtggtacctgtccgtggagagcggcaagttctggttcccggctcaggtctacaaccgcgagcatgggcatgttgggttcatgatgtcatgctacgatgcagcgctcagttacgatttgcataccgacacattccgtgcaaggtacccaccacacggtcgacgaaccgtggtgttggaggatggcgtgcaatgggacagggtgagggcaccgcctgttgacacccttgcgcattacctgcacacctctgactgcctgcatgagctccggcccggcgaccacatcgagattcagtggagaaggaacaaagaattcccatacggctggtggtatggagttgttgggcacttggagtcatgtgatggaagcgaacacttttgtcggtgccatcttagtgataccgtggtgctggagtttaatcagtacacgccgggctcaaggtggaggcaagccgttggtgaaacggaaggagcatagggaggagggcaacgagggcgacgggttctacggcggcataaggaagctccgcggcaacgatgacatctccaagtggaggcagctgtggccaacagacgtcctggagtaagcaggaaccgcatcccttctcacaccgacattgatccatcgctcaaatgacacgcctttctttcatcatcatattgaccaaattcgtcgtctctgtcgcgctgttgtaaacgggttagtagaagaacaaatcccgtagctggacaagggtgtaacacttactctctccgtttcgttttagttgtcgctggatagtgcaaaattgaactatccagctacaactaaaaagaaacggatggagtatttgttaggcgtaccaggcgcagactgcttcctatttgttcgtggggctgtaactgtaagccttgtttgtgacccctaagcagtctgcgtcttgtgcctgctgctgtagcggtagagcagagagagatcaaatgtaaattacatttttttagctcaaattcacg

SEQ ID NO: 17792 - protein, 371 aa, Zea mays subsp. mays
  peptide (1)..(371): Ceres Seq. ID no. 12363063
  misc_feature (94)..(134): Homolog of NCBI NO: 7459607 NR Description: hypothetical protein At2g41170 [imported] -
  misc_feature (187)..(342): Homolog of NCBI NO: 7459607 NR Description: hypothetical protein At2g41170 [imported] -
  misc_feature (94)..(321): Homolog of NCBI NO: 7487431 NR Description: hypothetical protein At2g32560 [imported] -
  misc_feature (1)..(320): Homolog of NCBI NO: 34909060 NR Description: P0702B09.33 [Oryza sativa (japonica
  misc_feature (346)..(365): Homolog of NCBI NO: 15225802 NR Description: unknown protein; protein id: At2g26850.1
  misc_feature (91)..(320): Homolog of NCBI NO: 15225802 NR Description: unknown protein; protein id: At2g26850.1
  misc_feature (94)..(365): Homolog of NCBI NO: 30688559 NR Description: F-box protein family [Arabidopsis thaliana]
  misc_feature (59)..(365): Homolog of NCBI NO: 30685347 NR Description: F-box protein family [Arabidopsis thaliana]
  misc_feature (1)..(371): Homolog of NCBI NO: 34903372 NR Description: unnamed protein product [Oryza sativa (japonica
MLAPLLAAFAVVFLLLLSRPCARDMRLFLASLCQQLVLSLLGFLAGLRLLSGVAAASAATETMPLMPSFKRKRASATVENAEEAAATAGGGETSVLDLPELAIDCILEKLRPAELRSMAAVCRSMRERCRGDHLWERHMTNRWGRVLGRAARDEWRTHLASASESRAAGGGGGGGKRRRWLAALSCVCPVVSWMRPRADGGKSSAPVLDDSIMSWYLSVESGKFWFPAQVYNREHGHVGFMMSCYDAALSYDLHTDTFRARYPPHGRRTVVLEDGVQWDRVRAPPVDTLAHYLHTSDCLHELRPGDHIEIQWRRNKEFPYGWWYGVVGHLESCDGSEHFCRCHLSDTVVLEFNQYTPGSRWRQAVGETEGA

SEQ ID NO: 17793 - protein, 347 aa, Zea mays subsp. mays
  peptide (1)..(347): Ceres Seq. ID no. 12363064
  misc_feature (70)..(110): Homolog of NCBI NO: 7459607 NR Description: hypothetical protein At2g41170 [imported] -
  misc_feature (163)..(318): Homolog of NCBI NO: 7459607 NR Description: hypothetical protein At2g41170 [imported] -
  misc_feature (70)..(297): Homolog of NCBI NO: 7487431 NR Description: hypothetical protein At2g32560 [imported] -
  misc_feature (1)..(296): Homolog of NCBI NO: 34909060 NR Description: P0702B09.33 [Oryza sativa (japonica
  misc_feature (322)..(341): Homolog of NCBI NO: 15225802 NR Description: unknown protein; protein id: At2g26850.1
  misc_feature (67)..(296): Homolog of NCBI NO: 15225802 NR Description: unknown protein; protein id: At2g26850.1
  misc_feature (70)..(341): Homolog of NCBI NO: 30688559 NR Description: F-box protein family [Arabidopsis thaliana]
  misc_feature (35)..(341): Homolog of NCBI NO: 30685347 NR Description: F-box protein family [Arabidopsis thaliana]
  misc_feature (1)..(347): Homolog of NCBI NO: 34903372 NR Description: unnamed protein product [Oryza sativa (japonica
MRLFLASLCQQLVLSLLGFLAGLRLLSGVAAASAATETMPLMPSFKRKRASATVENAEEAAATAGGGETSVLDLPELAIDCILEKLRPAELRSMAAVCRSMRERCRGDHLWERHMTNRWGRVLGRAARDEWRTHLASASESRAAGGGGGGGKRRRWLAALSCVCPVVSWMRPRADGGKSSAPVLDDSIMSWYLSVESGKFWFPAQVYNREHGHVGFMMSCYDAALSYDLHTDTFRARYPPHGRRTVVLEDGVQWDRVRAPPVDTLAHYLHTSDCLHELRPGDHIEIQWRRNKEFPYGWWYGVVGHLESCDGSEHFCRCHLSDTVVLEFNQYTPGSRWRQAVGETEGA

SEQ ID NO: 17794 - protein, 309 aa, Zea mays subsp. mays
  peptide (1)..(309): Ceres Seq. ID no. 12363065
  misc_feature (32)..(72): Homolog of NCBI NO: 7459607 NR Description: hypothetical protein At2g41170 [imported] -
  misc_feature (125)..(280): Homolog of NCBI NO: 7459607 NR Description: hypothetical protein At2g41170 [imported] -
  misc_feature (32)..(259): Homolog of NCBI NO: 7487431 NR Description: hypothetical protein At2g32560 [imported] -
  misc_feature (1)..(258): Homolog of NCBI NO: 34909060 NR Description: P0702B09.33 [Oryza sativa (japonica
  misc_feature (284)..(303): Homolog of NCBI NO: 15225802 NR Description: unknown protein; protein id: At2g26850.1
  misc_feature (29)..(258): Homolog of NCBI NO: 15225802 NR Description: unknown protein; protein id: At2g26850.1
  misc_feature (32)..(303): Homolog of NCBI NO: 30688559 NR Description: F-box protein family [Arabidopsis thaliana]
  misc_feature (1)..(303): Homolog of NCBI NO: 30685347 NR Description: F-box protein family [Arabidopsis thaliana]
  misc_feature (1)..(309): Homolog of NCBI NO: 34903372 NR Description: unnamed protein product [Oryza sativa (japonica
MPLMPSFKRKRASATVENAEEAAATAGGGETSVLDLPELAIDCILEKLRPAELRSMAAVCRSMRERCRGDHLWERHMTNRWGRVLGRAARDEWRTHLASASESRAAGGGGGGGKRRRWLAALSCVCPVVSWMRPRADGGKSSAPVLDDSIMSWYLSVESGKFWFPAQVYNREHGHVGFMMSCYDAALSYDLHTDTFRARYPPHGRRTVVLEDGVQWDRVRAPPVDTLAHYLHTSDCLHELRPGDHIEIQWRRNKEFPYGWWYGVVGHLESCDGSEHFCRCHLSDTVVLEFNQYTPGSRWRQAVGETEGA

SEQ ID NO: 17795 - DNA, 418 bp, Zea mays subsp. mays
  misc_feature (1)..(418): Ceres Seq. ID no. 5754401
  misc_feature: MA Experiment ID: 108522 Result: Up-regulated in Transcription
  misc_feature: MA Experiment 108522 PARAMETER Experiment Name: Zm_42deg_Heat_P Parameter: Age (day) Value: 8
  misc_feature: MA Experiment 108522 PARAMETER Experiment Name: Zm_42deg_Heat_P Parameter: Organism Value: Zea mays
  misc_feature: MA Experiment 108522 PARAMETER Experiment Name: Zm_42deg_Heat_P Parameter: Plant Line Value: 35A19
  misc_feature: MA Experiment 108522 PARAMETER Experiment Name: Zm_42deg_Heat_P Parameter: Temperature (deg C) Value: 42 vs. 22
  misc_feature: MA Experiment 108522 PARAMETER Experiment Name: Zm_42deg_Heat_P Parameter: Timepoint (hr) Value: 1
  misc_feature: MA Experiment 108522 PARAMETER Experiment Name: Zm_42deg_Heat_P Parameter: Tissue Value: Aerial
  misc_feature: Pfam Name: GRP Pfam Description: Glycine rich protein family
cccacagtgagcgaggttcccctcccgactcggtgatggcggctacggtggcggcggcggctacggtggtggtggcggcggctacggcggtggcaaccgtggcggcggctacggcaactccgacgggaactggaggaactgagcggtggggcccgcgcggccaagttatcctgttcgctaccgtgttgtttaccctagtccagagggtttatcttcgttcgtctcatgtttgttgttgcccatctgtgtttttgattgcaaggtcgctttgtgtcagttgttagtgctgtgttcatcctcggctccagcagacccatgcatcaaccagcatggactgcggatcgatggatgctgttacccccgtcaggctttatcctaagttaatcttcaaggaaaaaatggtgcttcttggtgctgc

SEQ ID NO: 17796 - protein, 93 aa, Zea mays subsp. mays
  peptide (1)..(93): Ceres Seq. ID no. 5754402
  misc_feature: Pfam Name: GRP Pfam Description: Glycine rich protein family
  misc_feature (13)..(78): Homolog of NCBI NO: 18103931 NR Description: glycine rich RNA binding protein [Oryza sativa]
HSERGSPPDSVMAATVAAAATVVVAAATAVATVAAATATPTGTGGTERWGPRGQVILFATVLFTLVQRVYLRSSHVCCCPSVFLIARSLCVSC

SEQ ID NO: 17797 - protein, 82 aa, Zea mays subsp. mays
  peptide (1)..(82): Ceres Seq. ID no. 5754403
  misc_feature: Pfam Name: GRP Pfam Description: Glycine rich protein family
  misc_feature (2)..(67): Homolog of NCBI NO: 18103931 NR Description: glycine rich RNA binding protein [Oryza sativa]
MAATVAAAATVVVAAATAVATVAAATATPTGTGGTERWGPRGQVILFATVLFTLVQRVYLRSSHVCCCPSVFLIARSLCVSC

SEQ ID NO: 17798 - DNA, 991 bp, Zea mays subsp. mays
  misc_feature (1)..(991): Ceres Seq. ID no. 12359848
  misc_feature: MA Experiment ID: 108529 Result: Up-regulated in Transcription
  misc_feature: MA Experiment 108529 PARAMETER Experiment Name: Zm_Imbibed_Seeds_P Parameter: Age (day) Value: 5 vs. 2
  misc_feature: MA Experiment 108529 PARAMETER Experiment Name: Zm_Imbibed_Seeds_P Parameter: Organism Value: Zea mays
  misc_feature: MA Experiment 108529 PARAMETER Experiment Name: Zm_Imbibed_Seeds_P Parameter: Plant Line Value: 35A19
  misc_feature: MA Experiment 108529 PARAMETER Experiment Name: Zm_Imbibed_Seeds_P Parameter: Tissue Value: Roots vs. Embryo
gtccgcccctgcggtgcgggtgctttctccagcgacagcgacagcgagaggggaggggaaccagcaagctcctcctcctctacccctcgcctcgtccgcgccagatctatctgtcccttcctcttgtagttgcaggcagacgcgccatgcggatgcgggtgcttcccgcgtcctggtcatcttcctccgccaagcatagcagcggcagctccgagtcgcaggagcacccttcttcctcctctgctacggccgcggtgtacctcaacatctacgacatctcccccctcaaccactacctctactggttcggactcggcatcttccactccgggatccaagtccatggcatggagtatggctttggagctcatgaataccccaccagcggagtcttccaagtagaacccaaaagctgccccgggtttatcttcaggcgctctgtgtgtgtgggtgtaactcacatgtcccgttcccaagtccgcacttccatagaggatctcgccgaggattatcatggggacacttatcatttgattctcaagaactgcaatcatttcacagcagatgtctgcgagcgtttgaccgggaagccagtacctggatgggtgaatcgactcgccagattaggttccttcttcaattgtgtattgcctgacagcatcaaggtttcagcagtcagagatgtaaatgcacatccagatttttctgatgatggcttggggtccaatgcctcgatccttgagggaagtgatgacgatgatttagaccaactcctaagaacacctaacagcgacactgtgtcttcaagggacaagacattaactcctggcagggatagtctctaattgttctcctttgatagcaaaatagaggcaagtgctttgatgttcacgtctcatggtggtatggggttggcctgatcatatcatcatctgctgtcaaaatttggtggcgcgctagtctggggtgatgaangattgtttgatattgt

SEQ ID NO: 17799 - protein, 280 aa, Zea mays subsp. mays
  peptide (1)..(280): Ceres Seq. ID no. 12359849
  misc_feature (85)..(206): Pfam Name: Eukaryotic protein of unknown function (DUF862) Pfam Description: Eukaryotic protein of unknown function (DUF862)
  misc_feature (85)..(267): Homolog of NCBI NO: 18412886 NR Description: expressed protein
  misc_feature (83)..(225): Homolog of NCBI NO: 9802596 NR Description: T2E6.19 [Arabidopsis thaliana]
  misc_feature (85)..(230): Homolog of NCBI NO: 18420889 NR Description: putative protein
  misc_feature (83)..(225): Homolog of NCBI NO: 21593644 NR Description: unknown [Arabidopsis thaliana]
  misc_feature (83)..(225): Homolog of NCBI NO: 18401869 NR Description: expressed protein
  misc_feature (66)..(112): Homolog of NCBI NO: 7488100 NR Description: probable EREBP-4 - Arabidopsis thaliana
  misc_feature (106)..(280): Homolog of NCBI NO: 7488100 NR Description: probable EREBP-4 - Arabidopsis thaliana
  misc_feature (66)..(280): Homolog of NCBI NO: 30684058 NR Description: expressed protein [Arabidopsis thaliana]
  misc_feature (51)..(280): Homolog of NCBI NO: 15238059 NR Description: putative protein; protein id: At5g47310.1
  misc_feature (78)..(258): Homolog of NCBI NO: 38346173 NR Description: OSJNBa0079A21.20 [Oryza sativa (japonica
PPLRCGCFLQRQRQREGRGTSKLLLLYPSPRPRQIYLSLPLVVAGRRAMRMRVLPASWSSSSAKHSSGSSESQEHPSSSSATAAVYLNIYDISPLNHYLYWFGLGIFHSGIQVHGMEYGFGAHEYPTSGVFQVEPKSCPGFIFRRSVCVGVTHMSRSQVRTSIEDLAEDYHGDTYHLILKNCNHFTADVCERLTGKPVPGWVNRLARLGSFFNCVLPDSIKVSAVRDVNAHPDFSDDGLGSNASILEGSDDDDLDQLLRTPNSDTVSSRDKTLTPGRDSL

SEQ ID NO: 17800 - protein, 232 aa, Zea mays subsp. mays
  peptide (1)..(232): Ceres Seq. ID no. 12359850
  misc_feature (37)..(158): Pfam Name: Eukaryotic protein of unknown function (DUF862) Pfam Description: Eukaryotic protein of unknown function (DUF862)
  misc_feature (37)..(219): Homolog of NCBI NO: 18412886 NR Description: expressed protein
  misc_feature (35)..(177): Homolog of NCBI NO: 9802596 NR Description: T2E6.19 [Arabidopsis thaliana]
  misc_feature (37)..(182): Homolog of NCBI NO: 18420889 NR Description: putative protein
  misc_feature (35)..(177): Homolog of NCBI NO: 21593644 NR Description: unknown [Arabidopsis thaliana]
  misc_feature (35)..(177): Homolog of NCBI NO: 18401869 NR Description: expressed protein
  misc_feature (18)..(64): Homolog of NCBI NO: 7488100 NR Description: probable EREBP-4 - Arabidopsis thaliana
  misc_feature (58)..(232): Homolog of NCBI NO: 7488100 NR Description: probable EREBP-4 - Arabidopsis thaliana
  misc_feature (18)..(232): Homolog of NCBI NO: 30684058 NR Description: expressed protein [Arabidopsis thaliana]
  misc_feature (3)..(232): Homolog of NCBI NO: 15238059 NR Description: putative protein; protein id: At5g47310.1
  misc_feature (30)..(210): Homolog of NCBI NO: 38346173 NR Description: OSJNBa0079A21.20 [Oryza sativa (japonica
MRMRVLPASWSSSSAKHSSGSSESQEHPSSSSATAAVYLNIYDISPLNHYLYWFGLGIFHSGIQVHGMEYGFGAHEYPTSGVFQVEPKSCPGFIFRRSVCVGVTHMSRSQVRTSIEDLAEDYHGDTYHLILKNCNHFTADVCERLTGKPVPGWVNRLARLGSFFNCVLPDSIKVSAVRDVNAHPDFSDDGLGSNASILEGSDDDDLDQLLRTPNSDTVSSRDKTLTPGRDSL

SEQ ID NO: 17801 - protein, 230 aa, Zea mays subsp. mays
  peptide (1)..(230): Ceres Seq. ID no. 12359851
  misc_feature (35)..(156): Pfam Name: Eukaryotic protein of unknown function (DUF862) Pfam Description: Eukaryotic protein of unknown function (DUF862)
  misc_feature (35)..(217): Homolog of NCBI NO: 18412886 NR Description: expressed protein
  misc_feature (33)..(175): Homolog of NCBI NO: 9802596 NR Description: T2E6.19 [Arabidopsis thaliana]
  misc_feature (35)..(180): Homolog of NCBI NO: 18420889 NR Description: putative protein
  misc_feature (33)..(175): Homolog of NCBI NO: 21593644 NR Description: unknown [Arabidopsis thaliana]
  misc_feature (33)..(175): Homolog of NCBI NO: 18401869 NR Description: expressed protein
  misc_feature (16)..(62): Homolog of NCBI NO: 7488100 NR Description: probable EREBP-4 - Arabidopsis thaliana
  misc_feature (56)..(230): Homolog of NCBI NO: 7488100 NR Description: probable EREBP-4 - Arabidopsis thaliana
  misc_feature (16)..(230): Homolog of NCBI NO: 30684058 NR Description: expressed protein [Arabidopsis thaliana]
  misc_feature (1)..(230): Homolog of NCBI NO: 15238059 NR Description: putative protein; protein id: At5g47310.1
  misc_feature (28)..(208): Homolog of NCBI NO: 38346173 NR Description: OSJNBa0079A21.20 [Oryza sativa (japonica
MRVLPASWSSSSAKHSSGSSESQEHPSSSSATAAVYLNIYDISPLNHYLYWFGLGIFHSGIQVHGMEYGFGAHEYPTSGVFQVEPKSCPGFIFRRSVCVGVTHMSRSQVRTSIEDLAEDYHGDTYHLILKNCNHFTADVCERLTGKPVPGWVNRLARLGSFFNCVLPDSIKVSAVRDVNAHPDFSDDGLGSNASILEGSDDDDLDQLLRTPNSDTVSSRDKTLTPGRDSL

SEQ ID NO: 17802 - DNA, 495 bp, Zea mays subsp. mays
  misc_feature (1)..(495): Ceres Seq. ID no. 11414813
  misc_feature: MA Experiment ID: 108689 Result: Down-regulated in Transcription
  misc_feature: MA Experiment 108689 PARAMETER Experiment Name: Zm_Drought_Roots_P Parameter: Age (day) Value: 9
  misc_feature: MA Experiment 108689 PARAMETER Experiment Name: Zm_Drought_Roots_P Parameter: Organism Value: Zea mays
  misc_feature: MA Experiment 108689 PARAMETER Experiment Name: Zm_Drought_Roots_P Parameter: Plant Line Value: 35A19
  misc_feature: MA Experiment 108689 PARAMETER Experiment Name: Zm_Drought_Roots_P Parameter: Timepoint (hr) Value: 24
  misc_feature: MA Experiment 108689 PARAMETER Experiment Name: Zm_Drought_Roots_P Parameter: Tissue Value: Roots
  misc_feature: MA Experiment 108689 PARAMETER Experiment Name: Zm_Drought_Roots_P Parameter: Treatment Value: Drought vs. No Drought
atctctcactccctcgctccgtctaccagtaccaccacgtccctcctcgtcgacgatctcgtagcggcggcgcacatggcgagcgacggcgcggcggctacgccagcgaaggttaccccaaagaaggccaatctcctcgacccgcactccatcaagcaccttctcgacgagaccatctccgaggtcgtgaagagtaagggctacaccgaggacacgcggctgggcaactggaagctggggatcggagccgccgtgattgctgtcgccctcctcgctcagttttaccccaagaagttcccgcagaaccgcgatttcctccttggctgcatcgccctgyatgtggtgctgaatgtggtgctgctgatccttagctacaccaaggagaaggatgccatcctattcacgcaccctcctatgaatacttgccatcaggtgccaaggagaagatgcgtttgtcttcaatattaggctgctgcacaatgacagaaagagcat

SEQ ID NO: 17803 - protein, 155 aa, Zea mays subsp. mays
  peptide (1)..(155): Ceres Seq. ID no. 11414814
  misc_feature (41)..(112): Homolog of NCBI NO: 25408649 NR Description: hypothetical protein At2g39960 [imported] -
  misc_feature (41)..(137): Homolog of NCBI NO: 34365647 NR Description: At4g04200 [Arabidopsis thaliana]
  misc_feature (41)..(138): Homolog of NCBI NO: 30688096 NR Description: expressed protein [Arabidopsis thaliana]
  misc_feature (26)..(138): Homolog of NCBI NO: 38344552 NR Description: OSJNBa0027P08.20 [Oryza sativa (japonica
  misc_feature (113)..(113): Xaa is any aa, unknown or other
ISHSLAPSTSTTTSLLVDDLVAAAHMASDGAAATPAKVTPKKANLLDPHSIKHLLDETISEVVKSKGYTEDTRLGNWKLGIGAAVIAVALLAQFYPKKFPQNRDFLLGCIALXVVLNVVLLILSYTKEKDAILFTHPPMNTCHQVPRRRCVCLQY

SEQ ID NO: 17804 - protein, 130 aa, Zea mays subsp. mays
  peptide (1)..(130): Ceres Seq. ID no. 11414815
  misc_feature (16)..(87): Homolog of NCBI NO: 25408649 NR Description: hypothetical protein At2g39960 [imported] -
  misc_feature (16)..(112): Homolog of NCBI NO: 34365647 NR Description: At4g04200 [Arabidopsis thaliana]
  misc_feature (16)..(113): Homolog of NCBI NO: 30688096 NR Description: expressed protein [Arabidopsis thaliana]
  misc_feature (1)..(113): Homolog of NCBI NO: 38344552 NR Description: OSJNBa0027P08.20 [Oryza sativa (japonica
  misc_feature (88)..(88): Xaa is any aa, unknown or other
MASDGAAATPAKVTPKKANLLDPHSIKHLLDETISEVVKSKGYTEDTRLGNWKLGIGAAVIAVALLAQFYPKKFPQNRDFLLGCIALXVVLNVVLLILSYTKEKDAILFTHPPMNTCHQVPRRRCVCLQY

SEQ ID NO: 17805 - DNA, 1343 bp, Zea mays subsp. mays
  misc_feature (1)..(1343): Ceres Seq. ID no. 13491323
  misc_feature: MA Experiment ID: 108528 Result: Up-regulated in Transcription
  misc_feature: MA Experiment 108528 PARAMETER Experiment Name: Zm_Imbibed_Seeds_P Parameter: Age (day) Value: 5 vs. 2
  misc_feature: MA Experiment 108528 PARAMETER Experiment Name: Zm_Imbibed_Seeds_P Parameter: Organism Value: Zea mays
  misc_feature: MA Experiment 108528 PARAMETER Experiment Name: Zm_Imbibed_Seeds_P Parameter: Plant Line Value: 35A19
  misc_feature: MA Experiment 108528 PARAMETER Experiment Name: Zm_Imbibed_Seeds_P Parameter: Tissue Value: Aerial vs. Embryo
  misc_feature: MA Experiment ID: 108545 Result: Up-regulated in Transcription
  misc_feature: MA Experiment 108545 PARAMETER Experiment Name: Zm_Imbibed_Seeds_P Parameter: Age (day) Value: 3 vs. 2
  misc_feature: MA Experiment 108545 PARAMETER Experiment Name: Zm_Imbibed_Seeds_P Parameter: Organism Value: Zea mays
  misc_feature: MA Experiment 108545 PARAMETER Experiment Name: Zm_Imbibed_Seeds_P Parameter: Plant Line Value: 35A19
  misc_feature: MA Experiment 108545 PARAMETER Experiment Name: Zm_Imbibed_Seeds_P Parameter: Tissue Value: Aerial vs. Embryo
  misc_feature: MA Experiment ID: 108547 Result: Up-regulated in Transcription
  misc_feature: MA Experiment 108547 PARAMETER Experiment Name: Zm_Imbibed_Seeds_P Parameter: Age (day) Value: 4 vs. 2
  misc_feature: MA Experiment 108547 PARAMETER Experiment Name: Zm_Imbibed_Seeds_P Parameter: Organism Value: Zea mays
  misc_feature: MA Experiment 108547 PARAMETER Experiment Name: Zm_Imbibed_Seeds_P Parameter: Plant Line Value: 35A19
  misc_feature: MA Experiment 108547 PARAMETER Experiment Name: Zm_Imbibed_Seeds_P Parameter: Tissue Value: Aerial vs. Embryo
  misc_feature: MA Experiment ID: 108556 Result: Down-regulated in Transcription
  misc_feature: MA Experiment 108556 PARAMETER Experiment Name: Zm_Drought_P Parameter: Age (day) Value: 9
  misc_feature: MA Experiment 108556 PARAMETER Experiment Name: Zm_Drought_P Parameter: Organism Value: Zea mays
  misc_feature: MA Experiment 108556 PARAMETER Experiment Name: Zm_Drought_P Parameter: Plant Line Value: 35A19
  misc_feature: MA Experiment 108556 PARAMETER Experiment Name: Zm_Drought_P Parameter: Timepoint (hr) Value: 24
  misc_feature: MA Experiment 108556 PARAMETER Experiment Name: Zm_Drought_P Parameter: Tissue Value: Aerial
  misc_feature: MA Experiment 108556 PARAMETER Experiment Name: Zm_Drought_P Parameter: Treatment Value: Drought vs. No Drought
  misc_feature: MA Experiment ID: 108597 Result: Down-regulated in Transcription
  misc_feature: MA Experiment 108597 PARAMETER Experiment Name: Zm_100uM_ABA_P Parameter: Age (day) Value: 9
  misc_feature: MA Experiment 108597 PARAMETER Experiment Name: Zm_100uM_ABA_P Parameter: Organism Value: Zea mays
  misc_feature: MA Experiment 108597 PARAMETER Experiment Name: Zm_100uM_ABA_P Parameter: Plant Line Value: 35A19
  misc_feature: MA Experiment 108597 PARAMETER Experiment Name: Zm_100uM_ABA_P Parameter: Timepoint (hr) Value: 24
  misc_feature: MA Experiment 108597 PARAMETER Experiment Name: Zm_100uM_ABA_P Parameter: Tissue Value: Aerial
  misc_feature: MA Experiment 108597 PARAMETER Experiment Name: Zm_100uM_ABA_P Parameter: Treatment Value: 100uM ABA vs. No Treatment
  misc_feature: MA Experiment ID: 20000480 Result: Down-regulated in Transcription
  misc_feature: MA Experiment 20000480 PARAMETER Experiment Name: Zm_Drought_P Parameter: Age (day) Value: 11
  misc_feature: MA Experiment 20000480 PARAMETER Experiment Name: Zm_Drought_P Parameter: Organism Value: Zea mays
  misc_feature: MA Experiment 20000480 PARAMETER Experiment Name: Zm_Drought_P Parameter: Plant Line Value: 35A19
  misc_feature: MA Experiment 20000480 PARAMETER Experiment Name: Zm_Drought_P Parameter: Timepoint (hr) Value: 72
  misc_feature: MA Experiment 20000480 PARAMETER Experiment Name: Zm_Drought_P Parameter: Tissue Value: Aerial
  misc_feature: MA Experiment 20000480 PARAMETER Experiment Name: Zm_Drought_P Parameter: Treatment Value: Drought vs. No Drought
  misc_feature: MA Experiment ID: 20000488 Result: Up-regulated in Transcription
  misc_feature: MA Experiment 20000488 PARAMETER Experiment Name: Zm_50mM_NH4NO3_L_to_H_P Parameter: Organism Value: Zea mays
  misc_feature: MA Experiment 20000488 PARAMETER Experiment Name: Zm_50mM_NH4NO3_L_to_H_P Parameter: Timepoint (hr) Value: 8
  misc_feature: MA Experiment 20000488 PARAMETER Experiment Name: Zm_50mM_NH4NO3_L_to_H_P Parameter: Tissue Value: Leaves
  misc_feature: MA Experiment 20000488 PARAMETER Experiment Name: Zm_50mM_NH4NO3_L_to_H_P Parameter: Treatment Value: 50mM NH4NO3 vs. 100mM Mannitol
  misc_feature: MA Experiment ID: 20000492 Result: Up-regulated in Transcription
  misc_feature: MA Experiment 20000492 PARAMETER Experiment Name: Zm_Hybrid_Seed_Dev_P Parameter: DAP Value: 12
  misc_feature: MA Experiment 20000492 PARAMETER Experiment Name: Zm_Hybrid_Seed_Dev_P Parameter: Organism Value: Zea mays
  misc_feature: MA Experiment 20000492 PARAMETER Experiment Name: Zm_Hybrid_Seed_Dev_P Parameter: Plant Line Value: 35A19
  misc_feature: MA Experiment 20000492 PARAMETER Experiment Name: Zm_Hybrid_Seed_Dev_P Parameter: Tissue Value: Fert Kernel vs. Unfert Floret
aaaaaaacccaaacgtccatctcatcgacaccccctccgatctccttatcccttcccgtcgcataaacccccgccgccgtgacctcgcagcgaccctgccctcgttctaggctttcactgcaggcatcgcgtctccagtagcagggcaagagaaaggagaggatggcgtcgccgataccgcgcgagtgggtcgggctgcagcagtttccggcggctacacagaccaagctgcacgaactcctcggcaaactcaaggaggaggatgtgagcacattaacaattctggtgatggggaaaggtggagtggggaagtcatccactgttaactccatcgttggggagagggttgcctctgtcagcgctttccagtctgagggtctgagaccaatgatgtgctcgcgcacaagggcagggttcactttgaacattatcgacactcctgggcttattgaaggtggatacattaatgagcaggccgttgacatcattaagagatttcttctaggcaagactatcgatgttctcctgtacgtggatcgtttggatgcgtatagaatggatacactggatgaacaggttataagagccatcaccaattcatttggaaaagatatttggcgaagatcattggttgtgttgacccatgctcaactctcaccacctgatggaatcgactataatgatttctttacaagaagatcagaggcacttttgcgatacatccactcaggagcaggaatcaacaaacgagaatatggggatttccccttgccaatagcattggtggagaacagtggaaggtgcaagactaatgagcatggggagaagatacttccggacggaactctgtgggttccaaacctgatgaaagaaattactgttgtcatctcaaacgggagcagtcccattcatgttgatcagaagttaattgatggtccaaaccctaacaatcgccgaaagttgttcataccacttatccttgctgtggagtacttcttggtggtaaaaggaatccggagggcgatccatgcagatatcgcaaacgggaaggtagatgactgggagcagcgttaccgggacttggtgggaagcagggacctcgtagagcagaaaggttctacctcccggaaccgcaaagcctaagttggtgtaccagaaaggattctattcgtgttgagacccacccactcgatctgctgctccttttcctaaatctgtgctgggagctttatagagttcgctggtactacttgaaaaaaaatgctcctgttgcagttgataagattatgtttcccattttatgacgattggccgtcttcgcaattttgaagatgttatcgaat

SEQ ID NO: 17806 - protein, 326 aa, Zea mays subsp. mays
  peptide (1)..(326): Ceres Seq. ID no. 13491324
  misc_feature (38)..(235): Pfam Name: AIG1 family Pfam Description: AIG1 family
  misc_feature (7)..(311): Homolog of NCBI NO: 25091410 NR Description: Translocase of chloroplast 34 (34 kDa chloroplast
  misc_feature (7)..(311): Homolog of NCBI NO: 15238381 NR Description: GTP-binding protein (gb|AAD09203.1) [Arabidopsis
  misc_feature (7)..(311): Homolog of NCBI NO: 25091388 NR Description: Translocase of chloroplast 34 (34 kDa chloroplast envelope protein) (GTP-binding protein OEP34) (GTP-binding
  misc_feature (7)..(296): Homolog of NCBI NO: 15217705 NR Description: GTP-binding protein -related [Arabidopsis
  misc_feature (7)..(296): Homolog of NCBI NO: 33391904 NR Description: TOC33 [Brassica napus]
  misc_feature (7)..(311): Homolog of NCBI NO: 1076522 NR Description: chloroplast import-associated protein IAP36,
  misc_feature (7)..(296): Homolog of NCBI NO: 32765535 NR Description: TOC33 [Brassica napus]
  misc_feature (7)..(311): Homolog of NCBI NO: 21594231 NR Description: GTP-binding protein [Arabidopsis thaliana]
  misc_feature (1)..(326): Homolog of NCBI NO: 6689637 NR Description: Toc34-1 protein [Zea mays]
  misc_feature (1)..(326): Homolog of NCBI NO: 7259224 NR Description: Toc34-2 protein [Zea mays]
MASPIPREWVGLQQFPAATQTKLHELLGKLKEEDVSTLTILVMGKGGVGKSSTVNSIVGERVASVSAFQSEGLRPMMCSRTRAGFTLNIIDTPGLIEGGYINEQAVDIIKRFLLGKTIDVLLYVDRLDAYRMDTLDEQVIRAITNSFGKDIWRRSLVVLTHAQLSPPDGIDYNDFFTRRSEALLRYIHSGAGINKREYGDFPLPIALVENSGRCKTNEHGEKILPDGTLWVPNLMKEITVVISNGSSPIHVDQKLIDGPNPNNRRKLFIPLILAVEYFLVVKGIRRAIHADIANGKVDDWEQRYRDLVGSRDLVEQKGSTSRNRKA

SEQ ID NO: 17807 - protein, 284 aa, Zea mays subsp. mays
  peptide (1)..(284): Ceres Seq. ID no. 13491325
  misc_feature (1)..(193): Pfam Name: AIG1 family Pfam Description: AIG1 family
  misc_feature (1)..(254): Homolog of NCBI NO: 15217705 NR Description: GTP-binding protein -related [Arabidopsis
  misc_feature (1)..(254): Homolog of NCBI NO: 32765535 NR Description: TOC33 [Brassica napus]
  misc_feature (1)..(254): Homolog of NCBI NO: 33391904 NR Description: TOC33 [Brassica napus]
  misc_feature (1)..(269): Homolog of NCBI NO: 1076522 NR Description: chloroplast import-associated protein IAP36,
  misc_feature (1)..(269): Homolog of NCBI NO: 25091388 NR Description: Translocase of chloroplast 34 (34 kDa chloroplast envelope protein) (GTP-binding protein OEP34) (GTP-binding
  misc_feature (1)..(269): Homolog of NCBI NO: 21594231 NR Description: GTP-binding protein [Arabidopsis thaliana]
  misc_feature (1)..(269): Homolog of NCBI NO: 25091410 NR Description: Translocase of chloroplast 34 (34 kDa chloroplast
  misc_feature (1)..(269): Homolog of NCBI NO: 15238381 NR Description: GTP-binding protein (gb|AAD09203.1) [Arabidopsis
  misc_feature (1)..(284): Homolog of NCBI NO: 6689637 NR Description: Toc34-1 protein [Zea mays]
  misc_feature (1)..(284): Homolog of NCBI NO: 7259224 NR Description: Toc34-2 protein [Zea mays]
MGKGGVGKSSTVNSIVGERVASVSAFQSEGLRPMMCSRTRAGFTLNIIDTPGLIEGGYINEQAVDIIKRFLLGKTIDVLLYVDRLDAYRMDTLDEQVIRAITNSFGKDIWRRSLVVLTHAQLSPPDGIDYNDFFTRRSEALLRYIHSGAGINKREYGDFPLPIALVENSGRCKTNEHGEKILPDGTLWVPNLMKEITVVISNGSSPIHVDQKLIDGPNPNNRRKLFIPLILAVEYFLVVKGIRRAIHADIANGKVDDWEQRYRDLVGSRDLVEQKGSTSRNRKA

SEQ ID NO: 17808 - protein, 251 aa, Zea mays subsp. mays
  peptide (1)..(251): Ceres Seq. ID no. 13491326
  misc_feature (1)..(160): Pfam Name: AIG1 family Pfam Description: AIG1 family
  misc_feature (1)..(221): Homolog of NCBI NO: 15217705 NR Description: GTP-binding protein -related [Arabidopsis
  misc_feature (1)..(221): Homolog of NCBI NO: 32765535 NR Description: TOC33 [Brassica napus]
  misc_feature (1)..(221): Homolog of NCBI NO: 33391904 NR Description: TOC33 [Brassica napus]
  misc_feature (1)..(236): Homolog of NCBI NO: 1076522 NR Description: chloroplast import-associated protein IAP36,
  misc_feature (1)..(236): Homolog of NCBI NO: 25091388 NR Description: Translocase of chloroplast 34 (34 kDa chloroplast envelope protein) (GTP-binding protein OEP34) (GTP-binding
  misc_feature (1)..(236): Homolog of NCBI NO: 21594231 NR Description: GTP-binding protein [Arabidopsis thaliana]
  misc_feature (1)..(236): Homolog of NCBI NO: 25091410 NR Description: Translocase of chloroplast 34 (34 kDa chloroplast
  misc_feature (1)..(236): Homolog of NCBI NO: 15238381 NR Description: GTP-binding protein (gb|AAD09203.1) [Arabidopsis
  misc_feature (1)..(251): Homolog of NCBI NO: 6689637 NR Description: Toc34-1 protein [Zea mays]
  misc_feature (1)..(251): Homolog of NCBI NO: 7259224 NR Description: Toc34-2 protein [Zea mays]
MMCSRTRAGFTLNIIDTPGLIEGGYINEQAVDIIKRFLLGKTIDVLLYVDRLDAYRMDTLDEQVIRAITNSFGKDIWRRSLVVLTHAQLSPPDGIDYNDFFTRRSEALLRYIHSGAGINKREYGDFPLPIALVENSGRCKTNEHGEKILPDGTLWVPNLMKEITVVISNGSSPIHVDQKLIDGPNPNNRRKLFIPLILAVEYFLVVKGIRRAIHADIANGKVDDWEQRYRDLVGSRDLVEQKGSTSRNRKA

SEQ ID NO: 17809 - DNA, 1241 bp, Zea mays subsp. mays
  misc_feature (1)..(1241): Ceres Seq. ID no. 12417443
  misc_feature: MA Experiment ID: 108515 Result: Up-regulated in Transcription
  misc_feature: MA Experiment 108515 PARAMETER Experiment Name: Zm_2mM_SA_P Parameter: Age (day) Value: 8
  misc_feature: MA Experiment 108515 PARAMETER Experiment Name: Zm_2mM_SA_P Parameter: Organism Value: Zea mays
  misc_feature: MA Experiment 108515 PARAMETER Experiment Name: Zm_2mM_SA_P Parameter: Plant Line Value: 35A19
  misc_feature: MA Experiment 108515 PARAMETER Experiment Name: Zm_2mM_SA_P Parameter: Timepoint (hr) Value: 12
  misc_feature: MA Experiment 108515 PARAMETER Experiment Name: Zm_2mM_SA_P Parameter: Tissue Value: Aerial
  misc_feature: MA Experiment 108515 PARAMETER Experiment Name: Zm_2mM_SA_P Parameter: Treatment Value: 2mM SA vs. No Treatment
  misc_feature: MA Experiment ID: 108522 Result: Up-regulated in Transcription
  misc_feature: MA Experiment 108522 PARAMETER Experiment Name: Zm_42deg_Heat_P Parameter: Age (day) Value: 8
  misc_feature: MA Experiment 108522 PARAMETER Experiment Name: Zm_42deg_Heat_P Parameter: Organism Value: Zea mays
  misc_feature: MA Experiment 108522 PARAMETER Experiment Name: Zm_42deg_Heat_P Parameter: Plant Line Value: 35A19
  misc_feature: MA Experiment 108522 PARAMETER Experiment Name: Zm_42deg_Heat_P Parameter: Temperature (deg C) Value: 42 vs. 22
  misc_feature: MA Experiment 108522 PARAMETER Experiment Name: Zm_42deg_Heat_P Parameter: Timepoint (hr) Value: 1
  misc_feature: MA Experiment 108522 PARAMETER Experiment Name: Zm_42deg_Heat_P Parameter: Tissue Value: Aerial
  misc_feature: MA Experiment ID: 108526 Result: Up-regulated in Transcription
  misc_feature: MA Experiment 108526 PARAMETER Experiment Name: Zm_5mM_NO_P Parameter: Age (day) Value: 8
  misc_feature: MA Experiment 108526 PARAMETER Experiment Name: Zm_5mM_NO_P Parameter: Organism Value: Zea mays
  misc_feature: MA Experiment 108526 PARAMETER Experiment Name: Zm_5mM_NO_P Parameter: Plant Line Value: 35A19
  misc_feature: MA Experiment 108526 PARAMETER Experiment Name: Zm_5mM_NO_P Parameter: Timepoint (hr) Value: 1
  misc_feature: MA Experiment 108526 PARAMETER Experiment Name: Zm_5mM_NO_P Parameter: Tissue Value: Aerial
  misc_feature: MA Experiment 108526 PARAMETER Experiment Name: Zm_5mM_NO_P Parameter: Treatment Value: 5mM NO vs. No Treatment
  misc_feature: MA Experiment ID: 108527 Result: Up-regulated in Transcription
  misc_feature: MA Experiment 108527 PARAMETER Experiment Name: Zm_5mM_NO_P Parameter: Age (day) Value: 8
  misc_feature: MA Experiment 108527 PARAMETER Experiment Name: Zm_5mM_NO_P Parameter: Organism Value: Zea mays
  misc_feature: MA Experiment 108527 PARAMETER Experiment Name: Zm_5mM_NO_P Parameter: Plant Line Value: 35A19
  misc_feature: MA Experiment 108527 PARAMETER Experiment Name: Zm_5mM_NO_P Parameter: Timepoint (hr) Value: 6
  misc_feature: MA Experiment 108527 PARAMETER Experiment Name: Zm_5mM_NO_P Parameter: Tissue Value: Aerial
  misc_feature: MA Experiment 108527 PARAMETER Experiment Name: Zm_5mM_NO_P Parameter: Treatment Value: 5mM NO vs. No Treatment
  misc_feature: MA Experiment ID: 108529 Result: Up-regulated in Transcription
  misc_feature: MA Experiment 108529 PARAMETER Experiment Name: Zm_Imbibed_Seeds_P Parameter: Age (day) Value: 5 vs. 2
  misc_feature: MA Experiment 108529 PARAMETER Experiment Name: Zm_Imbibed_Seeds_P Parameter: Organism Value: Zea mays
  misc_feature: MA Experiment 108529 PARAMETER Experiment Name: Zm_Imbibed_Seeds_P Parameter: Plant Line Value: 35A19
  misc_feature: MA Experiment 108529 PARAMETER Experiment Name: Zm_Imbibed_Seeds_P Parameter: Tissue Value: Roots vs. Embryo
  misc_feature: MA Experiment ID: 108532 Result: Down-regulated in Transcription
  misc_feature: MA Experiment 108532 PARAMETER Experiment Name: Zm_20uM_KNO3_H-to-L_P Parameter: Age (day) Value: 11
  misc_feature: MA Experiment 108532 PARAMETER Experiment Name: Zm_20uM_KNO3_H-to-L_P Parameter: Organism Value: Zea mays
  misc_feature: MA Experiment 108532 PARAMETER Experiment Name: Zm_20uM_KNO3_H-to-L_P Parameter: Plant Line Value: 35A19
  misc_feature: MA Experiment 108532 PARAMETER Experiment Name: Zm_20uM_KNO3_H-to-L_P Parameter: Timepoint (hr) Value: 16
  misc_feature: MA Experiment 108532 PARAMETER Experiment Name: Zm_20uM_KNO3_H-to-L_P Parameter: Tissue Value: Roots
  misc_feature: MA Experiment 108532 PARAMETER Experiment Name: Zm_20uM_KNO3_H-to-L_P Parameter: Treatment Value: 20uM KNO3 vs. 60mM KNO3
  misc_feature: MA Experiment ID: 108534 Result: Up-regulated in Transcription
  misc_feature: MA Experiment 108534 PARAMETER Experiment Name: Zm_4deg_Cold_P Parameter: Age (hr) Value: 8
  misc_feature: MA Experiment 108534 PARAMETER Experiment Name: Zm_4deg_Cold_P Parameter: Organism Value: Zea mays
  misc_feature: MA Experiment 108534 PARAMETER Experiment Name: Zm_4deg_Cold_P Parameter: Plant Line Value: 35A19
  misc_feature: MA Experiment 108534 PARAMETER Experiment Name: Zm_4deg_Cold_P Parameter: Temperature (deg C) Value: 4 vs. 22
  misc_feature: MA Experiment 108534 PARAMETER Experiment Name: Zm_4deg_Cold_P Parameter: Timepoint (hr) Value: 6
  misc_feature: MA Experiment 108534 PARAMETER Experiment Name: Zm_4deg_Cold_P Parameter: Tissue Value: Aerial
  misc_feature: MA Experiment ID: 108535 Result: Down-regulated in Transcription
  misc_feature: MA Experiment 108535 PARAMETER Experiment Name: Zm_Meristem_P Parameter: Age (day) Value: 8
  misc_feature: MA Experiment 108535 PARAMETER Experiment Name: Zm_Meristem_P Parameter: Organism Value: Zea mays
  misc_feature: MA Experiment 108535 PARAMETER Experiment Name: Zm_Meristem_P Parameter: Plant Line Value: 35A19
  misc_feature: MA Experiment 108535 PARAMETER Experiment Name: Zm_Meristem_P Parameter: Tissue Value: Root Meristem vs. Above Root Meristem
  misc_feature: MA Experiment ID: 108542 Result: Up-regulated in Transcription
  misc_feature: MA Experiment 108542 PARAMETER Experiment Name: Zm_150mM_NaCl_P Parameter: Age (day) Value: 8
  misc_feature: MA Experiment 108542 PARAMETER Experiment Name: Zm_150mM_NaCl_P Parameter: Organism Value: Zea mays
  misc_feature: MA Experiment 108542 PARAMETER Experiment Name: Zm_150mM_NaCl_P Parameter: Plant Line Value: 35A19
  misc_feature: MA Experiment 108542 PARAMETER Experiment Name: Zm_150mM_NaCl_P Parameter: Timepoint (hr) Value: 6
  misc_feature: MA Experiment 108542 PARAMETER Experiment Name: Zm_150mM_NaCl_P Parameter: Tissue Value: Aerial
  misc_feature: MA Experiment 108542 PARAMETER Experiment Name: Zm_150mM_NaCl_P Parameter: Treatment Value: 150mM NaCl vs. No Treatment
  misc_feature: MA Experiment ID: 108546 Result: Up-regulated in Transcription
  misc_feature: MA Experiment 108546 PARAMETER Experiment Name: Zm_Imbibed_Seeds_P Parameter: Age (day) Value: 3 vs. 2
  misc_feature: MA Experiment 108546 PARAMETER Experiment Name: Zm_Imbibed_Seeds_P Parameter: Organism Value: Zea mays
  misc_feature: MA Experiment 108546 PARAMETER Experiment Name: Zm_Imbibed_Seeds_P Parameter: Plant Line Value: 35A19
  misc_feature: MA Experiment 108546 PARAMETER Experiment Name: Zm_Imbibed_Seeds_P Parameter: Tissue Value: Roots vs. Embryo
  misc_feature: MA Experiment ID: 108559 Result: Up-regulated in Transcription
  misc_feature: MA Experiment 108559 PARAMETER Experiment Name: Zm_5mM_NO_P Parameter: Age (day) Value: 8
  misc_feature: MA Experiment 108559 PARAMETER Experiment Name: Zm_5mM_NO_P Parameter: Organism Value: Zea mays
  misc_feature: MA Experiment 108559 PARAMETER Experiment Name: Zm_5mM_NO_P Parameter: Plant Line Value: 35A19
  misc_feature: MA Experiment 108559 PARAMETER Experiment Name: Zm_5mM_NO_P Parameter: Timepoint (hr) Value: 12
  misc_feature: MA Experiment 108559 PARAMETER Experiment Name: Zm_5mM_NO_P Parameter: Tissue Value: Aerial
  misc_feature: MA Experiment 108559 PARAMETER Experiment Name: Zm_5mM_NO_P Parameter: Treatment Value: 5mM NO vs. No Treatment
  misc_feature: MA Experiment ID: 108689 Result: Up-regulated in Transcription
  misc_feature: MA Experiment 108689 PARAMETER Experiment Name: Zm_Drought_Roots_P Parameter: Age (day) Value: 9
  misc_feature: MA Experiment 108689 PARAMETER Experiment Name: Zm_Drought_Roots_P Parameter: Organism Value: Zea mays
  misc_feature: MA Experiment 108689 PARAMETER Experiment Name: Zm_Drought_Roots_P Parameter: Plant Line Value: 35A19
  misc_feature: MA Experiment 108689 PARAMETER Experiment Name: Zm_Drought_Roots_P Parameter: Timepoint (hr) Value: 24
  misc_feature: MA Experiment 108689 PARAMETER Experiment Name: Zm_Drought_Roots_P Parameter: Tissue Value: Roots
  misc_feature: MA Experiment 108689 PARAMETER Experiment Name: Zm_Drought_Roots_P Parameter: Treatment Value: Drought vs. No Drought
  misc_feature: MA Experiment ID: 20000477 Result: Up-regulated in Transcription
  misc_feature: MA Experiment 20000477 PARAMETER Experiment Name: Zm_5mM_SA_P Parameter: Age (day) Value: 10
  misc_feature: MA Experiment 20000477 PARAMETER Experiment Name: Zm_5mM_SA_P Parameter: Organism Value: Zea mays
  misc_feature: MA Experiment 20000477 PARAMETER Experiment Name: Zm_5mM_SA_P Parameter: Plant Line Value: 35A19
  misc_feature: MA Experiment 20000477 PARAMETER Experiment Name: Zm_5mM_SA_P Parameter: Timepoint (hr) Value: 48
  misc_feature: MA Experiment 20000477 PARAMETER Experiment Name: Zm_5mM_SA_P Parameter: Tissue Value: Aerial
  misc_feature: MA Experiment 20000477 PARAMETER Experiment Name: Zm_5mM_SA_P Parameter: Treatment Value: 5mM SA vs. No Treatment
  misc_feature: MA Experiment ID: 20000478 Result: Up-regulated in Transcription
  misc_feature: MA Experiment 20000478 PARAMETER Experiment Name: Zm_5mM_SA_P Parameter: Age (day) Value: 11
  misc_feature: MA Experiment 20000478 PARAMETER Experiment Name: Zm_5mM_SA_P Parameter: Organism Value: Zea mays
  misc_feature: MA Experiment 20000478 PARAMETER Experiment Name: Zm_5mM_SA_P Parameter: Plant Line Value: 35A19
  misc_feature: MA Experiment 20000478 PARAMETER Experiment Name: Zm_5mM_SA_P Parameter: Timepoint (hr) Value: 72
  misc_feature: MA Experiment 20000478 PARAMETER Experiment Name: Zm_5mM_SA_P Parameter: Tissue Value: Aerial
  misc_feature: MA Experiment 20000478 PARAMETER Experiment Name: Zm_5mM_SA_P Parameter: Treatment Value: 5mM SA vs. No Treatment
  misc_feature: MA Experiment ID: 20000479 Result: Up-regulated in Transcription
  misc_feature: MA Experiment 20000479 PARAMETER Experiment Name: Zm_Drought_P Parameter: Age (day) Value: 10
  misc_feature: MA Experiment 20000479 PARAMETER Experiment Name: Zm_Drought_P Parameter: Organism Value: Zea mays
  misc_feature: MA Experiment 20000479 PARAMETER Experiment Name: Zm_Drought_P Parameter: Plant Line Value: 35A19
  misc_feature: MA Experiment 20000479 PARAMETER Experiment Name: Zm_Drought_P Parameter: Timepoint (hr) Value: 48
  misc_feature: MA Experiment 20000479 PARAMETER Experiment Name: Zm_Drought_P Parameter: Tissue Value: Aerial
  misc_feature: MA Experiment 20000479 PARAMETER Experiment Name: Zm_Drought_P Parameter: Treatment Value: Drought vs. No Drought
  misc_feature: MA Experiment ID: 20000480 Result: Up-regulated in Transcription
  misc_feature: MA Experiment 20000480 PARAMETER Experiment Name: Zm_Drought_P Parameter: Age (day) Value: 11
  misc_feature: MA Experiment 20000480 PARAMETER Experiment Name: Zm_Drought_P Parameter: Organism Value: Zea mays
  misc_feature: MA Experiment 20000480 PARAMETER Experiment Name: Zm_Drought_P Parameter: Plant Line Value: 35A19
  misc_feature: MA Experiment 20000480 PARAMETER Experiment Name: Zm_Drought_P Parameter: Timepoint (hr) Value: 72
  misc_feature: MA Experiment 20000480 PARAMETER Experiment Name: Zm_Drought_P Parameter: Tissue Value: Aerial
  misc_feature: MA Experiment 20000480 PARAMETER Experiment Name: Zm_Drought_P Parameter: Treatment Value: Drought vs. No Drought
  misc_feature: MA Experiment ID: 20000532 Result: Up-regulated in Transcription
  misc_feature: MA Experiment 20000532 PARAMETER Experiment Name: Zm_0.001percent_MeJA_P Parameter: Age (day) Value: 10
  misc_feature: MA Experiment 20000532 PARAMETER Experiment Name: Zm_0.001percent_MeJA_P Parameter: Organism Value: Zea mays
  misc_feature: MA Experiment 20000532 PARAMETER Experiment Name: Zm_0.001percent_MeJA_P Parameter: Plant Line Value: 35A19
  misc_feature: MA Experiment 20000532 PARAMETER Experiment Name: Zm_0.001percent_MeJA_P Parameter: Timepoint (hr) Value: 48
  misc_feature: MA Experiment 20000532 PARAMETER Experiment Name: Zm_0.001percent_MeJA_P Parameter: Tissue Value: Aerial
  misc_feature: MA Experiment 20000532 PARAMETER Experiment Name: Zm_0.001percent_MeJA_P Parameter: Treatment Value: 0.001percent MeJA vs. No Treatment
  misc_feature: MA Experiment ID: 20000626 Result: Up-regulated in Transcription
  misc_feature: MA Experiment 20000626 PARAMETER Experiment Name: Zm_Herbicide-Treatments_P Parameter: Timepoint (hr) Value: 12
  misc_feature: MA Experiment 20000626 PARAMETER Experiment Name: Zm_Herbicide-Treatments_P Parameter: Tissue Value: Aerial
  misc_feature: MA Experiment 20000626 PARAMETER Experiment Name: Zm_Herbicide-Treatments_P Parameter: Treatment Value: Roundup vs. No Treatment
aaagcagcacgggcaacacgccgagcaaaacagcgaaatcctcaaatccccaccccggctggtgacggcgccgcccccgctgctgcctgcggtcctgcttctgctaatagtaataggtattcagattcgagcagagcactcccgtgctgcaggcaagggaggacgcaccaccatggattgggatgctccggcattgacgagcttcgtcgccgacttgtccttccgccacctctgctgctacggggccggaatcgcagggaacgccttcgccttcgtgctcttcgtctccccgctccccacattcaagaggatcgtccgcaacggatccacggagcagttctcgtgcacgccgtacatctactcgctgctcaactgcctcatctgcatgtggtacggcctccccttcgtctcctacggcgtcgtcctcgtcgccaccgtcaactccatcggcgccgtgttccagctcgcctacaccgccgtgttcatcgccttcgccgacgccaagcagaggctcaaggtctctgctctcctggccgctgtcttcctggtgttcggactgattgtgtttgttagtctggctttgttggatcacaaagcccggcaggtgttcgtcggatatctcagcgtcgcgtccctcgtatgcatgttcgcgtcccccatgtcaatcgtcaatctggtcatccggacgaagagcgtggaatacatgcccttctacttgtcattatccatgtttctgatgagtgcatccttcgtcatatacggagtgctgcttggtgatggcttcatatatattccaaatgcattggaaccatattgggtatcgtacagttgctgctgtatgcctacatcagaaagggatcaagcgaggaagccaagctgcccttactaatcacacatacatgagcatgccaaaaggaaaaaaaaacaaggttcgctgataggctttcccgaaatcctgtctctggtcaaacttccaggtcgatgtacttgtccgaattgttttgctcctgtgaaaaaagcatgccgttctttcgttttgtttacacgcgacggggatcgtagtttcgctgtatattccatggtagatgctccaagttgttgctggagtcattcgtttatgagtgagcgaagctttgtatataatatagtagtagtaatgtggttccgtgaacttcatcaacagagaggaccagctgtatacacaaagaaaagcaataaaaggatgttactatatcattacc

SEQ ID NO: 17810 - protein, 295 aa, Zea mays subsp. mays
  peptide (1)..(295): Ceres Seq. ID no. 12417444
  misc_feature (82)..(168): Pfam Name: MtN3/saliva family Pfam Description: MtN3/saliva family
  misc_feature (82)..(268): Homolog of NCBI NO: 18405611 NR Description: Expressed protein
  misc_feature (83)..(268): Homolog of NCBI NO: 18413388 NR Description: putative protein
  misc_feature (83)..(290): Homolog of NCBI NO: 34912462 NR Description: MtN3-like protein [Oryza sativa (japonica
  misc_feature (83)..(266): Homolog of NCBI NO: 15238678 NR Description: MtN3 protein-like; protein id: At5g53190.1
  misc_feature (83)..(290): Homolog of NCBI NO: 34912454 NR Description: P0681B11.31 [Oryza sativa (japonica
  misc_feature (83)..(266): Homolog of NCBI NO: 34146818 NR Description: At5g53190 [Arabidopsis thaliana]
  misc_feature (83)..(266): Homolog of NCBI NO: 18394992 NR Description: expressed protein
  misc_feature (76)..(266): Homolog of NCBI NO: 34907420 NR Description: P0018C10.36 [Oryza sativa (japonica
  misc_feature (73)..(250): Homolog of NCBI NO: 34911484 NR Description: putative MtN3 [Oryza sativa (japonica
  misc_feature (67)..(268): Homolog of NCBI NO: 18400517 NR Description: expressed protein
KQHGQHAEQNSEILKSPPRLVTAPPPLLPAVLLLLIVIGIQIRAEHSRAAGKGGRTTMDWDAPALTSFVADLSFRHLCCYGAGIAGNAFAFVLFVSPLPTFKRIVRNGSTEQFSCTPYIYSLLNCLICMWYGLPFVSYGVVLVATVNSIGAVFQLAYTAVFIAFADAKQRLKVSALLAAVFLVFGLIVFVSLALLDHKARQVFVGYLSVASLVCMFASPMSIVNLVIRTKSVEYMPFYLSLSMFLMSASFVIYGVLLGDGFIYIPNALEPYWVSYSCCCMPTSERDQARKPSCPY

SEQ ID NO: 17811 - protein, 238 aa, Zea mays subsp. mays
  peptide (1)..(238): Ceres Seq. ID no. 12417445
  misc_feature (25)..(111): Pfam Name: MtN3/saliva family Pfam Description: MtN3/saliva family
  misc_feature (25)..(211): Homolog of NCBI NO: 18405611 NR Description: Expressed protein
  misc_feature (26)..(211): Homolog of NCBI NO: 18413388 NR Description: putative protein
  misc_feature (26)..(233): Homolog of NCBI NO: 34912462 NR Description: MtN3-like protein [Oryza sativa (japonica
  misc_feature (26)..(209): Homolog of NCBI NO: 15238678 NR Description: MtN3 protein-like; protein id: At5g53190.1
  misc_feature (26)..(233): Homolog of NCBI NO: 34912454 NR Description: P0681B11.31 [Oryza sativa (japonica
  misc_feature (26)..(209): Homolog of NCBI NO: 34146818 NR Description: At5g53190 [Arabidopsis thaliana]
  misc_feature (26)..(209): Homolog of NCBI NO: 18394992 NR Description: expressed protein
  misc_feature (19)..(209): Homolog of NCBI NO: 34907420 NR Description: P0018C10.36 [Oryza sativa (japonica
  misc_feature (16)..(193): Homolog of NCBI NO: 34911484 NR Description: putative MtN3 [Oryza sativa (japonica
  misc_feature (10)..(211): Homolog of NCBI NO: 18400517 NR Description: expressed protein
MDWDAPALTSFVADLSFRHLCCYGAGIAGNAFAFVLFVSPLPTFKRIVRNGSTEQFSCTPYIYSLLNCLICMWYGLPFVSYGVVLVATVNSIGAVFQLAYTAVFIAFADAKQRLKVSALLAAVFLVFGLIVFVSLALLDHKARQVFVGYLSVASLVCMFASPMSIVNLVIRTKSVEYMPFYLSLSMFLMSASFVIYGVLLGDGFIYIPNALEPYWVSYSCCCMPTSERDQARKPSCPY

SEQ ID NO: 17812 - protein, 190 aa, Zea mays subsp. mays
  peptide (1)..(190): Ceres Seq. ID no. 12417446
KAARATRRAKQRNPQIPTPAGDGAAPAAACGPASANSNRYSDSSRALPCCRQGRTHHHGLGCSGIDELRRRLVLPPPLLLRGRNRRERLRLRALRLPAPHIQEDRPQRIHGAVLVHAVHLLAAQLPHLHVVRPPLRLLRRRPRRHRQLHRRRVPARLHRRVHRLRRRQAEAQGLCSPGRCLPGVRTDCVC

SEQ ID NO: 17813 - DNA, 1163 bp, Zea mays subsp. mays
  misc_feature (1)..(1163): Ceres Seq. ID no. 12391908
  misc_feature: MA Experiment ID: 108534 Result: Down-regulated in Transcription
  misc_feature: MA Experiment 108534 PARAMETER Experiment Name: Zm_4deg_Cold_P Parameter: Age (hr) Value: 8
  misc_feature: MA Experiment 108534 PARAMETER Experiment Name: Zm_4deg_Cold_P Parameter: Organism Value: Zea mays
  misc_feature: MA Experiment 108534 PARAMETER Experiment Name: Zm_4deg_Cold_P Parameter: Plant Line Value: 35A19
  misc_feature: MA Experiment 108534 PARAMETER Experiment Name: Zm_4deg_Cold_P Parameter: Temperature (deg C) Value: 4 vs. 22
  misc_feature: MA Experiment 108534 PARAMETER Experiment Name: Zm_4deg_Cold_P Parameter: Timepoint (hr) Value: 6
  misc_feature: MA Experiment 108534 PARAMETER Experiment Name: Zm_4deg_Cold_P Parameter: Tissue Value: Aerial
acaggctcccagcagctcgattcgctcgcctagtcgccttctcgaattctcccgcaaacttgacgctgaagcctgcacgagaggacatggccatggccacgcgtgtcacggcagcagcggtcgtcctccgggttctctcgttgctgatcctgctgcgcacgggcacgtgcgccgacgactactcggcgttcgtgtacgcggggtgctcgcagggccgctacagcgccgattcgcagtacgcgtcgggggtggactccgtgctcacctcggtcgccagcagcgcgccgtacgccccctacgacaacttcacctcgccgaccgactcgtccgtggtcggcctctaccagtgccgctccgacctccccgcctccgtctgcagcggctgcgtccgctccgccatctccaggctctcctctctctgcgcctgggcggtcggcggcgcggtgcagctgcgggcctgcttcgtgcgatacgggaacgactcgttcctggggaagcaggacacgncggtgctgttcaagaaatgcggcggcacgcccggggacgccggcggggtggccatgagggactcggcgctcggcgcgctcgtggccgcgncggcgccggcgggcggagggttccgcaccggagggtccggcgccgtgcaggccatgtcgcagtgcgtgggggacctcggcgccaagccctgctccgantgcgtctcggccgcgnccgcacagctcaaggccgggtgcggttacgccacggccggcgaggtctacctcggcaagtgctacgcgcgcttctgggccaacggtggcggaggtttcagtagcagcagcagcagcgccggccggcatggatttcgtctagtccacgtggtcgccgccggtttattcttcccctccttggcttatgcctcacttgccatataggtattgttgcaccgtgcggtgatgttgagactggagcagtagctatgctgtgttttgtcatcatgcttgagatttacagctcagtttttgctcttgtgctcaaactcaaatggtgttcatgtagcttaactctgtctctttctttctcaagtcttataactgtaaatttcttacgtcgtatgcatgcaaactatgctaaatcatgtataagtaatctttttactacagcttaccaccattattaatctt

SEQ ID NO: 17814 - protein, 303 aa, Zea mays subsp. mays
  peptide (1)..(303): Ceres Seq. ID no. 12391909
  misc_feature (110)..(164): Pfam Name: Domain of unknown function DUF26 Pfam Description: Domain of unknown function DUF26
  misc_feature (63)..(274): Homolog of NCBI NO: 15232412 NR Description: secretory protein - like; protein id: At3g60720.1
  misc_feature (36)..(280): Homolog of NCBI NO: 25406066 NR Description: unknown protein F5A18.13 [imported] - Arabidopsis
  misc_feature (36)..(280): Homolog of NCBI NO: 18409653 NR Description: expressed protein
  misc_feature (36)..(280): Homolog of NCBI NO: 21593606 NR Description: unknown [Arabidopsis thaliana]
  misc_feature (29)..(265): Homolog of NCBI NO: 38567870 NR Description: OSJNBa0091D06.12 [Oryza sativa (japonica
  misc_feature (51)..(272): Homolog of NCBI NO: 9757976 NR Description: contains similarity to secretory
  misc_feature (44)..(266): Homolog of NCBI NO: 25410919 NR Description: hypothetical protein At2g01660 [imported] -
  misc_feature (44)..(266): Homolog of NCBI NO: 18379273 NR Description: expressed protein
  misc_feature (44)..(266): Homolog of NCBI NO: 21554153 NR Description: unknown [Arabidopsis thaliana]
  misc_feature (51)..(303): Homolog of NCBI NO: 30693130 NR Description: expressed protein [Arabidopsis thaliana]
  misc_feature (169)..(169): Xaa is any aa, unknown or other
  misc_feature (199)..(199): Xaa is any aa, unknown or other
  misc_feature (231)..(231): Xaa is any aa, unknown or other
  misc_feature (237)..(237): Xaa is any aa, unknown or other
RLPAARFARLVAFSNSPANLTLKPAREDMAMATRVTAAAVVLRVLSLLILLRTGTCADDYSAFVYAGCSQGRYSADSQYASGVDSVLTSVASSAPYAPYDNFTSPTDSSVVGLYQCRSDLPASVCSGCVRSAISRLSSLCAWAVGGAVQLRACFVRYGNDSFLGKQDTXVLFKKCGGTPGDAGGVAMRDSALGALVAAXAPAGGGFRTGGSGAVQAMSQCVGDLGAKPCSXCVSAAXAQLKAGCGYATAGEVYLGKCYARFWANGGGGFSSSSSSAGRHGFRLVHVVAAGLFFPSLAYASLAI

SEQ ID NO: 17815 - protein, 275 aa, Zea mays subsp. mays
  peptide (1)..(275): Ceres Seq. ID no. 12391910
  misc_feature (82)..(136): Pfam Name: Domain of unknown function DUF26 Pfam Description: Domain of unknown function DUF26
  misc_feature (35)..(246): Homolog of NCBI NO: 15232412 NR Description: secretory protein - like; protein id: At3g60720.1
  misc_feature (8)..(252): Homolog of NCBI NO: 25406066 NR Description: unknown protein F5A18.13 [imported] - Arabidopsis
  misc_feature (8)..(252): Homolog of NCBI NO: 18409653 NR Description: expressed protein
  misc_feature (8)..(252): Homolog of NCBI NO: 21593606 NR Description: unknown [Arabidopsis thaliana]
  misc_feature (1)..(237): Homolog of NCBI NO: 38567870 NR Description: OSJNBa0091D06.12 [Oryza sativa (japonica
  misc_feature (23)..(244): Homolog of NCBI NO: 9757976 NR Description: contains similarity to secretory
  misc_feature (16)..(238): Homolog of NCBI NO: 25410919 NR Description: hypothetical protein At2g01660 [imported] -
  misc_feature (16)..(238): Homolog of NCBI NO: 18379273 NR Description: expressed protein
  misc_feature (16)..(238): Homolog of NCBI NO: 21554153 NR Description: unknown [Arabidopsis thaliana]
  misc_feature (23)..(275): Homolog of NCBI NO: 30693130 NR Description: expressed protein [Arabidopsis thaliana]
  misc_feature (141)..(141): Xaa is any aa, unknown or other
  misc_feature (171)..(171): Xaa is any aa, unknown or other
  misc_feature (203)..(203): Xaa is any aa, unknown or other
  misc_feature (209)..(209): Xaa is any aa, unknown or other
MAMATRVTAAAVVLRVLSLLILLRTGTCADDYSAFVYAGCSQGRYSADSQYASGVDSVLTSVASSAPYAPYDNFTSPTDSSVVGLYQCRSDLPASVCSGCVRSAISRLSSLCAWAVGGAVQLRACFVRYGNDSFLGKQDTXVLFKKCGGTPGDAGGVAMRDSALGALVAAXAPAGGGFRTGGSGAVQAMSQCVGDLGAKPCSXCVSAAXAQLKAGCGYATAGEVYLGKCYARFWANGGGGFSSSSSSAGRHGFRLVHVVAAGLFFPSLAYASLAI

SEQ ID NO: 17816 - protein, 273 aa, Zea mays subsp. mays
  peptide (1)..(273): Ceres Seq. ID no. 12391911
  misc_feature (80)..(134): Pfam Name: Domain of unknown function DUF26 Pfam Description: Domain of unknown function DUF26
  misc_feature (33)..(244): Homolog of NCBI NO: 15232412 NR Description: secretory protein - like; protein id: At3g60720.1
  misc_feature (6)..(250): Homolog of NCBI NO: 25406066 NR Description: unknown protein F5A18.13 [imported] - Arabidopsis
  misc_feature (6)..(250): Homolog of NCBI NO: 18409653 NR Description: expressed protein
  misc_feature (6)..(250): Homolog of NCBI NO: 21593606 NR Description: unknown [Arabidopsis thaliana]
  misc_feature (1)..(235): Homolog of NCBI NO: 38567870 NR Description: OSJNBa0091D06.12 [Oryza sativa (japonica
  misc_feature (21)..(242): Homolog of NCBI NO: 9757976 NR Description: contains similarity to secretory
  misc_feature (14)..(236): Homolog of NCBI NO: 25410919 NR Description: hypothetical protein At2g01660 [imported] -
  misc_feature (14)..(236): Homolog of NCBI NO: 18379273 NR Description: expressed protein
  misc_feature (14)..(236): Homolog of NCBI NO: 21554153 NR Description: unknown [Arabidopsis thaliana]
  misc_feature (21)..(273): Homolog of NCBI NO: 30693130 NR Description: expressed protein [Arabidopsis thaliana]
  misc_feature (139)..(139): Xaa is any aa, unknown or other
  misc_feature (169)..(169): Xaa is any aa, unknown or other
  misc_feature (201)..(201): Xaa is any aa, unknown or other
  misc_feature (207)..(207): Xaa is any aa, unknown or other
MATRVTAAAVVLRVLSLLILLRTGTCADDYSAFVYAGCSQGRYSADSQYASGVDSVLTSVASSAPYAPYDNFTSPTDSSVVGLYQCRSDLPASVCSGCVRSAISRLSSLCAWAVGGAVQLRACFVRYGNDSFLGKQDTXVLFKKCGGTPGDAGGVAMRDSALGALVAAXAPAGGGFRTGGSGAVQAMSQCVGDLGAKPCSXCVSAAXAQLKAGCGYATAGEVYLGKCYARFWANGGGGFSSSSSSAGRHGFRLVHVVAAGLFFPSLAYASLAI

SEQ ID NO: 17817 - DNA, 1268 bp, Zea mays subsp. mays
  misc_feature (1)..(1268): Ceres Seq. ID no. 12361287
  misc_feature: MA Experiment ID: 108504 Result: Down-regulated in Transcription
  misc_feature: MA Experiment 108504 PARAMETER Experiment Name: Zm_Drought_P Parameter: Age (day) Value: 8
  misc_feature: MA Experiment 108504 PARAMETER Experiment Name: Zm_Drought_P Parameter: Organism Value: Zea mays
  misc_feature: MA Experiment 108504 PARAMETER Experiment Name: Zm_Drought_P Parameter: Plant Line Value: 35A19
  misc_feature: MA Experiment 108504 PARAMETER Experiment Name: Zm_Drought_P Parameter: Timepoint (hr) Value: 12
  misc_feature: MA Experiment 108504 PARAMETER Experiment Name: Zm_Drought_P Parameter: Tissue Value: Aerial
  misc_feature: MA Experiment 108504 PARAMETER Experiment Name: Zm_Drought_P Parameter: Treatment Value: Drought vs. No Drought
  misc_feature: MA Experiment ID: 108522 Result: Down-regulated in Transcription
  misc_feature: MA Experiment 108522 PARAMETER Experiment Name: Zm_42deg_Heat_P Parameter: Age (day) Value: 8
  misc_feature: MA Experiment 108522 PARAMETER Experiment Name: Zm_42deg_Heat_P Parameter: Organism Value: Zea mays
  misc_feature: MA Experiment 108522 PARAMETER Experiment Name: Zm_42deg_Heat_P Parameter: Plant Line Value: 35A19
  misc_feature: MA Experiment 108522 PARAMETER Experiment Name: Zm_42deg_Heat_P Parameter: Temperature (deg C) Value: 42 vs. 22
  misc_feature: MA Experiment 108522 PARAMETER Experiment Name: Zm_42deg_Heat_P Parameter: Timepoint (hr) Value: 1
  misc_feature: MA Experiment 108522 PARAMETER Experiment Name: Zm_42deg_Heat_P Parameter: Tissue Value: Aerial
  misc_feature: MA Experiment ID: 108523 Result: Down-regulated in Transcription
  misc_feature: MA Experiment 108523 PARAMETER Experiment Name: Zm_42deg_Heat_P Parameter: Age (day) Value: 8
  misc_feature: MA Experiment 108523 PARAMETER Experiment Name: Zm_42deg_Heat_P Parameter: Organism Value: Zea mays
  misc_feature: MA Experiment 108523 PARAMETER Experiment Name: Zm_42deg_Heat_P Parameter: Plant Line Value: 35A19
  misc_feature: MA Experiment 108523 PARAMETER Experiment Name: Zm_42deg_Heat_P Parameter: Temperature (deg C) Value: 42 vs. 22
  misc_feature: MA Experiment 108523 PARAMETER Experiment Name: Zm_42deg_Heat_P Parameter: Timepoint (hr) Value: 6
  misc_feature: MA Experiment 108523 PARAMETER Experiment Name: Zm_42deg_Heat_P Parameter: Tissue Value: Aerial
  misc_feature: MA Experiment ID: 108530 Result: Up-regulated in Transcription
  misc_feature: MA Experiment 108530 PARAMETER Experiment Name: Zm_Imbibed_Seeds_P Parameter: Age (day) Value: 6 vs. 2
  misc_feature: MA Experiment 108530 PARAMETER Experiment Name: Zm_Imbibed_Seeds_P Parameter: Organism Value: Zea mays
  misc_feature: MA Experiment 108530 PARAMETER Experiment Name: Zm_Imbibed_Seeds_P Parameter: Plant Line Value: 35A19
  misc_feature: MA Experiment 108530 PARAMETER Experiment Name: Zm_Imbibed_Seeds_P Parameter: Tissue Value: Aerial vs. Embryo
  misc_feature: MA Experiment ID: 108535 Result: Down-regulated in Transcription
  misc_feature: MA Experiment 108535 PARAMETER Experiment Name: Zm_Meristem_P Parameter: Age (day) Value: 8
  misc_feature: MA Experiment 108535 PARAMETER Experiment Name: Zm_Meristem_P Parameter: Organism Value: Zea mays
  misc_feature: MA Experiment 108535 PARAMETER Experiment Name: Zm_Meristem_P Parameter: Plant Line Value: 35A19
  misc_feature: MA Experiment 108535 PARAMETER Experiment Name: Zm_Meristem_P Parameter: Tissue Value: Root Meristem vs. Above Root Meristem
  misc_feature: MA Experiment ID: 108544 Result: Up-regulated in Transcription
  misc_feature: MA Experiment ID: 108687 Result: Down-regulated in Transcription
  misc_feature: MA Experiment 108687 PARAMETER Experiment Name: Zm_Embryos-Flowers__P Parameter: Tissue Value: Embryo vs. Aerial+
  misc_feature: MA Experiment ID: 108689 Result: Down-regulated in Transcription
  misc_feature: MA Experiment 108689 PARAMETER Experiment Name: Zm_Drought_Roots_P Parameter: Age (day) Value: 9
  misc_feature: MA Experiment 108689 PARAMETER Experiment Name: Zm_Drought_Roots_P Parameter: Organism Value: Zea mays
  misc_feature: MA Experiment 108689 PARAMETER Experiment Name: Zm_Drought_Roots_P Parameter: Plant Line Value: 35A19
  misc_feature: MA Experiment 108689 PARAMETER Experiment Name: Zm_Drought_Roots_P Parameter: Timepoint (hr) Value: 24
  misc_feature: MA Experiment 108689 PARAMETER Experiment Name: Zm_Drought_Roots_P Parameter: Tissue Value: Roots
  misc_feature: MA Experiment 108689 PARAMETER Experiment Name: Zm_Drought_Roots_P Parameter: Treatment Value: Drought vs. No Drought
  misc_feature: MA Experiment ID: 20000535 Result: Down-regulated in Transcription
  misc_feature: MA Experiment 20000535 PARAMETER Experiment Name: Zm_Hybrid_Seed_Dev_P Parameter: DAP Value: 30 vs. 12
  misc_feature: MA Experiment 20000535 PARAMETER Experiment Name: Zm_Hybrid_Seed_Dev_P Parameter: Organism Value: Zea mays
  misc_feature: MA Experiment 20000535 PARAMETER Experiment Name: Zm_Hybrid_Seed_Dev_P Parameter: Plant Line Value: 35A19
  misc_feature: MA Experiment 20000535 PARAMETER Experiment Name: Zm_Hybrid_Seed_Dev_P Parameter: Tissue Value: Embryo vs. Unfert Floret
gcacgagaccattacctagaacatcctaatcaaaaaattaaaccatcgaacattctccttggcgaaggctatcatgcaaaattgtccgactttggacttgctaagcttggtcctgtaggcgacaagactcatgtgacaacacgcgttatggggacacatggttattgtgctcctgaatatgccttagctggacagctgacagtgaagtctgacatctatagttttggcgtcgttttccttgagctaattacaggtcgaagaccacaagacactgatcggcctcctgaggaacaagacctagttgcatgggctcgtccattgttcaaagaccaaaagaagtttcgcaagatggctgatccttcgttgtgtggccgcttcccaaagaggggtttattccaggcactagctattgcagcaatgtgtttgcaggagaaggcaaaaagccgacctcccatgagggaagttgccgcagctctctcttatttagcatcacaagcatacgacaggaacaacaacgctgctgctcatcgtaatcgtgccgggccttcaacaccgagagttctggacgaccagattggccaggacacctgcacattggctaatcaacagggagctcagatgtccatgcatgtcgggacagaccacgccatgcctgaagtgaaggaagcttcctgtagtggttcacatcgtggaggacggggcagggttaccccgaatggcgctgatagggagcgtgcacttgcggacgccaacgtgtgggccgaggcttggaggcgccaggagaaggcaagcaagatgcgatagcgaccagagcctgactgcatgagttttgacatgtcactgcaaagatgcttactttgcatacattttgaaagagaactgtgggctacacgaagggttgttagaatagaaagaggaataatgcgcagtggaaatgtagagcttcaccagagtgagcgcttcgaagatttcaccggtgaatctacagtactcagacttgtttcagtgcgtacatggatttagcttactttatacacagacacttcacactccatagatgcatgtaatagctcaataataggcacagtagactacacaatctgtctgtagttcagcggttttggaaaattaataacataggatccgccgttaggttgcatgaaatgctatgatccgttggcgggtcttgcattctctattgggtcaacgtctacatatttgtacatcgttcaaccatttacatgatgaaatatacaattaagacttct

SEQ ID NO: 17818 - protein, 267 aa, Zea mays subsp. mays
  peptide (1)..(267): Ceres Seq. ID no. 12361288
  misc_feature (13)..(185): Homolog of NCBI NO: 10445209 NR Description: protein serine/threonine kinase BNK1 [Brassica
  misc_feature (14)..(179): Homolog of NCBI NO: 15240038 NR Description: protein kinase-like
  misc_feature (13)..(187): Homolog of NCBI NO: 34394036 NR Description: putative protein serine/threonine kinase BNK1
  misc_feature (14)..(240): Homolog of NCBI NO: 34899302 NR Description: putative protein serine/threonine kinase
  misc_feature (14)..(240): Homolog of NCBI NO: 34395193 NR Description: putative protein serine/threonine kinase
  misc_feature (13)..(249): Homolog of NCBI NO: 15238886 NR Description: protein kinase -like protein; protein id:
  misc_feature (232)..(261): Homolog of NCBI NO: 34907210 NR Description: putative serine/threonine kinase PBS1 protein
  misc_feature (14)..(186): Homolog of NCBI NO: 34907210 NR Description: putative serine/threonine kinase PBS1 protein
  misc_feature (13)..(267): Homolog of NCBI NO: 34902958 NR Description: putative protein kinase [Oryza sativa (japonica
  misc_feature (13)..(194): Homolog of NCBI NO: 7573596 NR Description: protein kinase 1 [Populus nigra]
ARDHYLEHPNQKIKPSNILLGEGYHAKLSDFGLAKLGPVGDKTHVTTRVMGTHGYCAPEYALAGQLTVKSDIYSFGVVFLELITGRRPQDTDRPPEEQDLVAWARPLFKDQKKFRKMADPSLCGRFPKRGLFQALAIAAMCLQEKAKSRPPMREVAAALSYLASQAYDRNNNAAAHRNRAGPSTPRVLDDQIGQDTCTLANQQGAQMSMHVGTDHAMPEVKEASCSGSHRGGRGRVTPNGADRERALADANVWAEAWRRQEKASKMR

SEQ ID NO: 17819 - protein, 218 aa, Zea mays subsp. mays
  peptide (1)..(218): Ceres Seq. ID no. 12361289
  misc_feature (1)..(218): Homolog of NCBI NO: 34902958 NR Description: putative protein kinase [Oryza sativa (japonica
  misc_feature (1)..(145): Homolog of NCBI NO: 7573596 NR Description: protein kinase 1 [Populus nigra]
  misc_feature (1)..(136): Homolog of NCBI NO: 10445209 NR Description: protein serine/threonine kinase BNK1 [Brassica
  misc_feature (1)..(130): Homolog of NCBI NO: 15240038 NR Description: protein kinase-like
  misc_feature (1)..(138): Homolog of NCBI NO: 34394036 NR Description: putative protein serine/threonine kinase BNK1
  misc_feature (1)..(191): Homolog of NCBI NO: 34899302 NR Description: putative protein serine/threonine kinase
  misc_feature (1)..(191): Homolog of NCBI NO: 34395193 NR Description: putative protein serine/threonine kinase
  misc_feature (1)..(200): Homolog of NCBI NO: 15238886 NR Description: protein kinase -like protein; protein id:
  misc_feature (183)..(212): Homolog of NCBI NO: 34907210 NR Description: putative serine/threonine kinase PBS1 protein
  misc_feature (1)..(137): Homolog of NCBI NO: 34907210 NR Description: putative serine/threonine kinase PBS1 protein
MGTHGYCAPEYALAGQLTVKSDIYSFGVVFLELITGRRPQDTDRPPEEQDLVAWARPLFKDQKKFRKMADPSLCGRFPKRGLFQALAIAAMCLQEKAKSRPPMREVAAALSYLASQAYDRNNNAAAHRNRAGPSTPRVLDDQIGQDTCTLANQQGAQMSMHVGTDHAMPEVKEASCSGSHRGGRGRVTPNGADRERALADANVWAEAWRRQEKASKMR

SEQ ID NO: 17820 - protein, 151 aa, Zea mays subsp. mays
  peptide (1)..(151): Ceres Seq. ID no. 12361290
  misc_feature (1)..(78): Homolog of NCBI NO: 7573596 NR Description: protein kinase 1 [Populus nigra]
  misc_feature (1)..(69): Homolog of NCBI NO: 10445209 NR Description: protein serine/threonine kinase BNK1 [Brassica
  misc_feature (1)..(63): Homolog of NCBI NO: 15240038 NR Description: protein kinase-like
  misc_feature (1)..(71): Homolog of NCBI NO: 34394036 NR Description: putative protein serine/threonine kinase BNK1
  misc_feature (1)..(124): Homolog of NCBI NO: 34899302 NR Description: putative protein serine/threonine kinase
  misc_feature (1)..(124): Homolog of NCBI NO: 34395193 NR Description: putative protein serine/threonine kinase
  misc_feature (1)..(133): Homolog of NCBI NO: 15238886 NR Description: protein kinase -like protein; protein id:
  misc_feature (116)..(145): Homolog of NCBI NO: 34907210 NR Description: putative serine/threonine kinase PBS1 protein
  misc_feature (1)..(70): Homolog of NCBI NO: 34907210 NR Description: putative serine/threonine kinase PBS1 protein
  misc_feature (1)..(151): Homolog of NCBI NO: 34902958 NR Description: putative protein kinase [Oryza sativa (japonica
MADPSLCGRFPKRGLFQALAIAAMCLQEKAKSRPPMREVAAALSYLASQAYDRNNNAAAHRNRAGPSTPRVLDDQIGQDTCTLANQQGAQMSMHVGTDHAMPEVKEASCSGSHRGGRGRVTPNGADRERALADANVWAEAWRRQEKASKMR

SEQ ID NO: 17821 - DNA, 1045 bp, Zea mays subsp. mays
  misc_feature (1)..(1045): Ceres Seq. ID no. 15180507
  misc_feature: MA Experiment ID: 108535 Result: Up-regulated in Transcription
  misc_feature: MA Experiment 108535 PARAMETER Experiment Name: Zm_Meristem_P Parameter: Age (day) Value: 8
  misc_feature: MA Experiment 108535 PARAMETER Experiment Name: Zm_Meristem_P Parameter: Organism Value: Zea mays
  misc_feature: MA Experiment 108535 PARAMETER Experiment Name: Zm_Meristem_P Parameter: Plant Line Value: 35A19
  misc_feature: MA Experiment 108535 PARAMETER Experiment Name: Zm_Meristem_P Parameter: Tissue Value: Root Meristem vs. Above Root Meristem
  misc_feature: MA Experiment ID: 108556 Result: Down-regulated in Transcription
  misc_feature: MA Experiment 108556 PARAMETER Experiment Name: Zm_Drought_P Parameter: Age (day) Value: 9
  misc_feature: MA Experiment 108556 PARAMETER Experiment Name: Zm_Drought_P Parameter: Organism Value: Zea mays
  misc_feature: MA Experiment 108556 PARAMETER Experiment Name: Zm_Drought_P Parameter: Plant Line Value: 35A19
  misc_feature: MA Experiment 108556 PARAMETER Experiment Name: Zm_Drought_P Parameter: Timepoint (hr) Value: 24
  misc_feature: MA Experiment 108556 PARAMETER Experiment Name: Zm_Drought_P Parameter: Tissue Value: Aerial
  misc_feature: MA Experiment 108556 PARAMETER Experiment Name: Zm_Drought_P Parameter: Treatment Value: Drought vs. No Drought
  misc_feature: MA Experiment ID: 20000108 Result: Up-regulated in Transcription
  misc_feature: MA Experiment 20000108 PARAMETER Experiment Name: Zm_Root-Tips_P Parameter: Age (day) Value: 12
  misc_feature: MA Experiment 20000108 PARAMETER Experiment Name: Zm_Root-Tips_P Parameter: Organism Value: Zea mays
  misc_feature: MA Experiment 20000108 PARAMETER Experiment Name: Zm_Root-Tips_P Parameter: Tissue Value: Root tips vs. Root mid region    35
  misc_feature: MA Experiment 20000108 PARAMETER Experiment Name: Zm_Root-Tips_P Parameter: Tissue Value: Root tips vs. Root mid region   Sequence Listing-Misc Features (4)
  misc_feature: MA Experiment ID: 20000478 Result: Down-regulated in Transcription
  misc_feature: MA Experiment 20000478 PARAMETER Experiment Name: Zm_5mM_SA_P Parameter: Age (day) Value: 11
  misc_feature: MA Experiment 20000478 PARAMETER Experiment Name: Zm_5mM_SA_P Parameter: Organism Value: Zea mays
  misc_feature: MA Experiment 20000478 PARAMETER Experiment Name: Zm_5mM_SA_P Parameter: Plant Line Value: 35A19
  misc_feature: MA Experiment 20000478 PARAMETER Experiment Name: Zm_5mM_SA_P Parameter: Timepoint (hr) Value: 72
  misc_feature: MA Experiment 20000478 PARAMETER Experiment Name: Zm_5mM_SA_P Parameter: Tissue Value: Aerial
  misc_feature: MA Experiment 20000478 PARAMETER Experiment Name: Zm_5mM_SA_P Parameter: Treatment Value: 5mM SA vs. No Treatment
  misc_feature: MA Experiment ID: 20000479 Result: Down-regulated in Transcription
  misc_feature: MA Experiment 20000479 PARAMETER Experiment Name: Zm_Drought_P Parameter: Age (day) Value: 10
  misc_feature: MA Experiment 20000479 PARAMETER Experiment Name: Zm_Drought_P Parameter: Organism Value: Zea mays
  misc_feature: MA Experiment 20000479 PARAMETER Experiment Name: Zm_Drought_P Parameter: Plant Line Value: 35A19
  misc_feature: MA Experiment 20000479 PARAMETER Experiment Name: Zm_Drought_P Parameter: Timepoint (hr) Value: 48
  misc_feature: MA Experiment 20000479 PARAMETER Experiment Name: Zm_Drought_P Parameter: Tissue Value: Aerial
  misc_feature: MA Experiment 20000479 PARAMETER Experiment Name: Zm_Drought_P Parameter: Treatment Value: Drought vs. No Drought
  misc_feature: MA Experiment ID: 20000487 Result: Up-regulated in Transcription
  misc_feature: MA Experiment 20000487 PARAMETER Experiment Name: Zm_50mM_NH4NO3_L_to_H_P Parameter: Organism Value: Zea mays
  misc_feature: MA Experiment 20000487 PARAMETER Experiment Name: Zm_50mM_NH4NO3_L_to_H_P Parameter: Timepoint (hr) Value: 4
  misc_feature: MA Experiment 20000487 PARAMETER Experiment Name: Zm_50mM_NH4NO3_L_to_H_P Parameter: Tissue Value: Leaves
  misc_feature: MA Experiment 20000487 PARAMETER Experiment Name: Zm_50mM_NH4NO3_L_to_H_P Parameter: Treatment Value: 50mM NH4NO3 vs. 100mM Mannitol
  misc_feature: MA Experiment ID: 20000488 Result: Up-regulated in Transcription
  misc_feature: MA Experiment 20000488 PARAMETER Experiment Name: Zm_50mM_NH4NO3_L_to_H_P Parameter: Organism Value: Zea mays
  misc_feature: MA Experiment 20000488 PARAMETER Experiment Name: Zm_50mM_NH4NO3_L_to_H_P Parameter: Timepoint (hr) Value: 8
  misc_feature: MA Experiment 20000488 PARAMETER Experiment Name: Zm_50mM_NH4NO3_L_to_H_P Parameter: Tissue Value: Leaves
  misc_feature: MA Experiment 20000488 PARAMETER Experiment Name: Zm_50mM_NH4NO3_L_to_H_P Parameter: Treatment Value: 50mM NH4NO3 vs. 100mM Mannitol
  misc_feature: MA Experiment ID: 20000492 Result: Up-regulated in Transcription
  misc_feature: MA Experiment 20000492 PARAMETER Experiment Name: Zm_Hybrid_Seed_Dev_P Parameter: DAP Value: 12
  misc_feature: MA Experiment 20000492 PARAMETER Experiment Name: Zm_Hybrid_Seed_Dev_P Parameter: Organism Value: Zea mays
  misc_feature: MA Experiment 20000492 PARAMETER Experiment Name: Zm_Hybrid_Seed_Dev_P Parameter: Plant Line Value: 35A19
  misc_feature: MA Experiment 20000492 PARAMETER Experiment Name: Zm_Hybrid_Seed_Dev_P Parameter: Tissue Value: Fert Kernel vs. Unfert Floret
acccaatgtcgcgtgcggccactagatttttcctgacgcggtgtctgctcccacttcccctcctctcccccaggtggcggcagcggcggcggggtagcatttgtgctacgagggcttttgcaatggcggcttcggggttcggcggcggcgaggcgttccggctctcggccgcaccaggggccggcttactgaagctgcacaagggcgacatcaccctctggtccgtcgactgcgccaccgacgccatcgttaatgctgctaatgagcgaatgttaggtggcggaggtgttgatggagctatacatcaagctgctggaccagagctagtgcaagcatgccggaaagttccagaggtcaaaccaggtaagcaggagcgtccaccccagccgccgccatgaagcgcaacccccgcgtcacgagctcccgccggaagtgccgcaaggcgcacttcacggccccgtcctccgtccgccgcgtgctcatgtccgcggcgctatcgacggagctccgccacaagtacaatgtgcgttccatcccgatccgcaaggacgacgaggtgcaggtcgtgcgcggcacctacaagggccgtgagggcaaagtggtgcaggtgtaccgccgtcgctgggtcatccacgtcgagcggatcacccgcgagaaggtgaacggctccaccgtgaacgtgggcatccacccttccaaggtgatggttacaaagctgaagcttgacaaggaccgcaaggctctcctcgaccgcaaggcccggggccgcgccgccgacaaggctaagggcaagtttactgccgacgacgtcgccgccgctgctggtggcgccgccgccactggcgcgtctctccaggagatcgactaggcgcttcgcggggatctgatggtggtcctaccgcctattactccttatcgctctagtttttgctatcaatgattatgtgctaggagttttatgttacttataaactgctttgagcctcgatgggagttgaacttaatgtggagtgtatctgagatatgaagaactcattatatggcc

SEQ ID NO: 17822 - protein, 157 aa, Zea mays subsp. mays
  peptide (1)..(157): Ceres Seq. ID no. 15180508
  misc_feature (49)..(82): Pfam Name: KOW motif Pfam Description: KOW motif
  misc_feature (1)..(139): Homolog of NCBI NO: 34851284 NR Description: similar to 60S ribosomal protein L26 [Rattus
  misc_feature (1)..(134): Homolog of NCBI NO: 7705813 NR Description: ribosomal protein L26-like 1
  misc_feature (1)..(139): Homolog of NCBI NO: 15293919 NR Description: ribosomal protein L26 [Ictalurus punctatus]
  misc_feature (1)..(139): Homolog of NCBI NO: 4506621 NR Description: ribosomal protein L26; 60S ribosomal protein L26
  misc_feature (1)..(143): Homolog of NCBI NO: 31207009 NR Description: ENSANGP00000022122 [Anopheles gambiae]
  misc_feature (1)..(139): Homolog of NCBI NO: 3914740 NR Description: 60S ribosomal protein L26
  misc_feature (1)..(139): Homolog of NCBI NO: 15240766 NR Description: 60S ribosomal protein L26 (RPL26B) [Arabidopsis
  misc_feature (1)..(139): Homolog of NCBI NO: 15229631 NR Description: 60S ribosomal protein L26 (RPL26A) [Arabidopsis
  misc_feature (1)..(119): Homolog of NCBI NO: 3747050 NR Description: ribosomal protein L26 [Zea mays]
  misc_feature (1)..(157): Homolog of NCBI NO: 34895672 NR Description: putative ribosomal protein L26
MKRNPRVTSSRRKCRKAHFTAPSSVRRVLMSAALSTELRHKYNVRSIPIRKDDEVQVVRGTYKGREGKVVQVYRRRWVIHVERITREKVNGSTVNVGIHPSKVMVTKLKLDKDRKALLDRKARGRAADKAKGKFTADDVAAAAGGAAATGASLQEID

SEQ ID NO: 17823 - protein, 131 aa, Zea mays subsp. mays
  peptide (1)..(131): Ceres Seq. ID no. 15180509
  misc_feature (63)..(118): Homolog of NCBI NO: 28899958 NR Description: hypothetical protein [Vibrio parahaemolyticus
  misc_feature (63)..(127): Homolog of NCBI NO: 17545053 NR Description: CONSERVED HYPOTHETICAL PROTEIN [Ralstonia
  misc_feature (63)..(121): Homolog of NCBI NO: 25453353 NR Description: Hypothetical protein XAC3343
  misc_feature (63)..(121): Homolog of NCBI NO: 21244068 NR Description: conserved hypothetical protein
  misc_feature (63)..(121): Homolog of NCBI NO: 21232613 NR Description: conserved hypothetical protein
  misc_feature (43)..(121): Homolog of NCBI NO: 25348551 NR Description: hypothetical protein At2g40600 [imported] -
  misc_feature (36)..(131): Homolog of NCBI NO: 23397339 NR Description: unknown protein [Arabidopsis thaliana]
  misc_feature (43)..(121): Homolog of NCBI NO: 20196872 NR Description: expressed protein [Arabidopsis thaliana]
  misc_feature (36)..(121): Homolog of NCBI NO: 30688336 NR Description: expressed protein [Arabidopsis thaliana]
  misc_feature (18)..(98): Homolog of NCBI NO: 38636779 NR Description: hypothetical protein [Oryza sativa (japonica
PMSRAATRFFLTRCLLPLPLLSPRWRQRRRGSICATRAFAMAASGFGGGEAFRLSAAPGAGLLKLHKGDITLWSVDCATDAIVNAANERMLGGGGVDGAIHQAAGPELVQACRKVPEVKPGKQERPPQPPP

SEQ ID NO: 17824 - protein, 130 aa, Zea mays subsp. mays
  peptide (1)..(130): Ceres Seq. ID no. 15180510
  misc_feature (62)..(117): Homolog of NCBI NO: 28899958 NR Description: hypothetical protein [Vibrio parahaemolyticus
  misc_feature (62)..(126): Homolog of NCBI NO: 17545053 NR Description: CONSERVED HYPOTHETICAL PROTEIN [Ralstonia
  misc_feature (62)..(120): Homolog of NCBI NO: 25453353 NR Description: Hypothetical protein XAC3343
  misc_feature (62)..(120): Homolog of NCBI NO: 21244068 NR Description: conserved hypothetical protein
  misc_feature (62)..(120): Homolog of NCBI NO: 21232613 NR Description: conserved hypothetical protein
  misc_feature (42)..(120): Homolog of NCBI NO: 25348551 NR Description: hypothetical protein At2g40600 [imported] -
  misc_feature (35)..(130): Homolog of NCBI NO: 23397339 NR Description: unknown protein [Arabidopsis thaliana]
  misc_feature (42)..(120): Homolog of NCBI NO: 20196872 NR Description: expressed protein [Arabidopsis thaliana]
  misc_feature (35)..(120): Homolog of NCBI NO: 30688336 NR Description: expressed protein [Arabidopsis thaliana]
  misc_feature (17)..(97): Homolog of NCBI NO: 38636779 NR Description: hypothetical protein [Oryza sativa (japonica
MSRAATRFFLTRCLLPLPLLSPRWRQRRRGSICATRAFAMAASGFGGGEAFRLSAAPGAGLLKLHKGDITLWSVDCATDAIVNAANERMLGGGGVDGAIHQAAGPELVQACRKVPEVKPGKQERPPQPPP

SEQ ID NO: 17825 - DNA, 1544 bp, Zea mays subsp. mays
  misc_feature (1)..(1544): Ceres Seq. ID no. 12435291
  misc_feature: MA Experiment ID: 108535 Result: Down-regulated in Transcription
  misc_feature: MA Experiment 108535 PARAMETER Experiment Name: Zm_Meristem_P Parameter: Age (day) Value: 8
  misc_feature: MA Experiment 108535 PARAMETER Experiment Name: Zm_Meristem_P Parameter: Organism Value: Zea mays
  misc_feature: MA Experiment 108535 PARAMETER Experiment Name: Zm_Meristem_P Parameter: Plant Line Value: 35A19
  misc_feature: MA Experiment 108535 PARAMETER Experiment Name: Zm_Meristem_P Parameter: Tissue Value: Root Meristem vs. Above Root Meristem
actttgtggcagacgaacagggaaagtgaaaaatcgctttcgcacaagtcgcggaacagaggcaagcgctgtgccacacagcgggagtcctccccgactccccgagagatttgctgcccagagccttcgaatcgggttcaatcccttcgatctttctgcccgccgccgccacgggactccagaagttgccttcgattcggccggggccgtggaagcggggatggggctcggagaggcggcggggcggctcctggcggccgtggactgggagcgcgaggcctaccctgcgtacgacgacttcctcgcgctccccgccttcgttctcttcttccctaccgtccgcttcctcctcgaccgcttcgtcttcaagtgggttgcaatgaggcttatacatgggcagggacatcagagagctaataatgaaacagaagaggcaaggaagaagataagaaaattcaaggaatcagcttggaaatgtgtttatttcctgtctggagagcttttatctttgtctgtcacatataatgagccttggttcaccaataccagatatttttgggtaggaccaggagaacaggtctggcctgaccaaaagataaaattgaaacttaaggctgtatatatgtatgctgctggattctacacatattccatatttgcacttatgttttgggaaacaaggcgttcagactttggagtgtcaatgtctcatcatgttgctactgttgttctgattgttctatcttacgtgttcagatttgctagagttggctctatagtattggcaattcatgatgcaagtgacgttttcctggaagtagggaagatgtccaagtacagccattgtgattggcttgccaatgtttcgtttctgttttttgttatttcgtgggttcttctccgcctcacatattttccgttctggattctgagaagtacaagctatgaggtcttgttgactttggacaaaaagaagcacaattttgatggtcctatatactattatgtgttcaattcccttctattttcactacttgttctccacatatattggtgggttttaatatatcggatgcttgtgagacaaatcaagacaagaaatgttggagatgatgttcgatctgattctgaaggagaagacgaccatgaagattgattgggggcatcatcttactttctgtgttataacggtgcttatacattcttttacttgattccaacattgttcctcacgagattcaccgaagccgggctacgggttacctgtgtcttggctgccaatttctgtgcattagaaacaacgctgcaatgcattagaaaaaagctggatgtcgaatataacattcttttcagtgttcacacaaagtgcagcggtaaatgtagcgccaatttagtattccggaaacaaaaggactggttgtaaatcaaagcctttctgccgacataccatgtacattctgtttgccaggatgacaccgcttggagttttgtgaacggtagcgctggccgccggtgaaacgcttctcttgagctcctgttgttcc

SEQ ID NO: 17826 - protein, 384 aa, Zea mays subsp. mays
  peptide (1)..(384): Ceres Seq. ID no. 12435292
  misc_feature (170)..(383): Pfam Name: Longevity-assurance protein (LAG1) Pfam Description: Longevity-assurance protein (LAG1)
  misc_feature (136)..(384): Homolog of NCBI NO: 27769146 NR Description: Similar to RIKEN cDNA 0610013I17 gene [Xenopus
  misc_feature (74)..(200): Homolog of NCBI NO: 8920562 NR Description: Contains similarity to LAG1 homolog 1 from
  misc_feature (95)..(380): Homolog of NCBI NO: 34901974 NR Description: unknown protein [Oryza sativa (japonica
  misc_feature (105)..(381): Homolog of NCBI NO: 7658241 NR Description: LAG1 homolog 2 [Arabidopsis thaliana]
  misc_feature (105)..(381): Homolog of NCBI NO: 15230323 NR Description: longevity factor-like protein
  misc_feature (74)..(315): Homolog of NCBI NO: 30683361 NR Description: longevity assurance protein -related [Arabidopsis
  misc_feature (83)..(384): Homolog of NCBI NO: 7688742 NR Description: ASC1 [Lycopersicon esculentum]
  misc_feature (74)..(384): Homolog of NCBI NO: 18404559 NR Description: expressed protein
  misc_feature (74)..(384): Homolog of NCBI NO: 25518747 NR Description: hypothetical protein F13B4.7 - Arabidopsis
  misc_feature (87)..(384): Homolog of NCBI NO: 16974114 NR Description: putative resistance protein [Lycopersicon
LCGRRTGKVKNRFRTSRGTEASAVPHSGSPPRLPERFAAQSLRIGFNPFDLSARRRHGTPEVAFDSAGAVEAGMGLGEAAGRLLAAVDWEREAYPAYDDFLALPAFVLFFPTVRFLLDRFVFKWVAMRLIHGQGHQRANNETEEARKKIRKFKESAWKCVYFLSGELLSLSVTYNEPWFTNTRYFWVGPGEQVWPDQKIKLKLKAVYMYAAGFYTYSIFALMFWETRRSDFGVSMSHHVATVVLIVLSYVFRFARVGSIVLAIHDASDVFLEVGKMSKYSHCDWLANVSFLFFVISWVLLRLTYFPFWILRSTSYEVLLTLDKKKHNFDGPIYYYVFNSLLFSLLVLHIYWWVLIYRMLVRQIKTRNVGDDVRSDSEGEDDHED

SEQ ID NO: 17827 - protein, 311 aa, Zea mays subsp. mays
  peptide (1)..(311): Ceres Seq. ID no. 12435293
  misc_feature (97)..(310): Pfam Name: Longevity-assurance protein (LAG1) Pfam Description: Longevity-assurance protein (LAG1)
  misc_feature (63)..(311): Homolog of NCBI NO: 27769146 NR Description: Similar to RIKEN cDNA 0610013I17 gene [Xenopus
  misc_feature (1)..(127): Homolog of NCBI NO: 8920562 NR Description: Contains similarity to LAG1 homolog 1 from
  misc_feature (22)..(307): Homolog of NCBI NO: 34901974 NR Description: unknown protein [Oryza sativa (japonica
  misc_feature (32)..(308): Homolog of NCBI NO: 7658241 NR Description: LAG1 homolog 2 [Arabidopsis thaliana]
  misc_feature (32)..(308): Homolog of NCBI NO: 15230323 NR Description: longevity factor-like protein
  misc_feature (1)..(242): Homolog of NCBI NO: 30683361 NR Description: longevity assurance protein -related [Arabidopsis
  misc_feature (10)..(311): Homolog of NCBI NO: 7688742 NR Description: ASC1 [Lycopersicon esculentum]
  misc_feature (1)..(311): Homolog of NCBI NO: 18404559 NR Description: expressed protein
  misc_feature (1)..(311): Homolog of NCBI NO: 25518747 NR Description: hypothetical protein F13B4.7 - Arabidopsis
  misc_feature (14)..(311): Homolog of NCBI NO: 16974114 NR Description: putative resistance protein [Lycopersicon
MGLGEAAGRLLAAVDWEREAYPAYDDFLALPAFVLFFPTVRFLLDRFVFKWVAMRLIHGQGHQRANNETEEARKKIRKFKESAWKCVYFLSGELLSLSVTYNEPWFTNTRYFWVGPGEQVWPDQKIKLKLKAVYMYAAGFYTYSIFALMFWETRRSDFGVSMSHHVATVVLIVLSYVFRFARVGSIVLAIHDASDVFLEVGKMSKYSHCDWLANVSFLFFVISWVLLRLTYFPFWILRSTSYEVLLTLDKKKHNFDGPIYYYVFNSLLFSLLVLHIYWWVLIYRMLVRQIKTRNVGDDVRSDSEGEDDHED

SEQ ID NO: 17828 - protein, 258 aa, Zea mays subsp. mays
  peptide (1)..(258): Ceres Seq. ID no. 12435294
  misc_feature (44)..(257): Pfam Name: Longevity-assurance protein (LAG1) Pfam Description: Longevity-assurance protein (LAG1)
  misc_feature (10)..(258): Homolog of NCBI NO: 27769146 NR Description: Similar to RIKEN cDNA 0610013I17 gene [Xenopus
  misc_feature (1)..(74): Homolog of NCBI NO: 8920562 NR Description: Contains similarity to LAG1 homolog 1 from
  misc_feature (1)..(254): Homolog of NCBI NO: 34901974 NR Description: unknown protein [Oryza sativa (japonica
  misc_feature (1)..(255): Homolog of NCBI NO: 7658241 NR Description: LAG1 homolog 2 [Arabidopsis thaliana]
  misc_feature (1)..(255): Homolog of NCBI NO: 15230323 NR Description: longevity factor-like protein
  misc_feature (1)..(189): Homolog of NCBI NO: 30683361 NR Description: longevity assurance protein -related [Arabidopsis
  misc_feature (1)..(258): Homolog of NCBI NO: 7688742 NR Description: ASC1 [Lycopersicon esculentum]
  misc_feature (1)..(258): Homolog of NCBI NO: 18404559 NR Description: expressed protein
  misc_feature (1)..(258): Homolog of NCBI NO: 25518747 NR Description: hypothetical protein F13B4.7 - Arabidopsis
  misc_feature (1)..(258): Homolog of NCBI NO: 16974114 NR Description: putative resistance protein [Lycopersicon
MRLIHGQGHQRANNETEEARKKIRKFKESAWKCVYFLSGELLSLSVTYNEPWFTNTRYFWVGPGEQVWPDQKIKLKLKAVYMYAAGFYTYSIFALMFWETRRSDFGVSMSHHVATVVLIVLSYVFRFARVGSIVLAIHDASDVFLEVGKMSKYSHCDWLANVSFLFFVISWVLLRLTYFPFWILRSTSYEVLLTLDKKKHNFDGPIYYYVFNSLLFSLLVLHIYWWVLIYRMLVRQIKTRNVGDDVRSDSEGEDDHED

SEQ ID NO: 17829 - DNA, 2001 bp, Zea mays subsp. mays
  misc_feature (1)..(2001): Ceres Seq. ID no. 12387575
  misc_feature: MA Experiment ID: 108544 Result: Down-regulated in Transcription
  misc_feature: MA Experiment ID: 108556 Result: Down-regulated in Transcription
  misc_feature: MA Experiment 108556 PARAMETER Experiment Name: Zm_Drought_P Parameter: Age (day) Value: 9
  misc_feature: MA Experiment 108556 PARAMETER Experiment Name: Zm_Drought_P Parameter: Organism Value: Zea mays
  misc_feature: MA Experiment 108556 PARAMETER Experiment Name: Zm_Drought_P Parameter: Plant Line Value: 35A19
  misc_feature: MA Experiment 108556 PARAMETER Experiment Name: Zm_Drought_P Parameter: Timepoint (hr) Value: 24
  misc_feature: MA Experiment 108556 PARAMETER Experiment Name: Zm_Drought_P Parameter: Tissue Value: Aerial
  misc_feature: MA Experiment 108556 PARAMETER Experiment Name: Zm_Drought_P Parameter: Treatment Value: Drought vs. No Drought
gcacgagaccattacctagaacatcctaatcgaaaaatcctggtgctgcacgccccacggtctcggcggccacgccccacactcctcgtcctcgtcctcctcctcgcacccctcctccccggcccgcgccgccgcccatcacatggacccgccgcccaccagctctaccgtggcctcctcctacgccactccgccccagccttcctacgcgccctcctaccctaccagctacaccaagttcaactccgcgctcaacgcggggttgctcaatcccatgtccccgccgccgctgccacttgacaagacgcgctccagccccacactcttcgacatgatggccaacgagcaggactaccacccccgcaccgccgccggcatccactccatccccgccccgccccagccgcaccagctcccgcccgcgcgctccatggacaggcagatgctgctccaggaccgcatcgccgacctcatcggcagctgtagccccgggaaccagttcaacgacgccgactcctccgacgtccgcctcaccctcagctccaaggacggcctctccgtcacgctctgcgttcaccgccacatactcgtcgcgcacagcaggttcttcgccgccaaactgtccgaccgctggtccaagcagcagcggacgctgccgcacatcgtcgagatctccgactgcgacgacgtcgaggtgtacgccgagacgctgcggctcatgtactgcaaggatctccgccggaggctgatgcgggaggatgtgaacaaggtccttggcatcctgaaggtgtccgcagccattgtattcgatgccggggtgttgtcttgcttggagtacttggaggctgcgccttgggctgaggacgatgatgagaaggtggctacgttgttgacgcagctgcatcttgagaactccggggctggggaggtgcttaagagggtgtcactggaattggccccttcgtcattggttgaagaggcagatgaaggaggcagctgcaacggtggcaattccagtggtggtgaggaggtattgctgaggctcctgcaggtcgtcctggaagggaaggacgaaaaggcaaggagggagatgaaggggctagtgtccaaaatgctcagggagaacagcacatcccgtggtggagcaattggtggcgaccttcgcaaggaatcgctctattctgcgtgcaatggatgcttgtccctgctgtgcgagcaatttgtgagggcttcagagggtgatcactcagaggtggcgcggatcgcaaggcaggctgacaacctgcattggatgcttgacatccttgttgagcgccagatcgcggaggatttcttgaggacatgggcaacgcagactgagttagcggcgatgcatcgtaaagtgccagcgatacaccgctacgaagtgagccgagtgacggcaagactctttgttggggttggcaagggtcagatcttggtgtccaaggaggcccgttgccagctcttgagcacctggctagagcccttttatgaggacttctgatggatgcggcgagcatgcaaggggcttgaccggcatttgatcgaggatggactggcaaacacaatcctgacgctgcctcttgcaactcagcaggagatccttctggcatggtttaatcggttcctcaactctggggaggattgcccaaacattcagagagggtttgaggtgtggtggcggcgggcattctggaaaaggaactctgaaccagaaccaccatcccgtttgaggattactgcgatctgcgagaactcttgatgacggcggttcatattcgacatggaatgtggcggatgctgtgatataattattgattttctgtgatatgtantantgtctanctgtttctcannttttttttttgntatgtctgattaggcagttagccaattacacatgtcatcttgatcctgtttcaatgcaatgtataccangtccaatgtactactatgccncaaccattttgattcnaagtg

SEQ ID NO: 17830 - protein, 460 aa, Zea mays subsp. mays
  peptide (1)..(460): Ceres Seq. ID no. 12387576
  misc_feature (256)..(460): Homolog of NCBI NO: 38230508 NR Description: predicted protein [Populus alba x Populus tremula]
  misc_feature (7)..(74): Homolog of NCBI NO: 15238599 NR Description: putative protein; protein id: At5g60050.1
  misc_feature (106)..(460): Homolog of NCBI NO: 15238599 NR Description: putative protein; protein id: At5g60050.1
  misc_feature (1)..(85): Homolog of NCBI NO: 15222554 NR Description: hypothetical protein; protein id: At1g63850.1
  misc_feature (279)..(460): Homolog of NCBI NO: 15222554 NR Description: hypothetical protein; protein id: At1g63850.1
  misc_feature (17)..(460): Homolog of NCBI NO: 32488518 NR Description: OSJNBa0011J08.25 [Oryza sativa (japonica
  misc_feature (295)..(460): Homolog of NCBI NO: 15230303 NR Description: putative protein; protein id: At3g50780.1
  misc_feature (15)..(268): Homolog of NCBI NO: 15230303 NR Description: putative protein; protein id: At3g50780.1
  misc_feature (1)..(330): Homolog of NCBI NO: 38230508 NR Description: predicted protein [Populus alba x Populus tremula]
  misc_feature (96)..(330): Homolog of NCBI NO: 15222554 NR Description: hypothetical protein; protein id: At1g63850.1
MDPPPTSSTVASSYATPPQPSYAPSYPTSYTKFNSALNAGLLNPMSPPPLPLDKTRSSPTLFDMMANEQDYHPRTAAGIHSIPAPPQPHQLPPARSMDRQMLLQDRIADLIGSCSPGNQFNDADSSDVRLTLSSKDGLSVTLCVHRHILVAHSRFFAAKLSDRWSKQQRTLPHIVEISDCDDVEVYAETLRLMYCKDLRRRLMREDVNKVLGILKVSAAIVFDAGVLSCLEYLEAAPWAEDDDEKVATLLTQLHLENSGAGEVLKRVSLELAPSSLVEEADEGGSCNGGNSSGGEEVLLRLLQVVLEGKDEKARREMKGLVSKMLRENSTSRGGAIGGDLRKESLYSACNGCLSLLCEQFVRASEGDHSEVARIARQADNLHWMLDILVERQIAEDFLRTWATQTELAAMHRKVPAIHRYEVSRVTARLFVGVGKGQILVSKEARCQLLSTWLEPFYEDF

SEQ ID NO: 17831 - protein, 416 aa, Zea mays subsp. mays
  peptide (1)..(416): Ceres Seq. ID no. 12387577
  misc_feature (251)..(416): Homolog of NCBI NO: 15230303 NR Description: putative protein; protein id: At3g50780.1
  misc_feature (1)..(224): Homolog of NCBI NO: 15230303 NR Description: putative protein; protein id: At3g50780.1
  misc_feature (1)..(286): Homolog of NCBI NO: 38230508 NR Description: predicted protein [Populus alba x Populus tremula]
  misc_feature (52)..(286): Homolog of NCBI NO: 15222554 NR Description: hypothetical protein; protein id: At1g63850.1
  misc_feature (212)..(416): Homolog of NCBI NO: 38230508 NR Description: predicted protein [Populus alba x Populus tremula]
  misc_feature (1)..(30): Homolog of NCBI NO: 15238599 NR Description: putative protein; protein id: At5g60050.1
  misc_feature (62)..(416): Homolog of NCBI NO: 15238599 NR Description: putative protein; protein id: At5g60050.1
  misc_feature (1)..(41): Homolog of NCBI NO: 15222554 NR Description: hypothetical protein; protein id: At1g63850.1
  misc_feature (235)..(416): Homolog of NCBI NO: 15222554 NR Description: hypothetical protein; protein id: At1g63850.1
  misc_feature (1)..(416): Homolog of NCBI NO: 32488518 NR Description: OSJNBa0011J08.25 [Oryza sativa (japonica
MSPPPLPLDKTRSSPTLFDMMANEQDYHPRTAAGIHSIPAPPQPHQLPPARSMDRQMLLQDRIADLIGSCSPGNQFNDADSSDVRLTLSSKDGLSVTLCVHRHILVAHSRFFAAKLSDRWSKQQRTLPHIVEISDCDDVEVYAETLRLMYCKDLRRRLMREDVNKVLGILKVSAAIVFDAGVLSCLEYLEAAPWAEDDDEKVATLLTQLHLENSGAGEVLKRVSLELAPSSLVEEADEGGSCNGGNSSGGEEVLLRLLQVVLEGKDEKARREMKGLVSKMLRENSTSRGGAIGGDLRKESLYSACNGCLSLLCEQFVRASEGDHSEVARIARQADNLHWMLDILVERQIAEDFLRTWATQTELAAMHRKVPAIHRYEVSRVTARLFVGVGKGQILVSKEARCQLLSTWLEPFYEDF

SEQ ID NO: 17832 - protein, 397 aa, Zea mays subsp. mays
  peptide (1)..(397): Ceres Seq. ID no. 12387578
  misc_feature (232)..(397): Homolog of NCBI NO: 15230303 NR Description: putative protein; protein id: At3g50780.1
  misc_feature (1)..(205): Homolog of NCBI NO: 15230303 NR Description: putative protein; protein id: At3g50780.1
  misc_feature (1)..(267): Homolog of NCBI NO: 38230508 NR Description: predicted protein [Populus alba x Populus tremula]
  misc_feature (33)..(267): Homolog of NCBI NO: 15222554 NR Description: hypothetical protein; protein id: At1g63850.1
  misc_feature (193)..(397): Homolog of NCBI NO: 38230508 NR Description: predicted protein [Populus alba x Populus tremula]
  misc_feature (1)..(11): Homolog of NCBI NO: 15238599 NR Description: putative protein; protein id: At5g60050.1
  misc_feature (43)..(397): Homolog of NCBI NO: 15238599 NR Description: putative protein; protein id: At5g60050.1
  misc_feature (1)..(22): Homolog of NCBI NO: 15222554 NR Description: hypothetical protein; protein id: At1g63850.1
  misc_feature (216)..(397): Homolog of NCBI NO: 15222554 NR Description: hypothetical protein; protein id: At1g63850.1
  misc_feature (1)..(397): Homolog of NCBI NO: 32488518 NR Description: OSJNBa0011J08.25 [Oryza sativa (japonica
MMANEQDYHPRTAAGIHSIPAPPQPHQLPPARSMDRQMLLQDRIADLIGSCSPGNQFNDADSSDVRLTLSSKDGLSVTLCVHRHILVAHSRFFAAKLSDRWSKQQRTLPHIVEISDCDDVEVYAETLRLMYCKDLRRRLMREDVNKVLGILKVSAAIVFDAGVLSCLEYLEAAPWAEDDDEKVATLLTQLHLENSGAGEVLKRVSLELAPSSLVEEADEGGSCNGGNSSGGEEVLLRLLQVVLEGKDEKARREMKGLVSKMLRENSTSRGGAIGGDLRKESLYSACNGCLSLLCEQFVRASEGDHSEVARIARQADNLHWMLDILVERQIAEDFLRTWATQTELAAMHRKVPAIHRYEVSRVTARLFVGVGKGQILVSKEARCQLLSTWLEPFYEDF

SEQ ID NO: 17833 - DNA, 1446 bp, Zea mays subsp. mays
  misc_feature (1)..(1446): Ceres Seq. ID no. 12415235
  misc_feature: MA Experiment ID: 108528 Result: Up-regulated in Transcription
  misc_feature: MA Experiment 108528 PARAMETER Experiment Name: Zm_Imbibed_Seeds_P Parameter: Age (day) Value: 5 vs. 2
  misc_feature: MA Experiment 108528 PARAMETER Experiment Name: Zm_Imbibed_Seeds_P Parameter: Organism Value: Zea mays
  misc_feature: MA Experiment 108528 PARAMETER Experiment Name: Zm_Imbibed_Seeds_P Parameter: Plant Line Value: 35A19
  misc_feature: MA Experiment 108528 PARAMETER Experiment Name: Zm_Imbibed_Seeds_P Parameter: Tissue Value: Aerial vs. Embryo
  misc_feature: MA Experiment ID: 108529 Result: Up-regulated in Transcription
  misc_feature: MA Experiment 108529 PARAMETER Experiment Name: Zm_Imbibed_Seeds_P Parameter: Age (day) Value: 5 vs. 2
  misc_feature: MA Experiment 108529 PARAMETER Experiment Name: Zm_Imbibed_Seeds_P Parameter: Organism Value: Zea mays
  misc_feature: MA Experiment 108529 PARAMETER Experiment Name: Zm_Imbibed_Seeds_P Parameter: Plant Line Value: 35A19
  misc_feature: MA Experiment 108529 PARAMETER Experiment Name: Zm_Imbibed_Seeds_P Parameter: Tissue Value: Roots vs. Embryo
  misc_feature: MA Experiment ID: 108530 Result: Up-regulated in Transcription
  misc_feature: MA Experiment 108530 PARAMETER Experiment Name: Zm_Imbibed_Seeds_P Parameter: Age (day) Value: 6 vs. 2
  misc_feature: MA Experiment 108530 PARAMETER Experiment Name: Zm_Imbibed_Seeds_P Parameter: Organism Value: Zea mays
  misc_feature: MA Experiment 108530 PARAMETER Experiment Name: Zm_Imbibed_Seeds_P Parameter: Plant Line Value: 35A19
  misc_feature: MA Experiment 108530 PARAMETER Experiment Name: Zm_Imbibed_Seeds_P Parameter: Tissue Value: Aerial vs. Embryo
  misc_feature: MA Experiment ID: 108547 Result: Up-regulated in Transcription
  misc_feature: MA Experiment 108547 PARAMETER Experiment Name: Zm_Imbibed_Seeds_P Parameter: Age (day) Value: 4 vs. 2
  misc_feature: MA Experiment 108547 PARAMETER Experiment Name: Zm_Imbibed_Seeds_P Parameter: Organism Value: Zea mays
  misc_feature: MA Experiment 108547 PARAMETER Experiment Name: Zm_Imbibed_Seeds_P Parameter: Plant Line Value: 35A19
  misc_feature: MA Experiment 108547 PARAMETER Experiment Name: Zm_Imbibed_Seeds_P Parameter: Tissue Value: Aerial vs. Embryo
  misc_feature: MA Experiment ID: 108687 Result: Down-regulated in Transcription
  misc_feature: MA Experiment 108687 PARAMETER Experiment Name: Zm_Embryos-Flowers__P Parameter: Tissue Value: Embryo vs. Aerial+
  misc_feature: MA Experiment ID: 108688 Result: Down-regulated in Transcription
  misc_feature: MA Experiment 108688 PARAMETER Experiment Name: Zm_Embryos-Flowers__P Parameter: Tissue Value: Immature Flowers vs. Aerial+
  misc_feature: MA Experiment ID: 20000492 Result: Down-regulated in Transcription
  misc_feature: MA Experiment 20000492 PARAMETER Experiment Name: Zm_Hybrid_Seed_Dev_P Parameter: DAP Value: 12
  misc_feature: MA Experiment 20000492 PARAMETER Experiment Name: Zm_Hybrid_Seed_Dev_P Parameter: Organism Value: Zea mays
  misc_feature: MA Experiment 20000492 PARAMETER Experiment Name: Zm_Hybrid_Seed_Dev_P Parameter: Plant Line Value: 35A19
  misc_feature: MA Experiment 20000492 PARAMETER Experiment Name: Zm_Hybrid_Seed_Dev_P Parameter: Tissue Value: Fert Kernel vs. Unfert Floret
  misc_feature: MA Experiment ID: 20000534 Result: Down-regulated in Transcription
  misc_feature: MA Experiment 20000534 PARAMETER Experiment Name: Zm_Hybrid_Pollen_P Parameter: Age (day) Value: 8
  misc_feature: MA Experiment 20000534 PARAMETER Experiment Name: Zm_Hybrid_Pollen_P Parameter: Organism Value: Zea mays
  misc_feature: MA Experiment 20000534 PARAMETER Experiment Name: Zm_Hybrid_Pollen_P Parameter: Plant Line Value: 35A19
  misc_feature: MA Experiment 20000534 PARAMETER Experiment Name: Zm_Hybrid_Pollen_P Parameter: Tissue Value: Pollen vs. Aerial
  misc_feature: MA Experiment ID: 20000535 Result: Down-regulated in Transcription
  misc_feature: MA Experiment 20000535 PARAMETER Experiment Name: Zm_Hybrid_Seed_Dev_P Parameter: DAP Value: 30 vs. 12
  misc_feature: MA Experiment 20000535 PARAMETER Experiment Name: Zm_Hybrid_Seed_Dev_P Parameter: Organism Value: Zea mays
  misc_feature: MA Experiment 20000535 PARAMETER Experiment Name: Zm_Hybrid_Seed_Dev_P Parameter: Plant Line Value: 35A19
  misc_feature: MA Experiment 20000535 PARAMETER Experiment Name: Zm_Hybrid_Seed_Dev_P Parameter: Tissue Value: Embryo vs. Unfert Floret
gcacgagaccattacctagaacatcctaatccaaaaatatcaatcatccagaaggtcaaactctcccctgtttcgacttggttccctgctcctgccctgaaaggagttgtcttggttccctgcccctgccctgaaagcagcagttggagagtcgaatcgtccttcttctctccggcgggaggaggcgggcggtgggcggtgggcggcggcaggaccgtgatgacgagcagcagcaacaacggcggccggccagacgacggcggcgaggtggtcctggaccacgagtaccaagaggagtacgtgaggaactcgcgggggatgagcctcttcgcatgcagatggctgccggcagttgcaggcaagagggggagggctccagctccaaaggcgctcgtcttcctctgccacggctacgccgtggagtgcagcgtgacgatgcgcggcaccggcgagcgcctggcgcgtgccggctacgccgtctacggcctggactacgagggccacggccgctccgacgggctgcagggctacntgccggatttcgacgcgctggtgctggactgcgacgagtacttcacctcggtggtggcggcggcggcgcagtcgcagtccaaggacgcccaccaacttccccggttcctgctcggggagtccatgggcggcgccgtggctctcctcctccaccgccggcgccccgagtactggagcggcgccgtgctggtggcgcccatgtgcaagatcgccgacgacatgcggcctcacccgctggtggtcaacatcctcagggccatgaccaccatcatcccgacgtggaagatcgtgcccagcaacgacgtcatcgacgcggcgtacaggagccaggagaagagggacgagatccgcagcaacccttactgctacaaggacaagccgcgactcaagaccgcctacgagctgctcaaagtcagcttggacctcgagcacaacctcctccaccaggtgtcgttgccgttcctgatcgtgcacggcggggcagacaaggtgacggacccgtcggtgagcgagctgctgtaccaatcggcggcgagccaggacaagacgctcaagttctatccgggcatgtggcacgccctcacctccggcgagtcgcccgacaacatccaagccgttttccaagacatcatcgcctggctcgaccacaggtcacccgacacggaacaggaggagctggtgtcgtcggaggtggagcagaaggccaagcacgacgaccagcgccaccaggagcagctccaggacggcaacaaatagctagctgcttgcttgcctgctgctttcttctctttacagaacgaaccgtttcatttggtcatgcatggatacacatcatgtctcagtgatacgtaccgactaaattaaattattagatcgaccgcgcttacctagaaattaaacaatcagctgttcgac

SEQ ID NO: 17834 - protein, 428 aa, Zea mays subsp. mays
  peptide (1)..(428): Ceres Seq. ID no. 12415236
  misc_feature (158)..(384): Pfam Name: alpha/beta hydrolase fold Pfam Description: alpha/beta hydrolase fold
  misc_feature (96)..(394): Homolog of NCBI NO: 15233203 NR Description: lipase -like protein; protein id: At3g55190.1
  misc_feature (97)..(395): Homolog of NCBI NO: 34894592 NR Description: phospholipase-like protein
  misc_feature (100)..(411): Homolog of NCBI NO: 7487947 NR Description: lysophospholipase homolog F12L6.7 - Arabidopsis
  misc_feature (96)..(415): Homolog of NCBI NO: 18405038 NR Description: putative phospholipase
  misc_feature (93)..(411): Homolog of NCBI NO: 30687879 NR Description: hydrolase, alpha/beta fold family [Arabidopsis
  misc_feature (95)..(398): Homolog of NCBI NO: 30695682 NR Description: esterase/lipase/thioesterase family [Arabidopsis
  misc_feature (93)..(397): Homolog of NCBI NO: 18407407 NR Description: putative phospholipase
  misc_feature (96)..(416): Homolog of NCBI NO: 15233200 NR Description: lipase -like protein; protein id: At3g55180.1
  misc_feature (95)..(415): Homolog of NCBI NO: 30687883 NR Description: esterase/lipase/thioesterase family [Arabidopsis
  misc_feature (95)..(415): Homolog of NCBI NO: 7487948 NR Description: lysophospholipase homolog F12L6.8 - Arabidopsis
  misc_feature (178)..(178): Xaa is any aa, unknown or other
ARDHYLEHPNPKISIIQKVKLSPVSTWFPAPALKGVVLVPCPCPESSSWRVESSFFSPAGGGGRWAVGGGRTVMTSSSNNGGRPDDGGEVVLDHEYQEEYVRNSRGMSLFACRWLPAVAGKRGRAPAPKALVFLCHGYAVECSVTMRGTGERLARAGYAVYGLDYEGHGRSDGLQGYXPDFDALVLDCDEYFTSVVAAAAQSQSKDAHQLPRFLLGESMGGAVALLLHRRRPEYWSGAVLVAPMCKIADDMRPHPLVVNILRAMTTIIPTWKIVPSNDVIDAAYRSQEKRDEIRSNPYCYKDKPRLKTAYELLKVSLDLEHNLLHQVSLPFLIVHGGADKVTDPSVSELLYQSAASQDKTLKFYPGMWHALTSGESPDNIQAVFQDIIAWLDHRSPDTEQEELVSSEVEQKAKHDDQRHQEQLQDGNK

SEQ ID NO: 17835 - protein, 355 aa, Zea mays subsp. mays
  peptide (1)..(355): Ceres Seq. ID no. 12415237
  misc_feature (85)..(311): Pfam Name: alpha/beta hydrolase fold Pfam Description: alpha/beta hydrolase fold
  misc_feature (23)..(321): Homolog of NCBI NO: 15233203 NR Description: lipase -like protein; protein id: At3g55190.1
  misc_feature (24)..(322): Homolog of NCBI NO: 34894592 NR Description: phospholipase-like protein
  misc_feature (27)..(338): Homolog of NCBI NO: 7487947 NR Description: lysophospholipase homolog F12L6.7 - Arabidopsis
  misc_feature (23)..(342): Homolog of NCBI NO: 18405038 NR Description: putative phospholipase
  misc_feature (20)..(338): Homolog of NCBI NO: 30687879 NR Description: hydrolase, alpha/beta fold family [Arabidopsis
  misc_feature (22)..(325): Homolog of NCBI NO: 30695682 NR Description: esterase/lipase/thioesterase family [Arabidopsis
  misc_feature (20)..(324): Homolog of NCBI NO: 18407407 NR Description: putative phospholipase
  misc_feature (23)..(343): Homolog of NCBI NO: 15233200 NR Description: lipase -like protein; protein id: At3g55180.1
  misc_feature (22)..(342): Homolog of NCBI NO: 30687883 NR Description: esterase/lipase/thioesterase family [Arabidopsis
  misc_feature (22)..(342): Homolog of NCBI NO: 7487948 NR Description: lysophospholipase homolog F12L6.8 - Arabidopsis
  misc_feature (105)..(105): Xaa is any aa, unknown or other
MTSSSNNGGRPDDGGEVVLDHEYQEEYVRNSRGMSLFACRWLPAVAGKRGRAPAPKALVFLCHGYAVECSVTMRGTGERLARAGYAVYGLDYEGHGRSDGLQGYXPDFDALVLDCDEYFTSVVAAAAQSQSKDAHQLPRFLLGESMGGAVALLLHRRRPEYWSGAVLVAPMCKIADDMRPHPLVVNILRAMTTIIPTWKIVPSNDVIDAAYRSQEKRDEIRSNPYCYKDKPRLKTAYELLKVSLDLEHNLLHQVSLPFLIVHGGADKVTDPSVSELLYQSAASQDKTLKFYPGMWHALTSGESPDNIQAVFQDIIAWLDHRSPDTEQEELVSSEVEQKAKHDDQRHQEQLQDGNK

SEQ ID NO: 17836 - protein, 347 aa, Zea mays subsp. mays
  peptide (1)..(347): Ceres Seq. ID no. 12415238
  misc_feature (90)..(313): Pfam Name: Atrophin-1 family Pfam Description: Atrophin-1 family
  misc_feature (1)..(226): Homolog of NCBI NO: 93505 NR Description: ORF5 protein - Orf virus (strain NZ2)
  misc_feature (1)..(319): Homolog of NCBI NO: 25989121 NR Description: putative PHA synthase [Streptomyces aureofaciens]
  misc_feature (67)..(67): Xaa is any aa, unknown or other
MQMAAGSCRQEGEGSSSKGARLPLPRLRRGVQRDDARHRRAPGACRLRRLRPGLRGPRPLRRAAGLXAGFRRAGAGLRRVLHLGGGGGGAVAVQGRPPTSPVPARGVHGRRRGSPPPPPAPRVLERRRAGGAHVQDRRRHAASPAGGQHPQGHDHHHPDVEDRAQQRRHRRGVQEPGEEGRDPQQPLLLQGQAATQDRLRAAQSQLGPRAQPPPPGVVAVPDRARRGRQGDGPVGERAAVPIGGEPGQDAQVLSGHVARPHLRRVARQHPSRFPRHHRLARPQVTRHGTGGAGVVGGGAEGQARRPAPPGAAPGRQQIASCLLACCFLLFTERTVSFGHAWIHIMSQ

SEQ ID NO: 17837 - DNA, 447 bp, Zea mays subsp. mays
  misc_feature (1)..(447): Ceres Seq. ID no. 2120225
  misc_feature: MA Experiment ID: 108523 Result: Up-regulated in Transcription
  misc_feature: MA Experiment 108523 PARAMETER Experiment Name: Zm_42deg_Heat_P Parameter: Age (day) Value: 8
  misc_feature: MA Experiment 108523 PARAMETER Experiment Name: Zm_42deg_Heat_P Parameter: Organism Value: Zea mays
  misc_feature: MA Experiment 108523 PARAMETER Experiment Name: Zm_42deg_Heat_P Parameter: Plant Line Value: 35A19
  misc_feature: MA Experiment 108523 PARAMETER Experiment Name: Zm_42deg_Heat_P Parameter: Temperature (deg C) Value: 42 vs. 22
  misc_feature: MA Experiment 108523 PARAMETER Experiment Name: Zm_42deg_Heat_P Parameter: Timepoint (hr) Value: 6
  misc_feature: MA Experiment 108523 PARAMETER Experiment Name: Zm_42deg_Heat_P Parameter: Tissue Value: Aerial
  misc_feature: MA Experiment ID: 108527 Result: Up-regulated in Transcription
  misc_feature: MA Experiment 108527 PARAMETER Experiment Name: Zm_5mM_NO_P Parameter: Age (day) Value: 8
  misc_feature: MA Experiment 108527 PARAMETER Experiment Name: Zm_5mM_NO_P Parameter: Organism Value: Zea mays
  misc_feature: MA Experiment 108527 PARAMETER Experiment Name: Zm_5mM_NO_P Parameter: Plant Line Value: 35A19
  misc_feature: MA Experiment 108527 PARAMETER Experiment Name: Zm_5mM_NO_P Parameter: Timepoint (hr) Value: 6
  misc_feature: MA Experiment 108527 PARAMETER Experiment Name: Zm_5mM_NO_P Parameter: Tissue Value: Aerial
  misc_feature: MA Experiment 108527 PARAMETER Experiment Name: Zm_5mM_NO_P Parameter: Treatment Value: 5mM NO vs. No Treatment
  misc_feature: Pfam Name: HMA Pfam Description: Heavy-metal-associated domain
cccctctgtcccagaacgcgccccagcctcccacctagaactccgcgcccagcgctttccgtaaccaccacaaccrcagcggraacagtgacaggttgaggagacggccgccatgggagaggaaaagaagacgggcaagggcggcggcggcggcggcggcgacnagaagaaggacgccggcgctggggccgcgccgcagcccatcgtgttgaaggtcgacttgcattgcgccggctgcgccaacaaggtccgcaaggccatcaagcgcgcaccaggcgtggagtcggtgacgccggacatggcggcgggcaaggtggtcgtgaccggtccggcggacgcggtgcagctcaaggagcgcatcgaggctagggccaagaagcccgtgcagatcgtctccgccggcgccggttcgccaagaaggacaaggagaagwawgctgacggcggc

SEQ ID NO: 17838 - protein, 111 aa, Zea mays subsp. mays
  peptide (1)..(111): Ceres Seq. ID no. 2120226
  misc_feature: Pfam Name: HMA Pfam Description: Heavy-metal-associated domain
  misc_feature (1)..(95): Homolog of NCBI NO: 18424719 NR Description: copper chaperone (CCH)-related
  misc_feature (3)..(95): Homolog of NCBI NO: 15241256 NR Description: copper chaperone (CCH)-related; protein id:
  misc_feature (4)..(95): Homolog of NCBI NO: 18404283 NR Description: expressed protein
  misc_feature (27)..(100): Homolog of NCBI NO: 37534750 NR Description: putative metal-binding protein
  misc_feature (55)..(101): Homolog of NCBI NO: 29367499 NR Description: unknown [Oryza sativa (japonica cultivar-group)]
  misc_feature (1)..(95): Homolog of NCBI NO: 24417342 NR Description: unknown [Arabidopsis thaliana]
  misc_feature (1)..(97): Homolog of NCBI NO: 37534752 NR Description: putative metal-binding protein
  misc_feature (1)..(95): Homolog of NCBI NO: 38344582 NR Description: OSJNBa0053B21.14 [Oryza sativa (japonica
  misc_feature (1)..(95): Homolog of NCBI NO: 22327990 NR Description: expressed protein; protein id: At5g60800.1
  misc_feature (1)..(101): Homolog of NCBI NO: 37534752 NR Description: putative metal-binding protein
  misc_feature (18)..(18): Xaa is any aa, unknown or other
  misc_feature (107)..(107): Xaa is any aa, unknown or other
  misc_feature (108)..(108): Xaa is any aa, unknown or other
MGEEKKTGKGGGGGGGDXKKDAGAGAAPQPIVLKVDLHCAGCANKVRKAIKRAPGVESVTPDMAAGKVVVTGPADAVQLKERIEARAKKPVQIVSAGAGSPRRTRRXXLTA

SEQ ID NO: 17839 - DNA, 1026 bp, Zea mays subsp. mays
  misc_feature (1)..(1026): Ceres Seq. ID no. 12355072
  misc_feature: MA Experiment ID: 108527 Result: Down-regulated in Transcription
  misc_feature: MA Experiment 108527 PARAMETER Experiment Name: Zm_5mM_NO_P Parameter: Age (day) Value: 8
  misc_feature: MA Experiment 108527 PARAMETER Experiment Name: Zm_5mM_NO_P Parameter: Organism Value: Zea mays
  misc_feature: MA Experiment 108527 PARAMETER Experiment Name: Zm_5mM_NO_P Parameter: Plant Line Value: 35A19
  misc_feature: MA Experiment 108527 PARAMETER Experiment Name: Zm_5mM_NO_P Parameter: Timepoint (hr) Value: 6
  misc_feature: MA Experiment 108527 PARAMETER Experiment Name: Zm_5mM_NO_P Parameter: Tissue Value: Aerial
  misc_feature: MA Experiment 108527 PARAMETER Experiment Name: Zm_5mM_NO_P Parameter: Treatment Value: 5mM NO vs. No Treatment
  misc_feature: MA Experiment ID: 108528 Result: Up-regulated in Transcription
  misc_feature: MA Experiment 108528 PARAMETER Experiment Name: Zm_Imbibed_Seeds_P Parameter: Age (day) Value: 5 vs. 2
  misc_feature: MA Experiment 108528 PARAMETER Experiment Name: Zm_Imbibed_Seeds_P Parameter: Organism Value: Zea mays
  misc_feature: MA Experiment 108528 PARAMETER Experiment Name: Zm_Imbibed_Seeds_P Parameter: Plant Line Value: 35A19
  misc_feature: MA Experiment 108528 PARAMETER Experiment Name: Zm_Imbibed_Seeds_P Parameter: Tissue Value: Aerial vs. Embryo
  misc_feature: MA Experiment ID: 108530 Result: Up-regulated in Transcription
  misc_feature: MA Experiment 108530 PARAMETER Experiment Name: Zm_Imbibed_Seeds_P Parameter: Age (day) Value: 6 vs. 2
  misc_feature: MA Experiment 108530 PARAMETER Experiment Name: Zm_Imbibed_Seeds_P Parameter: Organism Value: Zea mays
  misc_feature: MA Experiment 108530 PARAMETER Experiment Name: Zm_Imbibed_Seeds_P Parameter: Plant Line Value: 35A19
  misc_feature: MA Experiment 108530 PARAMETER Experiment Name: Zm_Imbibed_Seeds_P Parameter: Tissue Value: Aerial vs. Embryo
  misc_feature: MA Experiment ID: 108547 Result: Up-regulated in Transcription
  misc_feature: MA Experiment 108547 PARAMETER Experiment Name: Zm_Imbibed_Seeds_P Parameter: Age (day) Value: 4 vs. 2
  misc_feature: MA Experiment 108547 PARAMETER Experiment Name: Zm_Imbibed_Seeds_P Parameter: Organism Value: Zea mays
  misc_feature: MA Experiment 108547 PARAMETER Experiment Name: Zm_Imbibed_Seeds_P Parameter: Plant Line Value: 35A19
  misc_feature: MA Experiment 108547 PARAMETER Experiment Name: Zm_Imbibed_Seeds_P Parameter: Tissue Value: Aerial vs. Embryo
  misc_feature: MA Experiment ID: 20000532 Result: Up-regulated in Transcription
  misc_feature: MA Experiment 20000532 PARAMETER Experiment Name: Zm_0.001percent_MeJA_P Parameter: Age (day) Value: 10
  misc_feature: MA Experiment 20000532 PARAMETER Experiment Name: Zm_0.001percent_MeJA_P Parameter: Organism Value: Zea mays
  misc_feature: MA Experiment 20000532 PARAMETER Experiment Name: Zm_0.001percent_MeJA_P Parameter: Plant Line Value: 35A19
  misc_feature: MA Experiment 20000532 PARAMETER Experiment Name: Zm_0.001percent_MeJA_P Parameter: Timepoint (hr) Value: 48
  misc_feature: MA Experiment 20000532 PARAMETER Experiment Name: Zm_0.001percent_MeJA_P Parameter: Tissue Value: Aerial
  misc_feature: MA Experiment 20000532 PARAMETER Experiment Name: Zm_0.001percent_MeJA_P Parameter: Treatment Value: 0.001percent MeJA vs. No Treatment
  misc_feature: MA Experiment ID: 20000533 Result: Up-regulated in Transcription
  misc_feature: MA Experiment 20000533 PARAMETER Experiment Name: Zm_0.001percent_MeJA_P Parameter: Age (day) Value: 11
  misc_feature: MA Experiment 20000533 PARAMETER Experiment Name: Zm_0.001percent_MeJA_P Parameter: Organism Value: Zea mays
  misc_feature: MA Experiment 20000533 PARAMETER Experiment Name: Zm_0.001percent_MeJA_P Parameter: Plant Line Value: 35A19
  misc_feature: MA Experiment 20000533 PARAMETER Experiment Name: Zm_0.001percent_MeJA_P Parameter: Timepoint (hr) Value: 72
  misc_feature: MA Experiment 20000533 PARAMETER Experiment Name: Zm_0.001percent_MeJA_P Parameter: Tissue Value: Aerial
  misc_feature: MA Experiment 20000533 PARAMETER Experiment Name: Zm_0.001percent_MeJA_P Parameter: Treatment Value: 0.001percent MeJA vs. No Treatment
atcgcccacacgtcgaagcaggtgattggcgatccctgtccgtcctcgctcgctagctgatcgacatggccgacgacgacccaagaacgacggcggcgagcagcatgccggacttcaagcagtcggtgaagctcaagtacgtgaagctggggtaccaccacctgatcagccacggcgcgtacctgctgctggccccgctgccggggctcgtggcggcgcacctctccaccttcacggcgcgggacctggcggagctgtggcagagcctgcagtacaacctggcgtccgtgctcgtcgcgaccacggcgctggtcacggccaccgcgtacgcgctgacgcggccgcggcccgtgtacctggtggacttcgcgtgctaccggccccgcgacgagcgcaggtgcagccgcgcgcggttcatgaactgcaccgagtcgctcggcaccttcacgccggagaacgtggagttccagcgccggatcatcgagcggtcggggctgggcgaggacacgtacctcccggaggcggtgctcaacatcccgcccaacccatccatggccagcgcacgggaggaggccgagatggtcatgttcggcgcgctggacgagctgttcgccaagaccggggtgcggcccaaggagatcggcgtgctggtggtgaactgcagcctcttcaacccgacgccgtcgctgtccgccatggtcgtcaaccactacaggctccggggcaacgtcgcgagctacaacctcggcggcatgggctgcagcgcggggatcatcgccgtggacctcgccagggacctgctgcagtgccaccggggcacctacgccgtggtggtcagcacggagaacatcaccctcaactggtacctgggcaacgaccgctccatgctggtgtccaactgcctgttccgcatgggcggcgcggcgctcctgctgtcgaaccgcggctcggcgcggcgccggtccaagtaccagctggtgcacacggtgcgcacgcacagggccgccgacgaccgctgcttcggct

SEQ ID NO: 17840 - protein, 320 aa, Zea mays subsp. mays
  peptide (1)..(320): Ceres Seq. ID no. 12355073
  misc_feature (176)..(289): Pfam Name: Chalcone and stilbene synthases, N-terminal domain Pfam Description: Chalcone and stilbene synthases, N-terminal
  misc_feature (14)..(319): Homolog of NCBI NO: 18377979 NR Description: putative beta-ketoacyl-CoA synthase [Arabidopsis
  misc_feature (14)..(319): Homolog of NCBI NO: 15219676 NR Description: putative beta-ketoacyl-CoA synthase; protein id:
  misc_feature (14)..(319): Homolog of NCBI NO: 15223556 NR Description: very-long-chain fatty acid condensing enzyme
  misc_feature (12)..(319): Homolog of NCBI NO: 15239981 NR Description: beta-ketoacyl-CoA synthase
  misc_feature (12)..(319): Homolog of NCBI NO: 14334714 NR Description: putative beta-ketoacyl-CoA synthase [Arabidopsis
  misc_feature (8)..(319): Homolog of NCBI NO: 1045614 NR Description: beta-ketoacyl-CoA synthase
  misc_feature (9)..(319): Homolog of NCBI NO: 11066477 NR Description: fatty acid elongase 1-like protein [Limnanthes
  misc_feature (14)..(319): Homolog of NCBI NO: 29417540 NR Description: beta-ketoacyl-CoA-synthase [Marchantia polymorpha]
  misc_feature (1)..(319): Homolog of NCBI NO: 15225767 NR Description: putative beta-ketoacyl-CoA synthase; protein id:
  misc_feature (16)..(319): Homolog of NCBI NO: 9714501 NR Description: putative fatty acid elongase [Zea mays]
MADDDPRTTAASSMPDFKQSVKLKYVKLGYHHLISHGAYLLLAPLPGLVAAHLSTFTARDLAELWQSLQYNLASVLVATTALVTATAYALTRPRPVYLVDFACYRPRDERRCSRARFMNCTESLGTFTPENVEFQRRIIERSGLGEDTYLPEAVLNIPPNPSMASAREEAEMVMFGALDELFAKTGVRPKEIGVLVVNCSLFNPTPSLSAMVVNHYRLRGNVASYNLGGMGCSAGIIAVDLARDLLQCHRGTYAVVVSTENITLNWYLGNDRSMLVSNCLFRMGGAALLLSNRGSARRRSKYQLVHTVRTHRAADDRCFG

SEQ ID NO: 17841 - protein, 307 aa, Zea mays subsp. mays
  peptide (1)..(307): Ceres Seq. ID no. 12355074
  misc_feature (163)..(276): Pfam Name: Chalcone and stilbene synthases, N-terminal domain Pfam Description: Chalcone and stilbene synthases, N-terminal
  misc_feature (1)..(306): Homolog of NCBI NO: 15239981 NR Description: beta-ketoacyl-CoA synthase
  misc_feature (1)..(306): Homolog of NCBI NO: 14334714 NR Description: putative beta-ketoacyl-CoA synthase [Arabidopsis
  misc_feature (1)..(306): Homolog of NCBI NO: 1045614 NR Description: beta-ketoacyl-CoA synthase
  misc_feature (1)..(306): Homolog of NCBI NO: 11066477 NR Description: fatty acid elongase 1-like protein [Limnanthes
  misc_feature (1)..(306): Homolog of NCBI NO: 15219676 NR Description: putative beta-ketoacyl-CoA synthase; protein id:
  misc_feature (1)..(306): Homolog of NCBI NO: 15223556 NR Description: very-long-chain fatty acid condensing enzyme
  misc_feature (1)..(306): Homolog of NCBI NO: 18377979 NR Description: putative beta-ketoacyl-CoA synthase [Arabidopsis
  misc_feature (1)..(306): Homolog of NCBI NO: 29417540 NR Description: beta-ketoacyl-CoA-synthase [Marchantia polymorpha]
  misc_feature (1)..(306): Homolog of NCBI NO: 15225767 NR Description: putative beta-ketoacyl-CoA synthase; protein id:
  misc_feature (3)..(306): Homolog of NCBI NO: 9714501 NR Description: putative fatty acid elongase [Zea mays]
MPDFKQSVKLKYVKLGYHHLISHGAYLLLAPLPGLVAAHLSTFTARDLAELWQSLQYNLASVLVATTALVTATAYALTRPRPVYLVDFACYRPRDERRCSRARFMNCTESLGTFTPENVEFQRRIIERSGLGEDTYLPEAVLNIPPNPSMASAREEAEMVMFGALDELFAKTGVRPKEIGVLVVNCSLFNPTPSLSAMVVNHYRLRGNVASYNLGGMGCSAGIIAVDLARDLLQCHRGTYAVVVSTENITLNWYLGNDRSMLVSNCLFRMGGAALLLSNRGSARRRSKYQLVHTVRTHRAADDRCFG

SEQ ID NO: 17842 - protein, 203 aa, Zea mays subsp. mays
  peptide (1)..(203): Ceres Seq. ID no. 12355075
  misc_feature (59)..(172): Pfam Name: Chalcone and stilbene synthases, N-terminal domain Pfam Description: Chalcone and stilbene synthases, N-terminal
  misc_feature (1)..(202): Homolog of NCBI NO: 18377979 NR Description: putative beta-ketoacyl-CoA synthase [Arabidopsis
  misc_feature (1)..(202): Homolog of NCBI NO: 15219676 NR Description: putative beta-ketoacyl-CoA synthase; protein id:
  misc_feature (1)..(202): Homolog of NCBI NO: 15223556 NR Description: very-long-chain fatty acid condensing enzyme
  misc_feature (1)..(202): Homolog of NCBI NO: 15239981 NR Description: beta-ketoacyl-CoA synthase
  misc_feature (1)..(202): Homolog of NCBI NO: 14334714 NR Description: putative beta-ketoacyl-CoA synthase [Arabidopsis
  misc_feature (1)..(202): Homolog of NCBI NO: 1045614 NR Description: beta-ketoacyl-CoA synthase
  misc_feature (1)..(202): Homolog of NCBI NO: 11066477 NR Description: fatty acid elongase 1-like protein [Limnanthes
  misc_feature (1)..(202): Homolog of NCBI NO: 29417540 NR Description: beta-ketoacyl-CoA-synthase [Marchantia polymorpha]
  misc_feature (1)..(202): Homolog of NCBI NO: 15225767 NR Description: putative beta-ketoacyl-CoA synthase; protein id:
  misc_feature (1)..(202): Homolog of NCBI NO: 9714501 NR Description: putative fatty acid elongase [Zea mays]
MNCTESLGTFTPENVEFQRRIIERSGLGEDTYLPEAVLNIPPNPSMASAREEAEMVMFGALDELFAKTGVRPKEIGVLVVNCSLFNPTPSLSAMVVNHYRLRGNVASYNLGGMGCSAGIIAVDLARDLLQCHRGTYAVVVSTENITLNWYLGNDRSMLVSNCLFRMGGAALLLSNRGSARRRSKYQLVHTVRTHRAADDRCFG

SEQ ID NO: 17843 - DNA, 897 bp, Zea mays subsp. mays
  misc_feature (1)..(897): Ceres Seq. ID no. 12359231
  misc_feature: MA Experiment ID: 108504 Result: Up-regulated in Transcription
  misc_feature: MA Experiment 108504 PARAMETER Experiment Name: Zm_Drought_P Parameter: Age (day) Value: 8
  misc_feature: MA Experiment 108504 PARAMETER Experiment Name: Zm_Drought_P Parameter: Organism Value: Zea mays
  misc_feature: MA Experiment 108504 PARAMETER Experiment Name: Zm_Drought_P Parameter: Plant Line Value: 35A19
  misc_feature: MA Experiment 108504 PARAMETER Experiment Name: Zm_Drought_P Parameter: Timepoint (hr) Value: 12
  misc_feature: MA Experiment 108504 PARAMETER Experiment Name: Zm_Drought_P Parameter: Tissue Value: Aerial
  misc_feature: MA Experiment 108504 PARAMETER Experiment Name: Zm_Drought_P Parameter: Treatment Value: Drought vs. No Drought
  misc_feature: MA Experiment ID: 108543 Result: Up-regulated in Transcription
  misc_feature: MA Experiment ID: 108556 Result: Up-regulated in Transcription
  misc_feature: MA Experiment 108556 PARAMETER Experiment Name: Zm_Drought_P Parameter: Age (day) Value: 9
  misc_feature: MA Experiment 108556 PARAMETER Experiment Name: Zm_Drought_P Parameter: Organism Value: Zea mays
  misc_feature: MA Experiment 108556 PARAMETER Experiment Name: Zm_Drought_P Parameter: Plant Line Value: 35A19
  misc_feature: MA Experiment 108556 PARAMETER Experiment Name: Zm_Drought_P Parameter: Timepoint (hr) Value: 24
  misc_feature: MA Experiment 108556 PARAMETER Experiment Name: Zm_Drought_P Parameter: Tissue Value: Aerial
  misc_feature: MA Experiment 108556 PARAMETER Experiment Name: Zm_Drought_P Parameter: Treatment Value: Drought vs. No Drought
  misc_feature: MA Experiment ID: 108597 Result: Up-regulated in Transcription
  misc_feature: MA Experiment 108597 PARAMETER Experiment Name: Zm_100uM_ABA_P Parameter: Age (day) Value: 9
  misc_feature: MA Experiment 108597 PARAMETER Experiment Name: Zm_100uM_ABA_P Parameter: Organism Value: Zea mays
  misc_feature: MA Experiment 108597 PARAMETER Experiment Name: Zm_100uM_ABA_P Parameter: Plant Line Value: 35A19
  misc_feature: MA Experiment 108597 PARAMETER Experiment Name: Zm_100uM_ABA_P Parameter: Timepoint (hr) Value: 24
  misc_feature: MA Experiment 108597 PARAMETER Experiment Name: Zm_100uM_ABA_P Parameter: Tissue Value: Aerial
  misc_feature: MA Experiment 108597 PARAMETER Experiment Name: Zm_100uM_ABA_P Parameter: Treatment Value: 100uM ABA vs. No Treatment
  misc_feature: MA Experiment ID: 108687 Result: Down-regulated in Transcription
  misc_feature: MA Experiment 108687 PARAMETER Experiment Name: Zm_Embryos-Flowers__P Parameter: Tissue Value: Embryo vs. Aerial+
  misc_feature: MA Experiment ID: 20000479 Result: Up-regulated in Transcription
  misc_feature: MA Experiment 20000479 PARAMETER Experiment Name: Zm_Drought_P Parameter: Age (day) Value: 10
  misc_feature: MA Experiment 20000479 PARAMETER Experiment Name: Zm_Drought_P Parameter: Organism Value: Zea mays
  misc_feature: MA Experiment 20000479 PARAMETER Experiment Name: Zm_Drought_P Parameter: Plant Line Value: 35A19
  misc_feature: MA Experiment 20000479 PARAMETER Experiment Name: Zm_Drought_P Parameter: Timepoint (hr) Value: 48
  misc_feature: MA Experiment 20000479 PARAMETER Experiment Name: Zm_Drought_P Parameter: Tissue Value: Aerial
  misc_feature: MA Experiment 20000479 PARAMETER Experiment Name: Zm_Drought_P Parameter: Treatment Value: Drought vs. No Drought
  misc_feature: MA Experiment ID: 20000480 Result: Up-regulated in Transcription
  misc_feature: MA Experiment 20000480 PARAMETER Experiment Name: Zm_Drought_P Parameter: Age (day) Value: 11
  misc_feature: MA Experiment 20000480 PARAMETER Experiment Name: Zm_Drought_P Parameter: Organism Value: Zea mays
  misc_feature: MA Experiment 20000480 PARAMETER Experiment Name: Zm_Drought_P Parameter: Plant Line Value: 35A19
  misc_feature: MA Experiment 20000480 PARAMETER Experiment Name: Zm_Drought_P Parameter: Timepoint (hr) Value: 72
  misc_feature: MA Experiment 20000480 PARAMETER Experiment Name: Zm_Drought_P Parameter: Tissue Value: Aerial
  misc_feature: MA Experiment 20000480 PARAMETER Experiment Name: Zm_Drought_P Parameter: Treatment Value: Drought vs. No Drought
ataaacccaaacctcctcgtcctctgtcagactaccactctctccctcgcggactcgcggttgattcctcgcggcggattcgcatcttccgcgtcagggacagggagagtactccgtcggacggttggaggagaacagggagaggagctctgagatggagacggccgcctcggcagcgcgcctggtgaactacccgctcgtcgcggcgcttctcgcgttcgccgtcgcgcagtcctccaagttcttcaccacctggttcaaagatggccggtgggatgccagacagtttatagcttctggagggatgccatcatcccactcagctacagtgacagcactcgcagtggctgtggcgatacaagaaggctttcatagtgcaacctttgcaactgcactagtctttgcatgcgtggttatgcatgatgcttttggagttcggttacatgccggaaagcaggcagaggtgctgaatcaaattgtctatgagctaccagaagaacacccattatcagagacaaagccattgcgtgaaatccttggacatactgttcctcaggttgtggccggttgcatccttggagttctcatggctgccgttatgcacctgtctctcgggagttcttagtcaactgttgttcatggatgtcatgacagatgatcacctaatgtctcgctggtgatggctataaagcatgaagcatgatctccgcatggatctggttgtccaagtgtttggtagtacgaagttctaaccgatttagttctggacagtaggatataggttgtgtagcttgaatcggttactgtaaatctgaaaggttttgctttcaactccaactaccaatcacggtgtaatggaagctttgttatacaatcaacagcagtaaattcattctg

SEQ ID NO: 17844 - protein, 156 aa, Zea mays subsp. mays
  peptide (1)..(156): Ceres Seq. ID no. 12359232
  misc_feature (12)..(151): Pfam Name: Divergent PAP2 family Pfam Description: Divergent PAP2 family
  misc_feature (12)..(152): Homolog of NCBI NO: 30686309 NR Description: expressed protein [Arabidopsis thaliana]
  misc_feature (1)..(135): Homolog of NCBI NO: 26449729 NR Description: unknown protein [Arabidopsis thaliana]
  misc_feature (1)..(135): Homolog of NCBI NO: 9743358 NR Description: F21J9.1 [Arabidopsis thaliana]
  misc_feature (1)..(156): Homolog of NCBI NO: 7486375 NR Description: hypothetical protein F3I6.29 - Arabidopsis
  misc_feature (1)..(135): Homolog of NCBI NO: 12324675 NR Description: unknown protein [Arabidopsis thaliana]
  misc_feature (1)..(151): Homolog of NCBI NO: 21555270 NR Description: unknown [Arabidopsis thaliana]
  misc_feature (1)..(151): Homolog of NCBI NO: 18395459 NR Description: expressed protein
  misc_feature (1)..(151): Homolog of NCBI NO: 15220480 NR Description: F12A21.27; protein id: At1g67600.1, supported by
  misc_feature (5)..(141): Homolog of NCBI NO: 29150195 NR Description: putative protein [Oryza sativa (indica
  misc_feature (5)..(156): Homolog of NCBI NO: 38344227 NR Description: OJ991113_30.3 [Oryza sativa (japonica
METAASAARLVNYPLVAALLAFAVAQSSKFFTTWFKDGRWDARQFIASGGMPSSHSATVTALAVAVAIQEGFHSATFATALVFACVVMHDAFGVRLHAGKQAEVLNQIVYELPEEHPLSETKPLREILGHTVPQVVAGCILGVLMAAVMHLSLGSS

SEQ ID NO: 17845 - protein, 106 aa, Zea mays subsp. mays
  peptide (1)..(106): Ceres Seq. ID no. 12359233
  misc_feature (1)..(101): Pfam Name: Divergent PAP2 family Pfam Description: Divergent PAP2 family
  misc_feature (1)..(102): Homolog of NCBI NO: 30686309 NR Description: expressed protein [Arabidopsis thaliana]
  misc_feature (1)..(85): Homolog of NCBI NO: 26449729 NR Description: unknown protein [Arabidopsis thaliana]
  misc_feature (1)..(85): Homolog of NCBI NO: 9743358 NR Description: F21J9.1 [Arabidopsis thaliana]
  misc_feature (1)..(106): Homolog of NCBI NO: 7486375 NR Description: hypothetical protein F3I6.29 - Arabidopsis
  misc_feature (1)..(85): Homolog of NCBI NO: 12324675 NR Description: unknown protein [Arabidopsis thaliana]
  misc_feature (1)..(101): Homolog of NCBI NO: 21555270 NR Description: unknown [Arabidopsis thaliana]
  misc_feature (1)..(101): Homolog of NCBI NO: 18395459 NR Description: expressed protein
  misc_feature (1)..(101): Homolog of NCBI NO: 15220480 NR Description: F12A21.27; protein id: At1g67600.1, supported by
  misc_feature (1)..(91): Homolog of NCBI NO: 29150195 NR Description: putative protein [Oryza sativa (indica
  misc_feature (1)..(106): Homolog of NCBI NO: 38344227 NR Description: OJ991113_30.3 [Oryza sativa (japonica
MPSSHSATVTALAVAVAIQEGFHSATFATALVFACVVMHDAFGVRLHAGKQAEVLNQIVYELPEEHPLSETKPLREILGHTVPQVVAGCILGVLMAAVMHLSLGSS

SEQ ID NO: 17846 - DNA, 1688 bp, Zea mays subsp. mays
  misc_feature (1)..(1688): Ceres Seq. ID no. 12415179
  misc_feature: MA Experiment ID: 108527 Result: Up-regulated in Transcription
  misc_feature: MA Experiment 108527 PARAMETER Experiment Name: Zm_5mM_NO_P Parameter: Age (day) Value: 8
  misc_feature: MA Experiment 108527 PARAMETER Experiment Name: Zm_5mM_NO_P Parameter: Organism Value: Zea mays
  misc_feature: MA Experiment 108527 PARAMETER Experiment Name: Zm_5mM_NO_P Parameter: Plant Line Value: 35A19
  misc_feature: MA Experiment 108527 PARAMETER Experiment Name: Zm_5mM_NO_P Parameter: Timepoint (hr) Value: 6
  misc_feature: MA Experiment 108527 PARAMETER Experiment Name: Zm_5mM_NO_P Parameter: Tissue Value: Aerial
  misc_feature: MA Experiment 108527 PARAMETER Experiment Name: Zm_5mM_NO_P Parameter: Treatment Value: 5mM NO vs. No Treatment
  misc_feature: MA Experiment ID: 108529 Result: Down-regulated in Transcription
  misc_feature: MA Experiment 108529 PARAMETER Experiment Name: Zm_Imbibed_Seeds_P Parameter: Age (day) Value: 5 vs. 2
  misc_feature: MA Experiment 108529 PARAMETER Experiment Name: Zm_Imbibed_Seeds_P Parameter: Organism Value: Zea mays
  misc_feature: MA Experiment 108529 PARAMETER Experiment Name: Zm_Imbibed_Seeds_P Parameter: Plant Line Value: 35A19
  misc_feature: MA Experiment 108529 PARAMETER Experiment Name: Zm_Imbibed_Seeds_P Parameter: Tissue Value: Roots vs. Embryo
  misc_feature: MA Experiment ID: 108543 Result: Down-regulated in Transcription
  misc_feature: MA Experiment ID: 108544 Result: Down-regulated in Transcription
  misc_feature: MA Experiment ID: 108559 Result: Up-regulated in Transcription
  misc_feature: MA Experiment 108559 PARAMETER Experiment Name: Zm_5mM_NO_P Parameter: Age (day) Value: 8
  misc_feature: MA Experiment 108559 PARAMETER Experiment Name: Zm_5mM_NO_P Parameter: Organism Value: Zea mays
  misc_feature: MA Experiment 108559 PARAMETER Experiment Name: Zm_5mM_NO_P Parameter: Plant Line Value: 35A19
  misc_feature: MA Experiment 108559 PARAMETER Experiment Name: Zm_5mM_NO_P Parameter: Timepoint (hr) Value: 12
  misc_feature: MA Experiment 108559 PARAMETER Experiment Name: Zm_5mM_NO_P Parameter: Tissue Value: Aerial
  misc_feature: MA Experiment 108559 PARAMETER Experiment Name: Zm_5mM_NO_P Parameter: Treatment Value: 5mM NO vs. No Treatment
  misc_feature: MA Experiment ID: 108689 Result: Down-regulated in Transcription
  misc_feature: MA Experiment 108689 PARAMETER Experiment Name: Zm_Drought_Roots_P Parameter: Age (day) Value: 9
  misc_feature: MA Experiment 108689 PARAMETER Experiment Name: Zm_Drought_Roots_P Parameter: Organism Value: Zea mays
  misc_feature: MA Experiment 108689 PARAMETER Experiment Name: Zm_Drought_Roots_P Parameter: Plant Line Value: 35A19
  misc_feature: MA Experiment 108689 PARAMETER Experiment Name: Zm_Drought_Roots_P Parameter: Timepoint (hr) Value: 24
  misc_feature: MA Experiment 108689 PARAMETER Experiment Name: Zm_Drought_Roots_P Parameter: Tissue Value: Roots
  misc_feature: MA Experiment 108689 PARAMETER Experiment Name: Zm_Drought_Roots_P Parameter: Treatment Value: Drought vs. No Drought
  misc_feature: MA Experiment ID: 20000535 Result: Up-regulated in Transcription
  misc_feature: MA Experiment 20000535 PARAMETER Experiment Name: Zm_Hybrid_Seed_Dev_P Parameter: DAP Value: 30 vs. 12
  misc_feature: MA Experiment 20000535 PARAMETER Experiment Name: Zm_Hybrid_Seed_Dev_P Parameter: Organism Value: Zea mays
  misc_feature: MA Experiment 20000535 PARAMETER Experiment Name: Zm_Hybrid_Seed_Dev_P Parameter: Plant Line Value: 35A19
  misc_feature: MA Experiment 20000535 PARAMETER Experiment Name: Zm_Hybrid_Seed_Dev_P Parameter: Tissue Value: Embryo vs. Unfert Floret
  misc_feature: MA Experiment ID: 20000626 Result: Up-regulated in Transcription
  misc_feature: MA Experiment 20000626 PARAMETER Experiment Name: Zm_Herbicide-Treatments_P Parameter: Timepoint (hr) Value: 12
  misc_feature: MA Experiment 20000626 PARAMETER Experiment Name: Zm_Herbicide-Treatments_P Parameter: Tissue Value: Aerial
  misc_feature: MA Experiment 20000626 PARAMETER Experiment Name: Zm_Herbicide-Treatments_P Parameter: Treatment Value: Roundup vs. No Treatment
  misc_feature: MA Experiment ID: 20000627 Result: Up-regulated in Transcription
  misc_feature: MA Experiment 20000627 PARAMETER Experiment Name: Zm_Herbicide-Treatments_P Parameter: Timepoint (hr) Value: 12
  misc_feature: MA Experiment 20000627 PARAMETER Experiment Name: Zm_Herbicide-Treatments_P Parameter: Tissue Value: Aerial
  misc_feature: MA Experiment 20000627 PARAMETER Experiment Name: Zm_Herbicide-Treatments_P Parameter: Treatment Value: Finale vs. No Treatment
  misc_feature: MA Experiment ID: 20000630 Result: Up-regulated in Transcription
  misc_feature: MA Experiment 20000630 PARAMETER Experiment Name: Zm_Herbicide-Treatments_P Parameter: Timepoint (hr) Value: 4
  misc_feature: MA Experiment 20000630 PARAMETER Experiment Name: Zm_Herbicide-Treatments_P Parameter: Tissue Value: Aerial
  misc_feature: MA Experiment 20000630 PARAMETER Experiment Name: Zm_Herbicide-Treatments_P Parameter: Treatment Value: Roundup vs. No Treatment
cccgcaccgcatcccattccgtgccaccgccgccgcgctgcgtctgcgtgcgtcgcccgcccgcccgcccgcagtgtccgcagccagagccagcgcacgcgctgctccgccgacgccgaagcctcgtccgcgagcgcgtggctaagcaagcactcgagtcgagctccctccagcggcgggcgcagtgcagccaggccgcgcgcgccgcagcatgaacggcgtcggcgacgcgcacgcggccgtggccgcggccgccatggtgcagcagacgctggggatgtcgctgccgatggcggcgttcgtgcccgagcattgcagcgccaataagctggccaggccgccggggctgccgccgctgccgcaggcgttcgtggcccagcagcgcggggacgtgtgcatggaggccgccgaccccgccgctggcccgcgcaaggcgcaccggcgctcccgcagcgacgtcccgttcggctacttcccgccggcgggccaccaccagctcccgccgcccaaggtggaggccggctggggcggccacctccccgccggcggcggcgacgacgacctgttcaacgcgtacctcaacctggaggggctggacgggctcaactcctccgacgaccgcctggacgacggggacagccgcggcagcagcatgaggaccaacggcgccgacagcagcgagaacgagtcggaggagtgcgccgccgacagccgcgccgggatccgcctctgcgccgccgctgccgacaggcgggaggggctcaagagggccgccgctgcgcccgtgccgcgccacgccaggagcctgtccatggacagcctcatcggcaagctcaacttctccgccggcgcgacgggcgccgccagcggcgtcattccggggcccaacaggttcagcctcgagttcggcagtgccgagttttcgccggtcgagatgaagaagatcatggccgacgagaagctggccgagatggcgctcgccgaccccaagcgcgtcaagagggtgctggccaacaggcagtcggcggcgcggtccaaggagcgcaagatgcgatacattggcgagctggagcacaaggtgcagatcctgcagacggaggccaccactctctccgcccagctcacgcttcttcagcgggactccgcggggatcgcgacgcagaacaacgagctcaagttccggctgcaggccatggagcagcaggcgcagctgcgtgacgcattgaatgaggcactgacagccgaggtccaacgcctgaagctcgcgaccgcagagctcggggattcttgctcgtccagcaacctagctcagcagatccaaatcagcgttcaggaccagatgtttcaactgcatcagcagcaggcaacgcctataccgttctaccagctgcagcaggcgcagcagaatggcgcagggaagaagcatgagccgacggaatgatctcagagctgccattatccaccgctgcgtgagcagggggaaaaaaggatcggtttcgatggactgaaagcatttcttttcctaactcattggttttaagtgtcgttaataagcaccgtgcatttttttttccaggtgatgaacctgctgcttgtacctgtttatttattctttggatgattcagttgcttgagttgccaaactgatcaaattgtagccggttaatattcttttatagttgtagtgc

SEQ ID NO: 17847 - protein, 409 aa, Zea mays subsp. mays
  peptide (1)..(409): Ceres Seq. ID no. 12415180
  misc_feature (256)..(320): Pfam Name: bZIP transcription factor Pfam Description: bZIP transcription factor
  misc_feature (126)..(409): Homolog of NCBI NO: 30692108 NR Description: bZIP protein [Arabidopsis thaliana]
  misc_feature (126)..(409): Homolog of NCBI NO: 19423874 NR Description: unknown protein [Arabidopsis thaliana]
  misc_feature (110)..(401): Homolog of NCBI NO: 3425907 NR Description: transcription factor VSF-1 [Lycopersicon
  misc_feature (110)..(401): Homolog of NCBI NO: 1838976 NR Description: vsf-1 [Lycopersicon esculentum]
  misc_feature (110)..(401): Homolog of NCBI NO: 1076603 NR Description: vsf-1 protein - tomato
  misc_feature (44)..(99): Homolog of NCBI NO: 15226487 NR Description: bZIP family transcription factor
  misc_feature (89)..(405): Homolog of NCBI NO: 15226487 NR Description: bZIP family transcription factor
  misc_feature (26)..(406): Homolog of NCBI NO: 22213170 NR Description: putative transcription factor
  misc_feature (26)..(406): Homolog of NCBI NO: 37536376 NR Description: putative transcription factor
  misc_feature (3)..(409): Homolog of NCBI NO: 34902256 NR Description: Putative bZIP transcription factor
MNGVGDAHAAVAAAAMVQQTLGMSLPMAAFVPEHCSANKLARPPGLPPLPQAFVAQQRGDVCMEAADPAAGPRKAHRRSRSDVPFGYFPPAGHHQLPPPKVEAGWGGHLPAGGGDDDLFNAYLNLEGLDGLNSSDDRLDDGDSRGSSMRTNGADSSENESEECAADSRAGIRLCAAAADRREGLKRAAAAPVPRHARSLSMDSLIGKLNFSAGATGAASGVIPGPNRFSLEFGSAEFSPVEMKKIMADEKLAEMALADPKRVKRVLANRQSAARSKERKMRYIGELEHKVQILQTEATTLSAQLTLLQRDSAGIATQNNELKFRLQAMEQQAQLRDALNEALTAEVQRLKLATAELGDSCSSSNLAQQIQISVQDQMFQLHQQQATPIPFYQLQQAQQNGAGKKHEPTE

SEQ ID NO: 17848 - protein, 394 aa, Zea mays subsp. mays
  peptide (1)..(394): Ceres Seq. ID no. 12415181
  misc_feature (241)..(305): Pfam Name: bZIP transcription factor Pfam Description: bZIP transcription factor
  misc_feature (111)..(394): Homolog of NCBI NO: 30692108 NR Description: bZIP protein [Arabidopsis thaliana]
  misc_feature (111)..(394): Homolog of NCBI NO: 19423874 NR Description: unknown protein [Arabidopsis thaliana]
  misc_feature (95)..(386): Homolog of NCBI NO: 3425907 NR Description: transcription factor VSF-1 [Lycopersicon
  misc_feature (95)..(386): Homolog of NCBI NO: 1838976 NR Description: vsf-1 [Lycopersicon esculentum]
  misc_feature (95)..(386): Homolog of NCBI NO: 1076603 NR Description: vsf-1 protein - tomato
  misc_feature (29)..(84): Homolog of NCBI NO: 15226487 NR Description: bZIP family transcription factor
  misc_feature (74)..(390): Homolog of NCBI NO: 15226487 NR Description: bZIP family transcription factor
  misc_feature (11)..(391): Homolog of NCBI NO: 22213170 NR Description: putative transcription factor
  misc_feature (11)..(391): Homolog of NCBI NO: 37536376 NR Description: putative transcription factor
  misc_feature (1)..(394): Homolog of NCBI NO: 34902256 NR Description: Putative bZIP transcription factor
MVQQTLGMSLPMAAFVPEHCSANKLARPPGLPPLPQAFVAQQRGDVCMEAADPAAGPRKAHRRSRSDVPFGYFPPAGHHQLPPPKVEAGWGGHLPAGGGDDDLFNAYLNLEGLDGLNSSDDRLDDGDSRGSSMRTNGADSSENESEECAADSRAGIRLCAAAADRREGLKRAAAAPVPRHARSLSMDSLIGKLNFSAGATGAASGVIPGPNRFSLEFGSAEFSPVEMKKIMADEKLAEMALADPKRVKRVLANRQSAARSKERKMRYIGELEHKVQILQTEATTLSAQLTLLQRDSAGIATQNNELKFRLQAMEQQAQLRDALNEALTAEVQRLKLATAELGDSCSSSNLAQQIQISVQDQMFQLHQQQATPIPFYQLQQAQQNGAGKKHEPTE

SEQ ID NO: 17849 - protein, 387 aa, Zea mays subsp. mays
  peptide (1)..(387): Ceres Seq. ID no. 12415182
  misc_feature (234)..(298): Pfam Name: bZIP transcription factor Pfam Description: bZIP transcription factor
  misc_feature (104)..(387): Homolog of NCBI NO: 30692108 NR Description: bZIP protein [Arabidopsis thaliana]
  misc_feature (104)..(387): Homolog of NCBI NO: 19423874 NR Description: unknown protein [Arabidopsis thaliana]
  misc_feature (88)..(379): Homolog of NCBI NO: 3425907 NR Description: transcription factor VSF-1 [Lycopersicon
  misc_feature (88)..(379): Homolog of NCBI NO: 1838976 NR Description: vsf-1 [Lycopersicon esculentum]
  misc_feature (88)..(379): Homolog of NCBI NO: 1076603 NR Description: vsf-1 protein - tomato
  misc_feature (22)..(77): Homolog of NCBI NO: 15226487 NR Description: bZIP family transcription factor
  misc_feature (67)..(383): Homolog of NCBI NO: 15226487 NR Description: bZIP family transcription factor
  misc_feature (4)..(384): Homolog of NCBI NO: 22213170 NR Description: putative transcription factor
  misc_feature (4)..(384): Homolog of NCBI NO: 37536376 NR Description: putative transcription factor
  misc_feature (1)..(387): Homolog of NCBI NO: 34902256 NR Description: Putative bZIP transcription factor
MSLPMAAFVPEHCSANKLARPPGLPPLPQAFVAQQRGDVCMEAADPAAGPRKAHRRSRSDVPFGYFPPAGHHQLPPPKVEAGWGGHLPAGGGDDDLFNAYLNLEGLDGLNSSDDRLDDGDSRGSSMRTNGADSSENESEECAADSRAGIRLCAAAADRREGLKRAAAAPVPRHARSLSMDSLIGKLNFSAGATGAASGVIPGPNRFSLEFGSAEFSPVEMKKIMADEKLAEMALADPKRVKRVLANRQSAARSKERKMRYIGELEHKVQILQTEATTLSAQLTLLQRDSAGIATQNNELKFRLQAMEQQAQLRDALNEALTAEVQRLKLATAELGDSCSSSNLAQQIQISVQDQMFQLHQQQATPIPFYQLQQAQQNGAGKKHEPTE

SEQ ID NO: 17850 - DNA, 1570 bp, Zea mays subsp. mays
  misc_feature (1)..(1570): Ceres Seq. ID no. 12363375
  misc_feature: MA Experiment ID: 108523 Result: Up-regulated in Transcription
  misc_feature: MA Experiment 108523 PARAMETER Experiment Name: Zm_42deg_Heat_P Parameter: Age (day) Value: 8
  misc_feature: MA Experiment 108523 PARAMETER Experiment Name: Zm_42deg_Heat_P Parameter: Organism Value: Zea mays
  misc_feature: MA Experiment 108523 PARAMETER Experiment Name: Zm_42deg_Heat_P Parameter: Plant Line Value: 35A19
  misc_feature: MA Experiment 108523 PARAMETER Experiment Name: Zm_42deg_Heat_P Parameter: Temperature (deg C) Value: 42 vs. 22
  misc_feature: MA Experiment 108523 PARAMETER Experiment Name: Zm_42deg_Heat_P Parameter: Timepoint (hr) Value: 6
  misc_feature: MA Experiment 108523 PARAMETER Experiment Name: Zm_42deg_Heat_P Parameter: Tissue Value: Aerial
  misc_feature: MA Experiment ID: 108528 Result: Down-regulated in Transcription
  misc_feature: MA Experiment 108528 PARAMETER Experiment Name: Zm_Imbibed_Seeds_P Parameter: Age (day) Value: 5 vs. 2
  misc_feature: MA Experiment 108528 PARAMETER Experiment Name: Zm_Imbibed_Seeds_P Parameter: Organism Value: Zea mays
  misc_feature: MA Experiment 108528 PARAMETER Experiment Name: Zm_Imbibed_Seeds_P Parameter: Plant Line Value: 35A19
  misc_feature: MA Experiment 108528 PARAMETER Experiment Name: Zm_Imbibed_Seeds_P Parameter: Tissue Value: Aerial vs. Embryo
  misc_feature: MA Experiment ID: 108530 Result: Down-regulated in Transcription
  misc_feature: MA Experiment 108530 PARAMETER Experiment Name: Zm_Imbibed_Seeds_P Parameter: Age (day) Value: 6 vs. 2
  misc_feature: MA Experiment 108530 PARAMETER Experiment Name: Zm_Imbibed_Seeds_P Parameter: Organism Value: Zea mays
  misc_feature: MA Experiment 108530 PARAMETER Experiment Name: Zm_Imbibed_Seeds_P Parameter: Plant Line Value: 35A19
  misc_feature: MA Experiment 108530 PARAMETER Experiment Name: Zm_Imbibed_Seeds_P Parameter: Tissue Value: Aerial vs. Embryo
  misc_feature: MA Experiment ID: 20000479 Result: Down-regulated in Transcription
  misc_feature: MA Experiment 20000479 PARAMETER Experiment Name: Zm_Drought_P Parameter: Age (day) Value: 10
  misc_feature: MA Experiment 20000479 PARAMETER Experiment Name: Zm_Drought_P Parameter: Organism Value: Zea mays
  misc_feature: MA Experiment 20000479 PARAMETER Experiment Name: Zm_Drought_P Parameter: Plant Line Value: 35A19
  misc_feature: MA Experiment 20000479 PARAMETER Experiment Name: Zm_Drought_P Parameter: Timepoint (hr) Value: 48
  misc_feature: MA Experiment 20000479 PARAMETER Experiment Name: Zm_Drought_P Parameter: Tissue Value: Aerial
  misc_feature: MA Experiment 20000479 PARAMETER Experiment Name: Zm_Drought_P Parameter: Treatment Value: Drought vs. No Drought
  misc_feature: MA Experiment ID: 20000480 Result: Down-regulated in Transcription
  misc_feature: MA Experiment 20000480 PARAMETER Experiment Name: Zm_Drought_P Parameter: Age (day) Value: 11
  misc_feature: MA Experiment 20000480 PARAMETER Experiment Name: Zm_Drought_P Parameter: Organism Value: Zea mays
  misc_feature: MA Experiment 20000480 PARAMETER Experiment Name: Zm_Drought_P Parameter: Plant Line Value: 35A19
  misc_feature: MA Experiment 20000480 PARAMETER Experiment Name: Zm_Drought_P Parameter: Timepoint (hr) Value: 72
  misc_feature: MA Experiment 20000480 PARAMETER Experiment Name: Zm_Drought_P Parameter: Tissue Value: Aerial
  misc_feature: MA Experiment 20000480 PARAMETER Experiment Name: Zm_Drought_P Parameter: Treatment Value: Drought vs. No Drought
gcacgagaccattacctagaacatcctaatcaaaaatatataaaataatgtcctactcctaccccgccaccacgccgcggcagcacaagcccctctccgcccccagccagccctcctcagatctcaatcccggcgctccctccctccctcctcgcctcgggacagcgagcgccgccgtccgccgtccatggagcacgacgccgaggcgcgccgcgggttcgccaggatgggcttcgggtgcaagcactaccggaggcggtgccggatccgcgcgccctgctgcggcgacgtcttccactgccgccattgccacaacgagtccacgaaagacgggcacgagctggatcggcacgacgtccaatcggttatctgcctcgtctgtgacaccgagcagccgatcgcgcaggtgtgctgcaactgcggcgtctgcatgggggagtacttctgcgcagcctgcaacttcttggacgatgacgttgacaaggagcagttccattgcgacgattgcggcatctgcaggtgcgtgcgtgcgtgtgtctgtccctcttttttttgtttcttgttttcttttcttccttccattgcggtcactgagttacaggatctgagtcgccgcgcacaaatcgcgattttagtaggaaccccccccctctgattaactaactaagctactactacctattgatgatgatccaacaaagctgacagaaactgtggtgcatttgcatttgttcgaacagagtaggaggaaaggagaacttcttccactgccaaaagtgtggtaaaaaaataaacaaatccatcaccagccatattcaccacccgaggatgttctggtttcccatcaccagccatacatcatcctgttgttttttttctttacacacgcaggatcctgctactcgacgacccttcgcgacaggcactgctgcatcgagaactcgatgaagaacaactgccccatctgctacgaggcagtacctgttcgattcgctgagggagacgtcggtgctccgctgcggccacaccatgcacctggagtgcttccacgagatgttgaagcacgacaagttctcgtgccccatatgcgccacgcccatcttcgacatggacaagttcttcaaggccctcgacgcagagatggaggcaagctacttgtacacgggaaagggatgggtcgtgtgcaacgactgcagggacacgacgcaggtcttctccggcgtggcgggccacaagtgctgccactgccagtcccacaacacctgccgggtggcaccccccgtccttccgtagccaccaccaacaccacatcattgttgttggaattggatgcagccagccaagatacccccccagcagctacgctattattaccagtagcgcctgcgcttttacacaccgctccgttccagtccatgatgaactgcataatttcgtgccatgcaggtatgtacgtacactgtttggagatcggaagatttatccgactcgggacgtattatttgtaccacaacaaaacacgtgttactattgtaataccagatccggatatatacgaaactatttttag

SEQ ID NO: 17851 - protein, 208 aa, Zea mays subsp. mays
  peptide (1)..(208): Ceres Seq. ID no. 12363376
  misc_feature (1)..(12): Homolog of NCBI NO: 28703891 NR Description: Similar to zinc finger protein 363 [Homo sapiens]
  misc_feature (1)..(12): Homolog of NCBI NO: 24308061 NR Description: zinc finger protein 363
  misc_feature (1)..(12): Homolog of NCBI NO: 15419088 NR Description: CH-rich interacting match of PLAG1 [Mus musculus]
  misc_feature (1)..(12): Homolog of NCBI NO: 13386058 NR Description: androgen receptor N-terminal-interacting protein
  misc_feature (1)..(12): Homolog of NCBI NO: 18606337 NR Description: RIKEN cDNA 6720407C15 gene [Mus musculus]
  misc_feature (1)..(12): Homolog of NCBI NO: 13925695 NR Description: zinc finger protein [Danio rerio]
  misc_feature (1)..(12): Homolog of NCBI NO: 4105798 NR Description: PGPD14 [Petunia x hybrida]
MKNNCPICYEAVPVRFAEGDVGAPLRPHHAPGVLPRDVEARQVLVPHMRHAHLRHGQVLQGPRRRDGGKLLVHGKGMGRVQRLQGHDAGLLRRGGPQVLPLPVPQHLPGGTPRPSVATTNTTSLLLELDAASQDTPPAATLLLPVAPALLHTAPFQSMMNCIISCHAGMYVHCLEIGRFIRLGTYYLYHNKTRVTIVIPDPDIYETIF

SEQ ID NO: 17852 - protein, 186 aa, Zea mays subsp. mays
  peptide (1)..(186): Ceres Seq. ID no. 12363377
  misc_feature (17)..(159): Pfam Name: Equine herpesvirus glycoprotein gp2 Pfam Description: Equine herpesvirus glycoprotein gp2
  misc_feature (7)..(157): Homolog of NCBI NO: 11360494 NR Description: antifreeze glycopeptide AFGP polyprotein
  misc_feature (17)..(159): Homolog of NCBI NO: 17221106 NR Description: glycoprotein gp2 [Equine herpesvirus 1]
  misc_feature (2)..(159): Homolog of NCBI NO: 13592175 NR Description: ppg3 [Leishmania major]
  misc_feature (4)..(159): Homolog of NCBI NO: 17221106 NR Description: glycoprotein gp2 [Equine herpesvirus 1]
  misc_feature (4)..(159): Homolog of NCBI NO: 17221114 NR Description: glycoprotein gp2 [Equine herpesvirus 1]
  misc_feature (7)..(156): Homolog of NCBI NO: 11360494 NR Description: antifreeze glycopeptide AFGP polyprotein
  misc_feature (4)..(164): Homolog of NCBI NO: 17221106 NR Description: glycoprotein gp2 [Equine herpesvirus 1]
  misc_feature (8)..(166): Homolog of NCBI NO: 11360494 NR Description: antifreeze glycopeptide AFGP polyprotein
  misc_feature (4)..(164): Homolog of NCBI NO: 17221114 NR Description: glycoprotein gp2 [Equine herpesvirus 1]
  misc_feature (14)..(166): Homolog of NCBI NO: 11360494 NR Description: antifreeze glycopeptide AFGP polyprotein
MSYSYPATTPRQHKPLSAPSQPSSDLNPGAPSLPPRLGTASAAVRRPWSTTPRRAAGSPGWASGASTTGGGAGSARPAAATSSTAAIATTSPRKTGTSWIGTTSNRLSASSVTPSSRSRRCAATAASAWGSTSAQPATSWTMTLTRSSSIATIAASAGACVRVSVPLFFVSCFLFFLPLRSLSYRI

SEQ ID NO: 17853 - protein, 161 aa, Zea mays subsp. mays
  peptide (1)..(161): Ceres Seq. ID no. 12363378
MRHAHLRHGQVLQGPRRRDGGKLLVHGKGMGRVQRLQGHDAGLLRRGGPQVLPLPVPQHLPGGTPRPSVATTNTTSLLLELDAASQDTPPAATLLLPVAPALLHTAPFQSMMNCIISCHAGMYVHCLEIGRFIRLGTYYLYHNKTRVTIVIPDPDIYETIF

SEQ ID NO: 17854 - protein, 155 aa, Zea mays subsp. mays
  peptide (1)..(155): Ceres Seq. ID no. 12363379
  misc_feature (18)..(94): Pfam Name: CHY zinc finger Pfam Description: CHY zinc finger
  misc_feature (17)..(111): Homolog of NCBI NO: 13925695 NR Description: zinc finger protein [Danio rerio]
  misc_feature (14)..(111): Homolog of NCBI NO: 34910658 NR Description: putative PGPD14 protein (pollen germination
  misc_feature (17)..(111): Homolog of NCBI NO: 37535002 NR Description: putative PGPD14 protein (pollen germination
  misc_feature (1)..(111): Homolog of NCBI NO: 4105798 NR Description: PGPD14 [Petunia x hybrida]
  misc_feature (16)..(111): Homolog of NCBI NO: 21593716 NR Description: PGPD14 protein [Arabidopsis thaliana]
  misc_feature (3)..(111): Homolog of NCBI NO: 15237169 NR Description: PGPD14 protein
  misc_feature (9)..(111): Homolog of NCBI NO: 11358168 NR Description: hypothetical protein T20O10.70 - Arabidopsis
  misc_feature (9)..(111): Homolog of NCBI NO: 30695702 NR Description: expressed protein [Arabidopsis thaliana]
  misc_feature (9)..(111): Homolog of NCBI NO: 30102616 NR Description: At3g62970 [Arabidopsis thaliana]
  misc_feature (1)..(111): Homolog of NCBI NO: 15238890 NR Description: putative protein
MEHDAEARRGFARMGFGCKHYRRRCRIRAPCCGDVFHCRHCHNESTKDGHELDRHDVQSVICLVCDTEQPIAQVCCNCGVCMGEYFCAACNFLDDDVDKEQFHCDDCGICRCVRACVCPSFFCFLFSFLPSIAVTELQDLSRRAQIAILVGTPPL

SEQ ID NO: 17855 - DNA, 1396 bp, Zea mays subsp. mays
  misc_feature (1)..(1396): Ceres Seq. ID no. 12369569
  misc_feature: MA Experiment ID: 108504 Result: Up-regulated in Transcription
  misc_feature: MA Experiment 108504 PARAMETER Experiment Name: Zm_Drought_P Parameter: Age (day) Value: 8
  misc_feature: MA Experiment 108504 PARAMETER Experiment Name: Zm_Drought_P Parameter: Organism Value: Zea mays
  misc_feature: MA Experiment 108504 PARAMETER Experiment Name: Zm_Drought_P Parameter: Plant Line Value: 35A19
  misc_feature: MA Experiment 108504 PARAMETER Experiment Name: Zm_Drought_P Parameter: Timepoint (hr) Value: 12
  misc_feature: MA Experiment 108504 PARAMETER Experiment Name: Zm_Drought_P Parameter: Tissue Value: Aerial
  misc_feature: MA Experiment 108504 PARAMETER Experiment Name: Zm_Drought_P Parameter: Treatment Value: Drought vs. No Drought
  misc_feature: MA Experiment ID: 108522 Result: Down-regulated in Transcription
  misc_feature: MA Experiment 108522 PARAMETER Experiment Name: Zm_42deg_Heat_P Parameter: Age (day) Value: 8
  misc_feature: MA Experiment 108522 PARAMETER Experiment Name: Zm_42deg_Heat_P Parameter: Organism Value: Zea mays
  misc_feature: MA Experiment 108522 PARAMETER Experiment Name: Zm_42deg_Heat_P Parameter: Plant Line Value: 35A19
  misc_feature: MA Experiment 108522 PARAMETER Experiment Name: Zm_42deg_Heat_P Parameter: Temperature (deg C) Value: 42 vs. 22
  misc_feature: MA Experiment 108522 PARAMETER Experiment Name: Zm_42deg_Heat_P Parameter: Timepoint (hr) Value: 1
  misc_feature: MA Experiment 108522 PARAMETER Experiment Name: Zm_42deg_Heat_P Parameter: Tissue Value: Aerial
  misc_feature: MA Experiment ID: 108523 Result: Down-regulated in Transcription
  misc_feature: MA Experiment 108523 PARAMETER Experiment Name: Zm_42deg_Heat_P Parameter: Age (day) Value: 8
  misc_feature: MA Experiment 108523 PARAMETER Experiment Name: Zm_42deg_Heat_P Parameter: Organism Value: Zea mays
  misc_feature: MA Experiment 108523 PARAMETER Experiment Name: Zm_42deg_Heat_P Parameter: Plant Line Value: 35A19
  misc_feature: MA Experiment 108523 PARAMETER Experiment Name: Zm_42deg_Heat_P Parameter: Temperature (deg C) Value: 42 vs. 22
  misc_feature: MA Experiment 108523 PARAMETER Experiment Name: Zm_42deg_Heat_P Parameter: Timepoint (hr) Value: 6
  misc_feature: MA Experiment 108523 PARAMETER Experiment Name: Zm_42deg_Heat_P Parameter: Tissue Value: Aerial
  misc_feature: MA Experiment ID: 108528 Result: Up-regulated in Transcription
  misc_feature: MA Experiment 108528 PARAMETER Experiment Name: Zm_Imbibed_Seeds_P Parameter: Age (day) Value: 5 vs. 2
  misc_feature: MA Experiment 108528 PARAMETER Experiment Name: Zm_Imbibed_Seeds_P Parameter: Organism Value: Zea mays
  misc_feature: MA Experiment 108528 PARAMETER Experiment Name: Zm_Imbibed_Seeds_P Parameter: Plant Line Value: 35A19
  misc_feature: MA Experiment 108528 PARAMETER Experiment Name: Zm_Imbibed_Seeds_P Parameter: Tissue Value: Aerial vs. Embryo
  misc_feature: MA Experiment ID: 108529 Result: Up-regulated in Transcription
  misc_feature: MA Experiment 108529 PARAMETER Experiment Name: Zm_Imbibed_Seeds_P Parameter: Age (day) Value: 5 vs. 2
  misc_feature: MA Experiment 108529 PARAMETER Experiment Name: Zm_Imbibed_Seeds_P Parameter: Organism Value: Zea mays
  misc_feature: MA Experiment 108529 PARAMETER Experiment Name: Zm_Imbibed_Seeds_P Parameter: Plant Line Value: 35A19
  misc_feature: MA Experiment 108529 PARAMETER Experiment Name: Zm_Imbibed_Seeds_P Parameter: Tissue Value: Roots vs. Embryo
  misc_feature: MA Experiment ID: 108530 Result: Up-regulated in Transcription
  misc_feature: MA Experiment 108530 PARAMETER Experiment Name: Zm_Imbibed_Seeds_P Parameter: Age (day) Value: 6 vs. 2
  misc_feature: MA Experiment 108530 PARAMETER Experiment Name: Zm_Imbibed_Seeds_P Parameter: Organism Value: Zea mays
  misc_feature: MA Experiment 108530 PARAMETER Experiment Name: Zm_Imbibed_Seeds_P Parameter: Plant Line Value: 35A19
  misc_feature: MA Experiment 108530 PARAMETER Experiment Name: Zm_Imbibed_Seeds_P Parameter: Tissue Value: Aerial vs. Embryo
  misc_feature: MA Experiment ID: 108535 Result: Down-regulated in Transcription
  misc_feature: MA Experiment 108535 PARAMETER Experiment Name: Zm_Meristem_P Parameter: Age (day) Value: 8
  misc_feature: MA Experiment 108535 PARAMETER Experiment Name: Zm_Meristem_P Parameter: Organism Value: Zea mays
  misc_feature: MA Experiment 108535 PARAMETER Experiment Name: Zm_Meristem_P Parameter: Plant Line Value: 35A19
  misc_feature: MA Experiment 108535 PARAMETER Experiment Name: Zm_Meristem_P Parameter: Tissue Value: Root Meristem vs. Above Root Meristem
  misc_feature: MA Experiment ID: 108544 Result: Down-regulated in Transcription
  misc_feature: MA Experiment ID: 108556 Result: Up-regulated in Transcription
  misc_feature: MA Experiment 108556 PARAMETER Experiment Name: Zm_Drought_P Parameter: Age (day) Value: 9
  misc_feature: MA Experiment 108556 PARAMETER Experiment Name: Zm_Drought_P Parameter: Organism Value: Zea mays
  misc_feature: MA Experiment 108556 PARAMETER Experiment Name: Zm_Drought_P Parameter: Plant Line Value: 35A19
  misc_feature: MA Experiment 108556 PARAMETER Experiment Name: Zm_Drought_P Parameter: Timepoint (hr) Value: 24
  misc_feature: MA Experiment 108556 PARAMETER Experiment Name: Zm_Drought_P Parameter: Tissue Value: Aerial
  misc_feature: MA Experiment 108556 PARAMETER Experiment Name: Zm_Drought_P Parameter: Treatment Value: Drought vs. No Drought
  misc_feature: MA Experiment ID: 108689 Result: Up-regulated in Transcription
  misc_feature: MA Experiment 108689 PARAMETER Experiment Name: Zm_Drought_Roots_P Parameter: Age (day) Value: 9
  misc_feature: MA Experiment 108689 PARAMETER Experiment Name: Zm_Drought_Roots_P Parameter: Organism Value: Zea mays
  misc_feature: MA Experiment 108689 PARAMETER Experiment Name: Zm_Drought_Roots_P Parameter: Plant Line Value: 35A19
  misc_feature: MA Experiment 108689 PARAMETER Experiment Name: Zm_Drought_Roots_P Parameter: Timepoint (hr) Value: 24
  misc_feature: MA Experiment 108689 PARAMETER Experiment Name: Zm_Drought_Roots_P Parameter: Tissue Value: Roots
  misc_feature: MA Experiment 108689 PARAMETER Experiment Name: Zm_Drought_Roots_P Parameter: Treatment Value: Drought vs. No Drought
  misc_feature: MA Experiment ID: 20000108 Result: Down-regulated in Transcription
  misc_feature: MA Experiment 20000108 PARAMETER Experiment Name: Zm_Root-Tips_P Parameter: Age (day) Value: 12
  misc_feature: MA Experiment 20000108 PARAMETER Experiment Name: Zm_Root-Tips_P Parameter: Organism Value: Zea mays
  misc_feature: MA Experiment 20000108 PARAMETER Experiment Name: Zm_Root-Tips_P Parameter: Tissue Value: Root tips vs. Root mid region    35
  misc_feature: MA Experiment 20000108 PARAMETER Experiment Name: Zm_Root-Tips_P Parameter: Tissue Value: Root tips vs. Root mid region   Sequence Listing-Misc Features (4)
  misc_feature: MA Experiment ID: 20000477 Result: Down-regulated in Transcription
  misc_feature: MA Experiment 20000477 PARAMETER Experiment Name: Zm_5mM_SA_P Parameter: Age (day) Value: 10
  misc_feature: MA Experiment 20000477 PARAMETER Experiment Name: Zm_5mM_SA_P Parameter: Organism Value: Zea mays
  misc_feature: MA Experiment 20000477 PARAMETER Experiment Name: Zm_5mM_SA_P Parameter: Plant Line Value: 35A19
  misc_feature: MA Experiment 20000477 PARAMETER Experiment Name: Zm_5mM_SA_P Parameter: Timepoint (hr) Value: 48
  misc_feature: MA Experiment 20000477 PARAMETER Experiment Name: Zm_5mM_SA_P Parameter: Tissue Value: Aerial
  misc_feature: MA Experiment 20000477 PARAMETER Experiment Name: Zm_5mM_SA_P Parameter: Treatment Value: 5mM SA vs. No Treatment
  misc_feature: MA Experiment ID: 20000478 Result: Down-regulated in Transcription
  misc_feature: MA Experiment 20000478 PARAMETER Experiment Name: Zm_5mM_SA_P Parameter: Age (day) Value: 11
  misc_feature: MA Experiment 20000478 PARAMETER Experiment Name: Zm_5mM_SA_P Parameter: Organism Value: Zea mays
  misc_feature: MA Experiment 20000478 PARAMETER Experiment Name: Zm_5mM_SA_P Parameter: Plant Line Value: 35A19
  misc_feature: MA Experiment 20000478 PARAMETER Experiment Name: Zm_5mM_SA_P Parameter: Timepoint (hr) Value: 72
  misc_feature: MA Experiment 20000478 PARAMETER Experiment Name: Zm_5mM_SA_P Parameter: Tissue Value: Aerial
  misc_feature: MA Experiment 20000478 PARAMETER Experiment Name: Zm_5mM_SA_P Parameter: Treatment Value: 5mM SA vs. No Treatment
  misc_feature: MA Experiment ID: 20000492 Result: Down-regulated in Transcription
  misc_feature: MA Experiment 20000492 PARAMETER Experiment Name: Zm_Hybrid_Seed_Dev_P Parameter: DAP Value: 12
  misc_feature: MA Experiment 20000492 PARAMETER Experiment Name: Zm_Hybrid_Seed_Dev_P Parameter: Organism Value: Zea mays
  misc_feature: MA Experiment 20000492 PARAMETER Experiment Name: Zm_Hybrid_Seed_Dev_P Parameter: Plant Line Value: 35A19
  misc_feature: MA Experiment 20000492 PARAMETER Experiment Name: Zm_Hybrid_Seed_Dev_P Parameter: Tissue Value: Fert Kernel vs. Unfert Floret
  misc_feature: MA Experiment ID: 20000535 Result: Down-regulated in Transcription
  misc_feature: MA Experiment 20000535 PARAMETER Experiment Name: Zm_Hybrid_Seed_Dev_P Parameter: DAP Value: 30 vs. 12
  misc_feature: MA Experiment 20000535 PARAMETER Experiment Name: Zm_Hybrid_Seed_Dev_P Parameter: Organism Value: Zea mays
  misc_feature: MA Experiment 20000535 PARAMETER Experiment Name: Zm_Hybrid_Seed_Dev_P Parameter: Plant Line Value: 35A19
  misc_feature: MA Experiment 20000535 PARAMETER Experiment Name: Zm_Hybrid_Seed_Dev_P Parameter: Tissue Value: Embryo vs. Unfert Floret
  misc_feature: MA Experiment ID: 20000630 Result: Down-regulated in Transcription
  misc_feature: MA Experiment 20000630 PARAMETER Experiment Name: Zm_Herbicide-Treatments_P Parameter: Timepoint (hr) Value: 4
  misc_feature: MA Experiment 20000630 PARAMETER Experiment Name: Zm_Herbicide-Treatments_P Parameter: Tissue Value: Aerial
  misc_feature: MA Experiment 20000630 PARAMETER Experiment Name: Zm_Herbicide-Treatments_P Parameter: Treatment Value: Roundup vs. No Treatment
  misc_feature: MA Experiment ID: 20001612 Result: Down-regulated in Transcription
  misc_feature: MA Experiment 20001612 PARAMETER Experiment Name: Zm_50ppm_KNO3_L-to-H_P Parameter: Age (day) Value: 19
  misc_feature: MA Experiment 20001612 PARAMETER Experiment Name: Zm_50ppm_KNO3_L-to-H_P Parameter: Organism Value: Zea mays
  misc_feature: MA Experiment 20001612 PARAMETER Experiment Name: Zm_50ppm_KNO3_L-to-H_P Parameter: Plant Line Value: 35A19
  misc_feature: MA Experiment 20001612 PARAMETER Experiment Name: Zm_50ppm_KNO3_L-to-H_P Parameter: Timepoint (hr) Value: 8
  misc_feature: MA Experiment 20001612 PARAMETER Experiment Name: Zm_50ppm_KNO3_L-to-H_P Parameter: Tissue Value: Roots
  misc_feature: MA Experiment 20001612 PARAMETER Experiment Name: Zm_50ppm_KNO3_L-to-H_P Parameter: Treatment Value: 50ppm KNO3 vs. 50ppm KCl
gcacgagaccattacctagaacatcctaatcgaaaagagttggaggagtcccctctctctctctatacctttcttgcccaagcagtcaatcaagctgggaaacttaaacagaaagcgaagaaattaaaggccaccaccgccttcacttgttccttttggttattttcctcttgctgtggcttaacttgacaagaagaagaggaagaagatgctacgtcggcaaggccgaggtggaaaatttctggaggaggtgctcatcgtcggcgggctcctgctggtgcagtgcgtgctctccggctacgtggtcttcaccgaccacctgctcgccctcggcgccgacccgctggccgtcgtcgtcgtcgccggagccgcctacgccgccttctgctttcccttcgccttcgccctcgagaggaagcgatggccttccacggtttcggggactctggtggcgcaatacctgctcattgctcttggagggacaatcgcgttccaagcgctgatgctgctggggatcaagaagaccacgccggccatcgcatccgccatgcccaacctcagccccggcctcatcttcatcgtcgcagcctgtttcaggctggagaggttcgacagggcgtgcaagtacacgcaggcgaagatggcggggacggtggtgtgcctggcgggagcgctggccatgggcttcctgcacagcccaacttctacgtcctcctctctgcaggcagcagcaggaggtggcgactactactacgactggatcctcggctgctgctgcctcgtcgccgccgtcaccgtcttcgcgctcgtcaccgtcctgcaggccgccacgctcgccgccttccccgcgccgctcaccatgtgctgcgccacctccgcgacgggcgccgctctcaccgccgtcctgcggctcgtcctggaagggaggttcctcggcatggggtcgcccaggatcgacgccacgctcgtcgcggggatcgtcgtcctcggcggggccgcggtgggcgcgtgcatggcgttccaggcgtggtgcctgggcaggaagggcccgctgttcgtctccgtcttcgggcccgtccagaccgtctgcaccgccatcctctccgcggctctcctccgccaagtcctcagcctgggaagcctcgcagggatcgtgctcatgttcactgggctctacattgtcctatggggccaagagcaacgagatctcggctgacgacgaggaacagtcgttgcagggtggcgacgacgccgagaaggcactcctagcctagcctagcaaaatccagagcgaatatcactgcacgctctgtatttgtaaaaatggaatggtgtctacgtacctgtatacatactcgagaggatttagagaaaaaggacatggctacgtttgttc

SEQ ID NO: 17856 - protein, 335 aa, Zea mays subsp. mays
  peptide (1)..(335): Ceres Seq. ID no. 12369570
  misc_feature (26)..(160): Pfam Name: Integral membrane protein DUF6 Pfam Description: Integral membrane protein DUF6
  misc_feature (13)..(260): Homolog of NCBI NO: 22775675 NR Description: nodulin-like protein [Oryza sativa (japonica
  misc_feature (10)..(329): Homolog of NCBI NO: 15238103 NR Description: nodulin-like protein; protein id: At5g47470.1
  misc_feature (1)..(331): Homolog of NCBI NO: 34895316 NR Description: putative nodulin [Oryza sativa (japonica
  misc_feature (12)..(69): Homolog of NCBI NO: 6002778 NR Description: membrane protein homolog [Oryza sativa]
  misc_feature (12)..(310): Homolog of NCBI NO: 22328726 NR Description: membrane protein homolog; protein id: At4g16620.1
  misc_feature (1)..(310): Homolog of NCBI NO: 7488131 NR Description: probable membrane protein - Arabidopsis thaliana
  misc_feature (156)..(260): Homolog of NCBI NO: 6002778 NR Description: membrane protein homolog [Oryza sativa]
  misc_feature (99)..(130): Homolog of NCBI NO: 6002778 NR Description: membrane protein homolog [Oryza sativa]
  misc_feature (1)..(334): Homolog of NCBI NO: 9294076 NR Description: nodulin-like protein [Arabidopsis thaliana]
  misc_feature (1)..(260): Homolog of NCBI NO: 34897744 NR Description: Similar to Arabidopsis thaliana DNA chromosome 4,
MLRRQGRGGKFLEEVLIVGGLLLVQCVLSGYVVFTDHLLALGADPLAVVVVAGAAYAAFCFPFAFALERKRWPSTVSGTLVAQYLLIALGGTIAFQALMLLGIKKTTPAIASAMPNLSPGLIFIVAACFRLERFDRACKYTQAKMAGTVVCLAGALAMGFLHSPTSTSSSLQAAAGGGDYYYDWILGCCCLVAAVTVFALVTVLQAATLAAFPAPLTMCCATSATGAALTAVLRLVLEGRFLGMGSPRIDATLVAGIVVLGGAAVGACMAFQAWCLGRKGPLFVSVFGPVQTVCTAILSAALLRQVLSLGSLAGIVLMFTGLYIVLWGQEQRDLG

SEQ ID NO: 17857 - protein, 282 aa, Zea mays subsp. mays
  peptide (1)..(282): Ceres Seq. ID no. 12369571
MAFHGFGDSGGAIPAHCSWRDNRVPSADAAGDQEDHAGHRIRHAQPQPRPHLHRRSLFQAGEVRQGVQVHAGEDGGDGGVPGGSAGHGLPAQPNFYVLLSAGSSRRWRLLLRLDPRLLLPRRRRHRLRARHRPAGRHARRLPRAAHHVLRHLRDGRRSHRRPAARPGREVPRHGVAQDRRHARRGDRRPRRGRGGRVHGVPGVVPGQEGPAVRLRLRARPDRLHRHPLRGSPPPSPQPGKPRRDRAHVHWALHCPMGPRATRSRLTTRNSRCRVATTPRRHS

SEQ ID NO: 17858 - protein, 237 aa, Zea mays subsp. mays
  peptide (1)..(237): Ceres Seq. ID no. 12369572
  misc_feature (1)..(62): Pfam Name: Integral membrane protein DUF6 Pfam Description: Integral membrane protein DUF6
  misc_feature (1)..(236): Homolog of NCBI NO: 15229596 NR Description: integral membrane protein, putative; protein id:
  misc_feature (1)..(236): Homolog of NCBI NO: 9294076 NR Description: nodulin-like protein [Arabidopsis thaliana]
  misc_feature (1)..(233): Homolog of NCBI NO: 34895316 NR Description: putative nodulin [Oryza sativa (japonica
  misc_feature (1)..(32): Homolog of NCBI NO: 6002778 NR Description: membrane protein homolog [Oryza sativa]
  misc_feature (58)..(162): Homolog of NCBI NO: 6002778 NR Description: membrane protein homolog [Oryza sativa]
  misc_feature (1)..(212): Homolog of NCBI NO: 22328726 NR Description: membrane protein homolog; protein id: At4g16620.1
  misc_feature (1)..(212): Homolog of NCBI NO: 7488131 NR Description: probable membrane protein - Arabidopsis thaliana
  misc_feature (1)..(162): Homolog of NCBI NO: 22775675 NR Description: nodulin-like protein [Oryza sativa (japonica
  misc_feature (1)..(231): Homolog of NCBI NO: 15238103 NR Description: nodulin-like protein; protein id: At5g47470.1
  misc_feature (1)..(162): Homolog of NCBI NO: 34897744 NR Description: Similar to Arabidopsis thaliana DNA chromosome 4,
MLLGIKKTTPAIASAMPNLSPGLIFIVAACFRLERFDRACKYTQAKMAGTVVCLAGALAMGFLHSPTSTSSSLQAAAGGGDYYYDWILGCCCLVAAVTVFALVTVLQAATLAAFPAPLTMCCATSATGAALTAVLRLVLEGRFLGMGSPRIDATLVAGIVVLGGAAVGACMAFQAWCLGRKGPLFVSVFGPVQTVCTAILSAALLRQVLSLGSLAGIVLMFTGLYIVLWGQEQRDLG

SEQ ID NO: 17859 - DNA, 1633 bp, Zea mays subsp. mays
  misc_feature (1)..(1633): Ceres Seq. ID no. 12363380
  misc_feature: MA Experiment ID: 108556 Result: Up-regulated in Transcription
  misc_feature: MA Experiment 108556 PARAMETER Experiment Name: Zm_Drought_P Parameter: Age (day) Value: 9
  misc_feature: MA Experiment 108556 PARAMETER Experiment Name: Zm_Drought_P Parameter: Organism Value: Zea mays
  misc_feature: MA Experiment 108556 PARAMETER Experiment Name: Zm_Drought_P Parameter: Plant Line Value: 35A19
  misc_feature: MA Experiment 108556 PARAMETER Experiment Name: Zm_Drought_P Parameter: Timepoint (hr) Value: 24
  misc_feature: MA Experiment 108556 PARAMETER Experiment Name: Zm_Drought_P Parameter: Tissue Value: Aerial
  misc_feature: MA Experiment 108556 PARAMETER Experiment Name: Zm_Drought_P Parameter: Treatment Value: Drought vs. No Drought
gcacgagaccattacctagaacatcctaatcgaaaaaatatagaaccctgttcccaccggcgctcactgcaccttccccagcggccaccacccgaggccggtccccgctgacccgcctccgtggaccggggacacgcggcggcgaccggcgaggcggtccctgcttcctctttctactcctcacaagtatgtatgacacgcaccacccgcaccgcacccacccaccaacccgaccttccgctgctctcacacacacacacacactctacacgcgagcgagaccacgcgccggaccgccgcaagccggtcgccgccgccgcgacctggagcttgcgagctagctctggcctcgctgcctgcgccgactgagatggacccgcggtttccgctgccggccgcggcggcgccgtccacgggcggcggcggcggcgccagagggcaccaccggcgggcccactcggagacgttcctcagcttccacgacgcggacctgctcctcgacccggacggcgacttcttctccgacctcgacttcccctccctctccgacgactctccggccgccttcgaccccaccccgccgccgcatccgcagcagcagccgccgcaggcttccccggccccacgtccgcccggcgggacccacacgcggagcctctccctcgacgccgccttcttcgagggcctcgcgtttcagggacccagtgggagcgccgggggtggaggtgggcccggccacaagaggagcggctcgatggatggggacacctcgccgttcgagggcgagtcggcgctctccagcggcctgccggactacgccaagaaggccatgcccgccgagaggatcgccgagctcgcgctcatcgaccccaagcgcgcaaagaggattctggcgaacaggcagtcggcagcgaggtcaaaggagaggaagatcatgtacactagtgaactggagaagaaggtccagactctgcaaacggaggccactacgctgtcagcacagctgaccctgctccagagggatacaactggtttaactgccgaaaacagagagctcaagcttcggttgcagtccatggaagagcaagctaaactgcgggacgctttgaatgaagccctgcgagaagaagtccagcgacttaagatagccgcaggacaagtcgggaacatgaatgggaaccccttcaatggtggactccagcagcagattccatcctatttcgtgcagcagcagcagatgccgtacttcggtggccaccaggctcagcatcacagtcaaaatcaaaaccatcgtcaccagatctcatcaaatgtggggcagacgctcagtggtcagtccctaaacgactccatggatttcatgtgaggagtacaatatcagggccagtactacatcgtataccgactgcatttcagcactgtaaagatagctaaatgtacaatgtatgcatgtgcctcattggtagtgtgtagttagctcttctttgtatcattattctgaaaatggctcgtgtatgtcaaaatgatgtctcttttctttgctggtttctggagtaatgtgttagactgactagctacctttaacaatttattatgtaaatctttagctttttttaatggtggaaggttcttc

SEQ ID NO: 17860 - protein, 331 aa, Zea mays subsp. mays
  peptide (1)..(331): Ceres Seq. ID no. 12363381
  misc_feature (166)..(228): Pfam Name: bZIP transcription factor Pfam Description: bZIP transcription factor
  misc_feature (25)..(310): Homolog of NCBI NO: 15221391 NR Description: bZIP protein; protein id: At1g06070.1, supported
  misc_feature (1)..(317): Homolog of NCBI NO: 21740783 NR Description: OSJNBa0067K08.24 [Oryza sativa (japonica
  misc_feature (100)..(325): Homolog of NCBI NO: 34394739 NR Description: putative transcription activator RF2a
  misc_feature (78)..(304): Homolog of NCBI NO: 7258340 NR Description: VirE2-interacting protein VIP1 [Arabidopsis
  misc_feature (62)..(304): Homolog of NCBI NO: 18400998 NR Description: VirE2-interacting protein VIP1
  misc_feature (62)..(304): Homolog of NCBI NO: 21553989 NR Description: VirE2-interacting protein VIP1 [Arabidopsis
  misc_feature (63)..(310): Homolog of NCBI NO: 2921823 NR Description: shoot-forming PKSF1 [Paulownia kawakamii]
  misc_feature (33)..(330): Homolog of NCBI NO: 8777512 NR Description: bZIP transcriptional activator RSG [Nicotiana
  misc_feature (144)..(331): Homolog of NCBI NO: 19401702 NR Description: susceptibility transcription factor RVS1 [Oryza
  misc_feature (129)..(331): Homolog of NCBI NO: 29367343 NR Description: bZIP-like protein [Oryza sativa (japonica
MDPRFPLPAAAAPSTGGGGGARGHHRRAHSETFLSFHDADLLLDPDGDFFSDLDFPSLSDDSPAAFDPTPPPHPQQQPPQASPAPRPPGGTHTRSLSLDAAFFEGLAFQGPSGSAGGGGGPGHKRSGSMDGDTSPFEGESALSSGLPDYAKKAMPAERIAELALIDPKRAKRILANRQSAARSKERKIMYTSELEKKVQTLQTEATTLSAQLTLLQRDTTGLTAENRELKLRLQSMEEQAKLRDALNEALREEVQRLKIAAGQVGNMNGNPFNGGLQQQIPSYFVQQQQMPYFGGHQAQHHSQNQNHRHQISSNVGQTLSGQSLNDSMDFM

SEQ ID NO: 17861 - protein, 203 aa, Zea mays subsp. mays
  peptide (1)..(203): Ceres Seq. ID no. 12363382
  misc_feature (38)..(100): Pfam Name: bZIP transcription factor Pfam Description: bZIP transcription factor
  misc_feature (1)..(182): Homolog of NCBI NO: 15221391 NR Description: bZIP protein; protein id: At1g06070.1, supported
  misc_feature (1)..(189): Homolog of NCBI NO: 21740783 NR Description: OSJNBa0067K08.24 [Oryza sativa (japonica
  misc_feature (1)..(197): Homolog of NCBI NO: 34394739 NR Description: putative transcription activator RF2a
  misc_feature (1)..(176): Homolog of NCBI NO: 7258340 NR Description: VirE2-interacting protein VIP1 [Arabidopsis
  misc_feature (1)..(176): Homolog of NCBI NO: 18400998 NR Description: VirE2-interacting protein VIP1
  misc_feature (1)..(176): Homolog of NCBI NO: 21553989 NR Description: VirE2-interacting protein VIP1 [Arabidopsis
  misc_feature (1)..(182): Homolog of NCBI NO: 2921823 NR Description: shoot-forming PKSF1 [Paulownia kawakamii]
  misc_feature (1)..(202): Homolog of NCBI NO: 8777512 NR Description: bZIP transcriptional activator RSG [Nicotiana
  misc_feature (16)..(203): Homolog of NCBI NO: 19401702 NR Description: susceptibility transcription factor RVS1 [Oryza
  misc_feature (1)..(203): Homolog of NCBI NO: 29367343 NR Description: bZIP-like protein [Oryza sativa (japonica
MDGDTSPFEGESALSSGLPDYAKKAMPAERIAELALIDPKRAKRILANRQSAARSKERKIMYTSELEKKVQTLQTEATTLSAQLTLLQRDTTGLTAENRELKLRLQSMEEQAKLRDALNEALREEVQRLKIAAGQVGNMNGNPFNGGLQQQIPSYFVQQQQMPYFGGHQAQHHSQNQNHRHQISSNVGQTLSGQSLNDSMDFM

SEQ ID NO: 17862 - protein, 178 aa, Zea mays subsp. mays
  peptide (1)..(178): Ceres Seq. ID no. 12363383
  misc_feature (13)..(75): Pfam Name: bZIP transcription factor Pfam Description: bZIP transcription factor
  misc_feature (1)..(157): Homolog of NCBI NO: 15221391 NR Description: bZIP protein; protein id: At1g06070.1, supported
  misc_feature (1)..(164): Homolog of NCBI NO: 21740783 NR Description: OSJNBa0067K08.24 [Oryza sativa (japonica
  misc_feature (1)..(172): Homolog of NCBI NO: 34394739 NR Description: putative transcription activator RF2a
  misc_feature (1)..(151): Homolog of NCBI NO: 7258340 NR Description: VirE2-interacting protein VIP1 [Arabidopsis
  misc_feature (1)..(151): Homolog of NCBI NO: 18400998 NR Description: VirE2-interacting protein VIP1
  misc_feature (1)..(151): Homolog of NCBI NO: 21553989 NR Description: VirE2-interacting protein VIP1 [Arabidopsis
  misc_feature (1)..(157): Homolog of NCBI NO: 2921823 NR Description: shoot-forming PKSF1 [Paulownia kawakamii]
  misc_feature (1)..(177): Homolog of NCBI NO: 8777512 NR Description: bZIP transcriptional activator RSG [Nicotiana
  misc_feature (1)..(178): Homolog of NCBI NO: 19401702 NR Description: susceptibility transcription factor RVS1 [Oryza
  misc_feature (1)..(178): Homolog of NCBI NO: 29367343 NR Description: bZIP-like protein [Oryza sativa (japonica
MPAERIAELALIDPKRAKRILANRQSAARSKERKIMYTSELEKKVQTLQTEATTLSAQLTLLQRDTTGLTAENRELKLRLQSMEEQAKLRDALNEALREEVQRLKIAAGQVGNMNGNPFNGGLQQQIPSYFVQQQQMPYFGGHQAQHHSQNQNHRHQISSNVGQTLSGQSLNDSMDFM

SEQ ID NO: 17863 - DNA, 918 bp, Zea mays subsp. mays
  misc_feature (1)..(918): Ceres Seq. ID no. 12415286
  misc_feature: MA Experiment ID: 108527 Result: Up-regulated in Transcription
  misc_feature: MA Experiment 108527 PARAMETER Experiment Name: Zm_5mM_NO_P Parameter: Age (day) Value: 8
  misc_feature: MA Experiment 108527 PARAMETER Experiment Name: Zm_5mM_NO_P Parameter: Organism Value: Zea mays
  misc_feature: MA Experiment 108527 PARAMETER Experiment Name: Zm_5mM_NO_P Parameter: Plant Line Value: 35A19
  misc_feature: MA Experiment 108527 PARAMETER Experiment Name: Zm_5mM_NO_P Parameter: Timepoint (hr) Value: 6
  misc_feature: MA Experiment 108527 PARAMETER Experiment Name: Zm_5mM_NO_P Parameter: Tissue Value: Aerial
  misc_feature: MA Experiment 108527 PARAMETER Experiment Name: Zm_5mM_NO_P Parameter: Treatment Value: 5mM NO vs. No Treatment
aactagtggatcccccgggctgcaggaattcgcacgagaccattacctagaacatcctaatcgaaaaagtgaggagccccaaatccacttcaacgatggaggaaagcctgtgcgccgtggagaagcgcgggcgggtgcacgtcatcagccctcaccggcgcgggggagcaccgcctcagcccggccctgctctccgccctccgctccgcggtcgcagccgcccgccgcgcctcccccggtgcgctcgtcctggccggcgagggcaagttcttcagcaacggctacgacctcgcgtgggcgcgcgcggggccggccccggcgccggagcaccgcctctccacgatgcgcgccgcgttccgcggcctcgtcgccgacctgctcgcgctccccgtgccaacggtcgcggccgtcacgggccacgcagcgggcgctggctgcgcgctcgcgctggcgcacgacgccgtcgccatgcgcgcctcccgcgggttcctctacattagcgaggtcgacgccgggatcaagatcgtcgattttgtcggcgagctggttcggcagaaggtccccgacgcggccgctaggagggacctggtgatgaagggggagaagatgacggccgcgcaggccgcgcgccgaggcatcgtggatgcggccgtggacggcggcgtggaggacgtcgtggccgcggcggtcgccatggctgaggagctcgctgccagagactgggacggagagaacctggccgccatcaggaaggacgcatggccggttttgtggagcaaggtcaaggactacggctgcgatgtgccggccaggccgcgtctgtaacggcctgcttgcgaatttcggtcgtttctgtgacttgccatttggtcgttatcaacaatctgaaagcaatgatccttggccttgggaatgtgc

SEQ ID NO: 17864 - protein, 196 aa, Zea mays subsp. mays
  peptide (1)..(196): Ceres Seq. ID no. 12415287
  misc_feature (50)..(172): Pfam Name: Atrophin-1 family Pfam Description: Atrophin-1 family
  misc_feature (50)..(172): Pfam Name: Atrophin-1 family Pfam Description: Atrophin-1 family
  misc_feature (38)..(196): Homolog of NCBI NO: 30424862 NR Description: RIKEN cDNA 5033413A03 [Mus musculus]
  misc_feature (38)..(196): Homolog of NCBI NO: 30424862 NR Description: RIKEN cDNA 5033413A03 [Mus musculus]
  misc_feature (4)..(196): Homolog of NCBI NO: 30354095 NR Description: Similar to serine/arginine repetitive matrix 2
  misc_feature (4)..(196): Homolog of NCBI NO: 30354095 NR Description: Similar to serine/arginine repetitive matrix 2
TSGSPGLQEFARDHYLEHPNRKSEEPQIHFNDGGKPVRRGEARAGARHQPSPARGSTASARPCSPPSAPRSQPPAAPPPVRSSWPARASSSATATTSRGRARGRPRRRSTASPRCAPRSAASSPTCSRSPCQRSRPSRATQRALAARSRWRTTPSPCAPPAGSSTLARSTPGSRSSILSASWFGRRSPTRPLGGTW

SEQ ID NO: 17865 - protein, 160 aa, Zea mays subsp. mays
  peptide (1)..(160): Ceres Seq. ID no. 12415288
  misc_feature (1)..(105): Pfam Name: Enoyl-CoA hydratase/isomerase family Pfam Description: Enoyl-CoA hydratase/isomerase family
  misc_feature (1)..(105): Pfam Name: Enoyl-CoA hydratase/isomerase family Pfam Description: Enoyl-CoA hydratase/isomerase family
  misc_feature (1)..(126): Homolog of NCBI NO: 8896103 NR Description: enoyl-CoA hydratase-like protein
  misc_feature (1)..(140): Homolog of NCBI NO: 40739395 NR Description: hypothetical protein AN6767.2 [Aspergillus
  misc_feature (1)..(137): Homolog of NCBI NO: 23016771 NR Description: hypothetical protein [Magnetospirillum
  misc_feature (1)..(136): Homolog of NCBI NO: 23017142 NR Description: hypothetical protein [Thermobifida fusca]
  misc_feature (1)..(126): Homolog of NCBI NO: 15828352 NR Description: possible enoyl-CoA hydratase [Mycobacterium
  misc_feature (1)..(126): Homolog of NCBI NO: 8896103 NR Description: enoyl-CoA hydratase-like protein
  misc_feature (1)..(137): Homolog of NCBI NO: 23016771 NR Description: hypothetical protein [Magnetospirillum
  misc_feature (1)..(126): Homolog of NCBI NO: 15828352 NR Description: possible enoyl-CoA hydratase [Mycobacterium
  misc_feature (1)..(158): Homolog of NCBI NO: 34903766 NR Description: unnamed protein product [Oryza sativa (japonica
  misc_feature (1)..(160): Homolog of NCBI NO: 21555734 NR Description: carnitine racemase like protein [Arabidopsis
  misc_feature (1)..(143): Homolog of NCBI NO: 15236498 NR Description: carnitine racemase like protein
  misc_feature (1)..(143): Homolog of NCBI NO: 15236499 NR Description: carnitine racemase like protein
  misc_feature (1)..(137): Homolog of NCBI NO: 15218713 NR Description: hypothetical protein; protein id: At1g65520.1
  misc_feature (1)..(136): Homolog of NCBI NO: 23017142 NR Description: hypothetical protein [Thermobifida fusca]
  misc_feature (1)..(140): Homolog of NCBI NO: 40739395 NR Description: hypothetical protein AN6767.2 [Aspergillus
  misc_feature (1)..(137): Homolog of NCBI NO: 15218713 NR Description: hypothetical protein; protein id: At1g65520.1
  misc_feature (1)..(143): Homolog of NCBI NO: 15236499 NR Description: carnitine racemase like protein
  misc_feature (1)..(143): Homolog of NCBI NO: 15236498 NR Description: carnitine racemase like protein
  misc_feature (1)..(160): Homolog of NCBI NO: 21555734 NR Description: carnitine racemase like protein [Arabidopsis
  misc_feature (1)..(158): Homolog of NCBI NO: 34903766 NR Description: unnamed protein product [Oryza sativa (japonica
MRAAFRGLVADLLALPVPTVAAVTGHAAGAGCALALAHDAVAMRASRGFLYISEVDAGIKIVDFVGELVRQKVPDAAARRDLVMKGEKMTAAQAARRGIVDAAVDGGVEDVVAAAVAMAEELAARDWDGENLAAIRKDAWPVLWSKVKDYGCDVPARPRL

SEQ ID NO: 17866 - protein, 134 aa, Zea mays subsp. mays
  peptide (1)..(134): Ceres Seq. ID no. 12415289
  misc_feature (19)..(112): Pfam Name: HlyD family secretion protein Pfam Description: HlyD family secretion protein
  misc_feature (19)..(112): Pfam Name: HlyD family secretion protein Pfam Description: HlyD family secretion protein
  misc_feature (80)..(134): Homolog of NCBI NO: 29828813 NR Description: hypothetical protein [Streptomyces avermitilis
  misc_feature (1)..(134): Homolog of NCBI NO: 19923466 NR Description: splicing coactivator subunit SRm300
  misc_feature (1)..(134): Homolog of NCBI NO: 6649242 NR Description: splicing coactivator subunit SRm300 [Homo sapiens]
  misc_feature (1)..(134): Homolog of NCBI NO: 30424862 NR Description: RIKEN cDNA 5033413A03 [Mus musculus]
  misc_feature (80)..(134): Homolog of NCBI NO: 29828813 NR Description: hypothetical protein [Streptomyces avermitilis
  misc_feature (1)..(134): Homolog of NCBI NO: 6649242 NR Description: splicing coactivator subunit SRm300 [Homo sapiens]
  misc_feature (1)..(134): Homolog of NCBI NO: 5821143 NR Description: RNA binding protein [Homo sapiens]
  misc_feature (5)..(134): Homolog of NCBI NO: 29247944 NR Description: GLP_26_54603_52153 [Giardia lamblia ATCC 50803]
  misc_feature (21)..(134): Homolog of NCBI NO: 22956890 NR Description: hypothetical protein [Rhodobacter sphaeroides]
  misc_feature (1)..(134): Homolog of NCBI NO: 5821145 NR Description: RNA binding protein [Homo sapiens]
  misc_feature (1)..(134): Homolog of NCBI NO: 30424862 NR Description: RIKEN cDNA 5033413A03 [Mus musculus]
  misc_feature (1)..(134): Homolog of NCBI NO: 19923466 NR Description: splicing coactivator subunit SRm300
  misc_feature (1)..(134): Homolog of NCBI NO: 5821143 NR Description: RNA binding protein [Homo sapiens]
  misc_feature (1)..(134): Homolog of NCBI NO: 5821145 NR Description: RNA binding protein [Homo sapiens]
  misc_feature (5)..(134): Homolog of NCBI NO: 29247944 NR Description: GLP_26_54603_52153 [Giardia lamblia ATCC 50803]
  misc_feature (21)..(134): Homolog of NCBI NO: 22956890 NR Description: hypothetical protein [Rhodobacter sphaeroides]
MEESLCAVEKRGRVHVISPHRRGGAPPQPGPALRPPLRGRSRPPRLPRCARPGRRGQVLQQRLRPRVGARGAGPGAGAPPLHDARRVPRPRRRPARAPRANGRGRHGPRSGRWLRARAGARRRRHARLPRVPLH

SEQ ID NO: 17867 - DNA, 1597 bp, Zea mays subsp. mays; identical to SEQ ID NO: 13576
  misc_feature (1)..(1597): Ceres Seq. ID no. 12411213
  misc_feature: MA Experiment ID: 20000535 Result: Down-regulated in Transcription
  misc_feature: MA Experiment 20000535 PARAMETER Experiment Name: Zm_Hybrid_Seed_Dev_P Parameter: DAP Value: 30 vs. 12
  misc_feature: MA Experiment 20000535 PARAMETER Experiment Name: Zm_Hybrid_Seed_Dev_P Parameter: Organism Value: Zea mays
  misc_feature: MA Experiment 20000535 PARAMETER Experiment Name: Zm_Hybrid_Seed_Dev_P Parameter: Plant Line Value: 35A19
  misc_feature: MA Experiment 20000535 PARAMETER Experiment Name: Zm_Hybrid_Seed_Dev_P Parameter: Tissue Value: Embryo vs. Unfert Floret

SEQ ID NO: 17868 - protein, 460 aa, Zea mays subsp. mays; identical to SEQ ID NO: 13577
  peptide (1)..(460): Ceres Seq. ID no. 12411214
  misc_feature (82)..(431): Pfam Name: NADH:flavin oxidoreductase / NADH oxidase family Pfam Description: NADH:flavin oxidoreductase / NADH oxidase family
  misc_feature (71)..(453): Homolog of NCBI NO: 12056507 NR Description: 12-oxophytodienoate reductase 3 [Lycopersicon
  misc_feature (81)..(460): Homolog of NCBI NO: 6707797 NR Description: 12-oxo-phytodienoate reductase [Arabidopsis
  misc_feature (81)..(460): Homolog of NCBI NO: 5059115 NR Description: OPDA-reductase homolog [Arabidopsis thaliana]
  misc_feature (81)..(460): Homolog of NCBI NO: 10242314 NR Description: 12-oxo-phytodienoate reductase [Arabidopsis
  misc_feature (81)..(460): Homolog of NCBI NO: 7688991 NR Description: 12-oxo-phytodienoate reductase [Arabidopsis
  misc_feature (81)..(460): Homolog of NCBI NO: 15225045 NR Description: 12-oxophytodienoate reductase (OPR3)(DDE1); id: At2g06050.1, supported by cDNA: gi_10242313, supported by
  misc_feature (69)..(453): Homolog of NCBI NO: 23495288 NR Description: 12-oxophytodienoic acid reductase [Oryza sativa]
  misc_feature (74)..(453): Homolog of NCBI NO: 40645459 NR Description: LEDI-5c protein [Lithospermum erythrorhizon]
  misc_feature (62)..(453): Homolog of NCBI NO: 7449901 NR Description: probable 12-oxophytodienoate reductase (EC
  misc_feature (73)..(453): Homolog of NCBI NO: 14277800 NR Description: Chain A, Crystal Structure Of 12-Oxophytodienoate

SEQ ID NO: 17869 - protein, 399 aa, Zea mays subsp. mays; identical to SEQ ID NO: 13578
  peptide (1)..(399): Ceres Seq. ID no. 12411215
  misc_feature (21)..(370): Pfam Name: NADH:flavin oxidoreductase / NADH oxidase family Pfam Description: NADH:flavin oxidoreductase / NADH oxidase family
  misc_feature (10)..(392): Homolog of NCBI NO: 12056507 NR Description: 12-oxophytodienoate reductase 3 [Lycopersicon
  misc_feature (20)..(399): Homolog of NCBI NO: 6707797 NR Description: 12-oxo-phytodienoate reductase [Arabidopsis
  misc_feature (20)..(399): Homolog of NCBI NO: 5059115 NR Description: OPDA-reductase homolog [Arabidopsis thaliana]
  misc_feature (20)..(399): Homolog of NCBI NO: 10242314 NR Description: 12-oxo-phytodienoate reductase [Arabidopsis
  misc_feature (20)..(399): Homolog of NCBI NO: 7688991 NR Description: 12-oxo-phytodienoate reductase [Arabidopsis
  misc_feature (20)..(399): Homolog of NCBI NO: 15225045 NR Description: 12-oxophytodienoate reductase (OPR3)(DDE1); id: At2g06050.1, supported by cDNA: gi_10242313, supported by
  misc_feature (8)..(392): Homolog of NCBI NO: 23495288 NR Description: 12-oxophytodienoic acid reductase [Oryza sativa]
  misc_feature (13)..(392): Homolog of NCBI NO: 40645459 NR Description: LEDI-5c protein [Lithospermum erythrorhizon]
  misc_feature (1)..(392): Homolog of NCBI NO: 7449901 NR Description: probable 12-oxophytodienoate reductase (EC
  misc_feature (12)..(392): Homolog of NCBI NO: 14277800 NR Description: Chain A, Crystal Structure Of 12-Oxophytodienoate

SEQ ID NO: 17870 - protein, 373 aa, Zea mays subsp. mays; identical to SEQ ID NO: 13579
  peptide (1)..(373): Ceres Seq. ID no. 12411216
  misc_feature (1)..(344): Pfam Name: NADH:flavin oxidoreductase / NADH oxidase family Pfam Description: NADH:flavin oxidoreductase / NADH oxidase family
  misc_feature (1)..(366): Homolog of NCBI NO: 12056507 NR Description: 12-oxophytodienoate reductase 3 [Lycopersicon
  misc_feature (1)..(373): Homolog of NCBI NO: 6707797 NR Description: 12-oxo-phytodienoate reductase [Arabidopsis
  misc_feature (1)..(373): Homolog of NCBI NO: 5059115 NR Description: OPDA-reductase homolog [Arabidopsis thaliana]
  misc_feature (1)..(373): Homolog of NCBI NO: 10242314 NR Description: 12-oxo-phytodienoate reductase [Arabidopsis
  misc_feature (1)..(373): Homolog of NCBI NO: 7688991 NR Description: 12-oxo-phytodienoate reductase [Arabidopsis
  misc_feature (1)..(373): Homolog of NCBI NO: 15225045 NR Description: 12-oxophytodienoate reductase (OPR3)(DDE1); id: At2g06050.1, supported by cDNA: gi_10242313, supported by
  misc_feature (1)..(366): Homolog of NCBI NO: 23495288 NR Description: 12-oxophytodienoic acid reductase [Oryza sativa]
  misc_feature (1)..(366): Homolog of NCBI NO: 40645459 NR Description: LEDI-5c protein [Lithospermum erythrorhizon]
  misc_feature (1)..(366): Homolog of NCBI NO: 7449901 NR Description: probable 12-oxophytodienoate reductase (EC
  misc_feature (1)..(366): Homolog of NCBI NO: 14277800 NR Description: Chain A, Crystal Structure Of 12-Oxophytodienoate

SEQ ID NO: 17871 - DNA, 718 bp, Zea mays subsp. mays
  misc_feature (1)..(718): Ceres Seq. ID no. 12549392
  misc_feature: MA Experiment ID: 108504 Result: Down-regulated in Transcription
  misc_feature: MA Experiment 108504 PARAMETER Experiment Name: Zm_Drought_P Parameter: Age (day) Value: 8
  misc_feature: MA Experiment 108504 PARAMETER Experiment Name: Zm_Drought_P Parameter: Organism Value: Zea mays
  misc_feature: MA Experiment 108504 PARAMETER Experiment Name: Zm_Drought_P Parameter: Plant Line Value: 35A19
  misc_feature: MA Experiment 108504 PARAMETER Experiment Name: Zm_Drought_P Parameter: Timepoint (hr) Value: 12
  misc_feature: MA Experiment 108504 PARAMETER Experiment Name: Zm_Drought_P Parameter: Tissue Value: Aerial
  misc_feature: MA Experiment 108504 PARAMETER Experiment Name: Zm_Drought_P Parameter: Treatment Value: Drought vs. No Drought
  misc_feature: MA Experiment ID: 108522 Result: Down-regulated in Transcription
  misc_feature: MA Experiment 108522 PARAMETER Experiment Name: Zm_42deg_Heat_P Parameter: Age (day) Value: 8
  misc_feature: MA Experiment 108522 PARAMETER Experiment Name: Zm_42deg_Heat_P Parameter: Organism Value: Zea mays
  misc_feature: MA Experiment 108522 PARAMETER Experiment Name: Zm_42deg_Heat_P Parameter: Plant Line Value: 35A19
  misc_feature: MA Experiment 108522 PARAMETER Experiment Name: Zm_42deg_Heat_P Parameter: Temperature (deg C) Value: 42 vs. 22
  misc_feature: MA Experiment 108522 PARAMETER Experiment Name: Zm_42deg_Heat_P Parameter: Timepoint (hr) Value: 1
  misc_feature: MA Experiment 108522 PARAMETER Experiment Name: Zm_42deg_Heat_P Parameter: Tissue Value: Aerial
  misc_feature: MA Experiment ID: 108528 Result: Up-regulated in Transcription
  misc_feature: MA Experiment 108528 PARAMETER Experiment Name: Zm_Imbibed_Seeds_P Parameter: Age (day) Value: 5 vs. 2
  misc_feature: MA Experiment 108528 PARAMETER Experiment Name: Zm_Imbibed_Seeds_P Parameter: Organism Value: Zea mays
  misc_feature: MA Experiment 108528 PARAMETER Experiment Name: Zm_Imbibed_Seeds_P Parameter: Plant Line Value: 35A19
  misc_feature: MA Experiment 108528 PARAMETER Experiment Name: Zm_Imbibed_Seeds_P Parameter: Tissue Value: Aerial vs. Embryo
  misc_feature: MA Experiment ID: 108530 Result: Up-regulated in Transcription
  misc_feature: MA Experiment 108530 PARAMETER Experiment Name: Zm_Imbibed_Seeds_P Parameter: Age (day) Value: 6 vs. 2
  misc_feature: MA Experiment 108530 PARAMETER Experiment Name: Zm_Imbibed_Seeds_P Parameter: Organism Value: Zea mays
  misc_feature: MA Experiment 108530 PARAMETER Experiment Name: Zm_Imbibed_Seeds_P Parameter: Plant Line Value: 35A19
  misc_feature: MA Experiment 108530 PARAMETER Experiment Name: Zm_Imbibed_Seeds_P Parameter: Tissue Value: Aerial vs. Embryo
  misc_feature: MA Experiment ID: 108547 Result: Up-regulated in Transcription
  misc_feature: MA Experiment 108547 PARAMETER Experiment Name: Zm_Imbibed_Seeds_P Parameter: Age (day) Value: 4 vs. 2
  misc_feature: MA Experiment 108547 PARAMETER Experiment Name: Zm_Imbibed_Seeds_P Parameter: Organism Value: Zea mays
  misc_feature: MA Experiment 108547 PARAMETER Experiment Name: Zm_Imbibed_Seeds_P Parameter: Plant Line Value: 35A19
  misc_feature: MA Experiment 108547 PARAMETER Experiment Name: Zm_Imbibed_Seeds_P Parameter: Tissue Value: Aerial vs. Embryo
  misc_feature: MA Experiment ID: 108556 Result: Down-regulated in Transcription
  misc_feature: MA Experiment 108556 PARAMETER Experiment Name: Zm_Drought_P Parameter: Age (day) Value: 9
  misc_feature: MA Experiment 108556 PARAMETER Experiment Name: Zm_Drought_P Parameter: Organism Value: Zea mays
  misc_feature: MA Experiment 108556 PARAMETER Experiment Name: Zm_Drought_P Parameter: Plant Line Value: 35A19
  misc_feature: MA Experiment 108556 PARAMETER Experiment Name: Zm_Drought_P Parameter: Timepoint (hr) Value: 24
  misc_feature: MA Experiment 108556 PARAMETER Experiment Name: Zm_Drought_P Parameter: Tissue Value: Aerial
  misc_feature: MA Experiment 108556 PARAMETER Experiment Name: Zm_Drought_P Parameter: Treatment Value: Drought vs. No Drought
  misc_feature: MA Experiment ID: 108689 Result: Down-regulated in Transcription
  misc_feature: MA Experiment 108689 PARAMETER Experiment Name: Zm_Drought_Roots_P Parameter: Age (day) Value: 9
  misc_feature: MA Experiment 108689 PARAMETER Experiment Name: Zm_Drought_Roots_P Parameter: Organism Value: Zea mays
  misc_feature: MA Experiment 108689 PARAMETER Experiment Name: Zm_Drought_Roots_P Parameter: Plant Line Value: 35A19
  misc_feature: MA Experiment 108689 PARAMETER Experiment Name: Zm_Drought_Roots_P Parameter: Timepoint (hr) Value: 24
  misc_feature: MA Experiment 108689 PARAMETER Experiment Name: Zm_Drought_Roots_P Parameter: Tissue Value: Roots
  misc_feature: MA Experiment 108689 PARAMETER Experiment Name: Zm_Drought_Roots_P Parameter: Treatment Value: Drought vs. No Drought
  misc_feature: MA Experiment ID: 20000479 Result: Down-regulated in Transcription
  misc_feature: MA Experiment 20000479 PARAMETER Experiment Name: Zm_Drought_P Parameter: Age (day) Value: 10
  misc_feature: MA Experiment 20000479 PARAMETER Experiment Name: Zm_Drought_P Parameter: Organism Value: Zea mays
  misc_feature: MA Experiment 20000479 PARAMETER Experiment Name: Zm_Drought_P Parameter: Plant Line Value: 35A19
  misc_feature: MA Experiment 20000479 PARAMETER Experiment Name: Zm_Drought_P Parameter: Timepoint (hr) Value: 48
  misc_feature: MA Experiment 20000479 PARAMETER Experiment Name: Zm_Drought_P Parameter: Tissue Value: Aerial
  misc_feature: MA Experiment 20000479 PARAMETER Experiment Name: Zm_Drought_P Parameter: Treatment Value: Drought vs. No Drought
  misc_feature: MA Experiment ID: 20000480 Result: Down-regulated in Transcription
  misc_feature: MA Experiment 20000480 PARAMETER Experiment Name: Zm_Drought_P Parameter: Age (day) Value: 11
  misc_feature: MA Experiment 20000480 PARAMETER Experiment Name: Zm_Drought_P Parameter: Organism Value: Zea mays
  misc_feature: MA Experiment 20000480 PARAMETER Experiment Name: Zm_Drought_P Parameter: Plant Line Value: 35A19
  misc_feature: MA Experiment 20000480 PARAMETER Experiment Name: Zm_Drought_P Parameter: Timepoint (hr) Value: 72
  misc_feature: MA Experiment 20000480 PARAMETER Experiment Name: Zm_Drought_P Parameter: Tissue Value: Aerial
  misc_feature: MA Experiment 20000480 PARAMETER Experiment Name: Zm_Drought_P Parameter: Treatment Value: Drought vs. No Drought
  misc_feature: MA Experiment ID: 20000626 Result: Down-regulated in Transcription
  misc_feature: MA Experiment 20000626 PARAMETER Experiment Name: Zm_Herbicide-Treatments_P Parameter: Timepoint (hr) Value: 12
  misc_feature: MA Experiment 20000626 PARAMETER Experiment Name: Zm_Herbicide-Treatments_P Parameter: Tissue Value: Aerial
  misc_feature: MA Experiment 20000626 PARAMETER Experiment Name: Zm_Herbicide-Treatments_P Parameter: Treatment Value: Roundup vs. No Treatment
  misc_feature: MA Experiment ID: 20000630 Result: Down-regulated in Transcription
  misc_feature: MA Experiment 20000630 PARAMETER Experiment Name: Zm_Herbicide-Treatments_P Parameter: Timepoint (hr) Value: 4
  misc_feature: MA Experiment 20000630 PARAMETER Experiment Name: Zm_Herbicide-Treatments_P Parameter: Tissue Value: Aerial
  misc_feature: MA Experiment 20000630 PARAMETER Experiment Name: Zm_Herbicide-Treatments_P Parameter: Treatment Value: Roundup vs. No Treatment
aacgctgcacgacgctagaggaaaacgcactgccaacggacaacggagtcaggtgcggcgggaggtagcatgagggagcagcaggattccggcgacgtgacggggcgccggggcggggtcatcaggtcgctgctgggcgtcgagcgccggctcgcggagggcgacgcggacgccgagggggcgctcggagcctcctcggagaagcagcatttggccgcggacagcggcgaggagaggaaggcggtggtgagggtggtggcggctgacatgccgcccgcgctgcagcgccgcgcgttccgctgcgcccgcgacgagctcgcggcgatgccgcacttcccgcgccggctcgagcccaagcgcctcgcgctggcgctcaagaaggagtttgatactgcttacgggccagcttggcactgcatcgtggggacgagtttcggttcgtatgtcacgcacgcccggggcggtttcttgtatttttccgtcgataaggtntacatcctgctcttcaggacagccgtggagccctctaatcattgacggccaccggcctgccagcaatggacaaatggctcataaaaacgcgcagttnttgggacagcttgcaccaaattcagttgttcagtcagctaggccgagcccttgtaacttgtaaatcgcattgtttcttggtaggcaaatgtaaantactccttatgcttntgataaaatttaacatttc

SEQ ID NO: 17872 - protein, 155 aa, Zea mays subsp. mays
  peptide (1)..(155): Ceres Seq. ID no. 12549393
  misc_feature (60)..(149): Pfam Name: Dynein light chain type 1 Pfam Description: Dynein light chain type 1
  misc_feature (39)..(152): Homolog of NCBI NO: 15220678 NR Description: dynein light subunit lc6, flagellar outer arm
  misc_feature (57)..(147): Homolog of NCBI NO: 28829295 NR Description: similar to Anthocidaris crassispina (Sea urchin).
  misc_feature (26)..(148): Homolog of NCBI NO: 34902908 NR Description: unnamed protein product [Oryza sativa (japonica
  misc_feature (55)..(148): Homolog of NCBI NO: 34785679 NR Description: Unknown (protein for MGC:68763) [Xenopus laevis]
  misc_feature (60)..(150): Homolog of NCBI NO: 34913978 NR Description: dynein light chain - like protein
  misc_feature (25)..(154): Homolog of NCBI NO: 15241269 NR Description: dynein light chain - like protein; protein id:
  misc_feature (55)..(148): Homolog of NCBI NO: 2811014 NR Description: DYNEIN LIGHT CHAIN LC6, FLAGELLAR OUTER ARM
  misc_feature (55)..(148): Homolog of NCBI NO: 30961847 NR Description: neuronal nitric oxidse synthase protein inhibitor
  misc_feature (55)..(148): Homolog of NCBI NO: 18087731 NR Description: dynein light chain 2; RIKEN cDNA 1700064A15 gene
  misc_feature (52)..(155): Homolog of NCBI NO: 38567715 NR Description: B1358B12.13 [Oryza sativa (japonica
  misc_feature (141)..(141): Xaa is any aa, unknown or other
MREQQDSGDVTGRRGGVIRSLLGVERRLAEGDADAEGALGASSEKQHLAADSGEERKAVVRVVAADMPPALQRRAFRCARDELAAMPHFPRRLEPKRLALALKKEFDTAYGPAWHCIVGTSFGSYVTHARGGFLYFSVDKXYILLFRTAVEPSNH

SEQ ID NO: 17873 - protein, 89 aa, Zea mays subsp. mays
  peptide (1)..(89): Ceres Seq. ID no. 12549394
  misc_feature (1)..(83): Pfam Name: Dynein light chain type 1 Pfam Description: Dynein light chain type 1
  misc_feature (1)..(81): Homolog of NCBI NO: 28829295 NR Description: similar to Anthocidaris crassispina (Sea urchin).
  misc_feature (1)..(82): Homolog of NCBI NO: 18087731 NR Description: dynein light chain 2; RIKEN cDNA 1700064A15 gene
  misc_feature (1)..(82): Homolog of NCBI NO: 34902908 NR Description: unnamed protein product [Oryza sativa (japonica
  misc_feature (1)..(82): Homolog of NCBI NO: 30961847 NR Description: neuronal nitric oxidse synthase protein inhibitor
  misc_feature (1)..(82): Homolog of NCBI NO: 34785679 NR Description: Unknown (protein for MGC:68763) [Xenopus laevis]
  misc_feature (1)..(82): Homolog of NCBI NO: 2811014 NR Description: DYNEIN LIGHT CHAIN LC6, FLAGELLAR OUTER ARM
  misc_feature (1)..(84): Homolog of NCBI NO: 34913978 NR Description: dynein light chain - like protein
  misc_feature (1)..(88): Homolog of NCBI NO: 15241269 NR Description: dynein light chain - like protein; protein id:
  misc_feature (1)..(86): Homolog of NCBI NO: 15220678 NR Description: dynein light subunit lc6, flagellar outer arm
  misc_feature (1)..(89): Homolog of NCBI NO: 38567715 NR Description: B1358B12.13 [Oryza sativa (japonica
  misc_feature (75)..(75): Xaa is any aa, unknown or other
MPPALQRRAFRCARDELAAMPHFPRRLEPKRLALALKKEFDTAYGPAWHCIVGTSFGSYVTHARGGFLYFSVDKXYILLFRTAVEPSNH

SEQ ID NO: 17874 - DNA, 1288 bp, Zea mays subsp. mays
  misc_feature (1)..(1288): Ceres Seq. ID no. 12364285
  misc_feature: MA Experiment ID: 108529 Result: Up-regulated in Transcription
  misc_feature: MA Experiment 108529 PARAMETER Experiment Name: Zm_Imbibed_Seeds_P Parameter: Age (day) Value: 5 vs. 2
  misc_feature: MA Experiment 108529 PARAMETER Experiment Name: Zm_Imbibed_Seeds_P Parameter: Organism Value: Zea mays
  misc_feature: MA Experiment 108529 PARAMETER Experiment Name: Zm_Imbibed_Seeds_P Parameter: Plant Line Value: 35A19
  misc_feature: MA Experiment 108529 PARAMETER Experiment Name: Zm_Imbibed_Seeds_P Parameter: Tissue Value: Roots vs. Embryo
  misc_feature: MA Experiment ID: 108535 Result: Down-regulated in Transcription
  misc_feature: MA Experiment 108535 PARAMETER Experiment Name: Zm_Meristem_P Parameter: Age (day) Value: 8
  misc_feature: MA Experiment 108535 PARAMETER Experiment Name: Zm_Meristem_P Parameter: Organism Value: Zea mays
  misc_feature: MA Experiment 108535 PARAMETER Experiment Name: Zm_Meristem_P Parameter: Plant Line Value: 35A19
  misc_feature: MA Experiment 108535 PARAMETER Experiment Name: Zm_Meristem_P Parameter: Tissue Value: Root Meristem vs. Above Root Meristem
  misc_feature: MA Experiment ID: 108543 Result: Up-regulated in Transcription
  misc_feature: MA Experiment ID: 108545 Result: Down-regulated in Transcription
  misc_feature: MA Experiment 108545 PARAMETER Experiment Name: Zm_Imbibed_Seeds_P Parameter: Age (day) Value: 3 vs. 2
  misc_feature: MA Experiment 108545 PARAMETER Experiment Name: Zm_Imbibed_Seeds_P Parameter: Organism Value: Zea mays
  misc_feature: MA Experiment 108545 PARAMETER Experiment Name: Zm_Imbibed_Seeds_P Parameter: Plant Line Value: 35A19
  misc_feature: MA Experiment 108545 PARAMETER Experiment Name: Zm_Imbibed_Seeds_P Parameter: Tissue Value: Aerial vs. Embryo
  misc_feature: MA Experiment ID: 108556 Result: Down-regulated in Transcription
  misc_feature: MA Experiment 108556 PARAMETER Experiment Name: Zm_Drought_P Parameter: Age (day) Value: 9
  misc_feature: MA Experiment 108556 PARAMETER Experiment Name: Zm_Drought_P Parameter: Organism Value: Zea mays
  misc_feature: MA Experiment 108556 PARAMETER Experiment Name: Zm_Drought_P Parameter: Plant Line Value: 35A19
  misc_feature: MA Experiment 108556 PARAMETER Experiment Name: Zm_Drought_P Parameter: Timepoint (hr) Value: 24
  misc_feature: MA Experiment 108556 PARAMETER Experiment Name: Zm_Drought_P Parameter: Tissue Value: Aerial
  misc_feature: MA Experiment 108556 PARAMETER Experiment Name: Zm_Drought_P Parameter: Treatment Value: Drought vs. No Drought
  misc_feature: MA Experiment ID: 108559 Result: Down-regulated in Transcription
  misc_feature: MA Experiment 108559 PARAMETER Experiment Name: Zm_5mM_NO_P Parameter: Age (day) Value: 8
  misc_feature: MA Experiment 108559 PARAMETER Experiment Name: Zm_5mM_NO_P Parameter: Organism Value: Zea mays
  misc_feature: MA Experiment 108559 PARAMETER Experiment Name: Zm_5mM_NO_P Parameter: Plant Line Value: 35A19
  misc_feature: MA Experiment 108559 PARAMETER Experiment Name: Zm_5mM_NO_P Parameter: Timepoint (hr) Value: 12
  misc_feature: MA Experiment 108559 PARAMETER Experiment Name: Zm_5mM_NO_P Parameter: Tissue Value: Aerial
  misc_feature: MA Experiment 108559 PARAMETER Experiment Name: Zm_5mM_NO_P Parameter: Treatment Value: 5mM NO vs. No Treatment
  misc_feature: MA Experiment ID: 108688 Result: Down-regulated in Transcription
  misc_feature: MA Experiment 108688 PARAMETER Experiment Name: Zm_Embryos-Flowers__P Parameter: Tissue Value: Immature Flowers vs. Aerial+
  misc_feature: MA Experiment ID: 20000108 Result: Down-regulated in Transcription
  misc_feature: MA Experiment 20000108 PARAMETER Experiment Name: Zm_Root-Tips_P Parameter: Age (day) Value: 12
  misc_feature: MA Experiment 20000108 PARAMETER Experiment Name: Zm_Root-Tips_P Parameter: Organism Value: Zea mays
  misc_feature: MA Experiment 20000108 PARAMETER Experiment Name: Zm_Root-Tips_P Parameter: Tissue Value: Root tips vs. Root mid region    35
  misc_feature: MA Experiment 20000108 PARAMETER Experiment Name: Zm_Root-Tips_P Parameter: Tissue Value: Root tips vs. Root mid region   Sequence Listing-Misc Features (4)
  misc_feature: MA Experiment ID: 20000478 Result: Down-regulated in Transcription
  misc_feature: MA Experiment 20000478 PARAMETER Experiment Name: Zm_5mM_SA_P Parameter: Age (day) Value: 11
  misc_feature: MA Experiment 20000478 PARAMETER Experiment Name: Zm_5mM_SA_P Parameter: Organism Value: Zea mays
  misc_feature: MA Experiment 20000478 PARAMETER Experiment Name: Zm_5mM_SA_P Parameter: Plant Line Value: 35A19
  misc_feature: MA Experiment 20000478 PARAMETER Experiment Name: Zm_5mM_SA_P Parameter: Timepoint (hr) Value: 72
  misc_feature: MA Experiment 20000478 PARAMETER Experiment Name: Zm_5mM_SA_P Parameter: Tissue Value: Aerial
  misc_feature: MA Experiment 20000478 PARAMETER Experiment Name: Zm_5mM_SA_P Parameter: Treatment Value: 5mM SA vs. No Treatment
  misc_feature: MA Experiment ID: 20000480 Result: Down-regulated in Transcription
  misc_feature: MA Experiment 20000480 PARAMETER Experiment Name: Zm_Drought_P Parameter: Age (day) Value: 11
  misc_feature: MA Experiment 20000480 PARAMETER Experiment Name: Zm_Drought_P Parameter: Organism Value: Zea mays
  misc_feature: MA Experiment 20000480 PARAMETER Experiment Name: Zm_Drought_P Parameter: Plant Line Value: 35A19
  misc_feature: MA Experiment 20000480 PARAMETER Experiment Name: Zm_Drought_P Parameter: Timepoint (hr) Value: 72
  misc_feature: MA Experiment 20000480 PARAMETER Experiment Name: Zm_Drought_P Parameter: Tissue Value: Aerial
  misc_feature: MA Experiment 20000480 PARAMETER Experiment Name: Zm_Drought_P Parameter: Treatment Value: Drought vs. No Drought
  misc_feature: MA Experiment ID: 20000534 Result: Down-regulated in Transcription
  misc_feature: MA Experiment 20000534 PARAMETER Experiment Name: Zm_Hybrid_Pollen_P Parameter: Age (day) Value: 8
  misc_feature: MA Experiment 20000534 PARAMETER Experiment Name: Zm_Hybrid_Pollen_P Parameter: Organism Value: Zea mays
  misc_feature: MA Experiment 20000534 PARAMETER Experiment Name: Zm_Hybrid_Pollen_P Parameter: Plant Line Value: 35A19
  misc_feature: MA Experiment 20000534 PARAMETER Experiment Name: Zm_Hybrid_Pollen_P Parameter: Tissue Value: Pollen vs. Aerial
  misc_feature: MA Experiment ID: 20000535 Result: Down-regulated in Transcription
  misc_feature: MA Experiment 20000535 PARAMETER Experiment Name: Zm_Hybrid_Seed_Dev_P Parameter: DAP Value: 30 vs. 12
  misc_feature: MA Experiment 20000535 PARAMETER Experiment Name: Zm_Hybrid_Seed_Dev_P Parameter: Organism Value: Zea mays
  misc_feature: MA Experiment 20000535 PARAMETER Experiment Name: Zm_Hybrid_Seed_Dev_P Parameter: Plant Line Value: 35A19
  misc_feature: MA Experiment 20000535 PARAMETER Experiment Name: Zm_Hybrid_Seed_Dev_P Parameter: Tissue Value: Embryo vs. Unfert Floret
gcacgagaccattacctagaacatcctaatcgaaaaagagacatcgatcagctagctagctgctgccaagagctagccaggggacagagcagcagcttgaagttggtcaccaatgctaaggatgggccgcgccagcgccacagcaggtgtgttgcgcttcgtcagggcgttcgccctctgcgtggctacggcatgcctcctcctggcggccggcatgccctcgcctgtggcggcgcaggacccgtcgaagctgagcctgcagtactactccaagacgtgccccaacgtggagcacgtcgtccggacggagatggagtgcgcggtgcgcgccgacacgcgcaacgccgcgctcatgctccgcctccatttccatgactgcttcgtgcagggctgcgacgggtcggtgctgctcgacgacacggcaaccatgatcggagagaagcaggcggagcagaacgtcaactcgctgaaagggttcgatctggttgacaagatcaaggagaagctggaagccgagtgccctggaaccgtctcctgcgcagacctgctggcgattgcagctagggatgcggttgtgctggttggtgggccttactgggatgtcccagtaggaagactggactccaagaaggcgagcctggacctagcaaacagcgacatccctacggcccagcaaggcctcctcacgctcattgccaagttctgggagaagggccttgatgccactgacatggtggccctcgtcggatcccacacgatcggattcgctaggtgcgagaatttccgggacagaatctacggcgacttcgagatgacgtccaagtacaacccgtcgtccgaggcctacctgagcaagctgaaggaggtgtgcccgcgggacggcggcgacgacaacatcagcgccatggacagccacacctccgacgtgttcgacaaacgcctacttcgagaccctcatcaagggcgagggcctgctcaactccgaccaggcgatgtggtccagcatcgcgggctactccacctccgacacagtcaacaagtactgggccgaccccgaggccttcttcaagcagttctccgactccatggtgaagatgggcaacatcaccaaccctgccggcggcgaggtcaggaagacctgcagatttgtcaacacataggatatgataatatatataggatgctcgagactgcaggagaaactcggtggttgtgattgtactttacgcctgcaccttctttcgatggcttgtttagggtggcttggaaaataaaaaacccctttgcc

SEQ ID NO: 17875 - protein, 367 aa, Zea mays subsp. mays
  peptide (1)..(367): Ceres Seq. ID no. 12364286
  misc_feature (63)..(286): Pfam Name: Peroxidase Pfam Description: Peroxidase
  misc_feature (21)..(286): Homolog of NCBI NO: 34903038 NR Description: unnamed protein product [Oryza sativa (japonica
  misc_feature (47)..(274): Homolog of NCBI NO: 7658147 NR Description: peroxidase [Asparagus officinalis]
  misc_feature (51)..(286): Homolog of NCBI NO: 15224114 NR Description: peroxidase, putative; protein id: At2g18140.1
  misc_feature (43)..(286): Homolog of NCBI NO: 21537275 NR Description: putative peroxidase [Arabidopsis thaliana]
  misc_feature (43)..(286): Homolog of NCBI NO: 15224116 NR Description: peroxidase, putative
  misc_feature (29)..(286): Homolog of NCBI NO: 15234394 NR Description: peroxidase, putative
  misc_feature (47)..(286): Homolog of NCBI NO: 18409140 NR Description: peroxidase, putative; protein id: At1g68850.1
  misc_feature (12)..(70): Homolog of NCBI NO: 34898676 NR Description: putative peroxidase [Oryza sativa (japonica
  misc_feature (93)..(286): Homolog of NCBI NO: 34898676 NR Description: putative peroxidase [Oryza sativa (japonica
  misc_feature (12)..(286): Homolog of NCBI NO: 11862958 NR Description: putative peroxidase [Oryza sativa (japonica
MLRMGRASATAGVLRFVRAFALCVATACLLLAAGMPSPVAAQDPSKLSLQYYSKTCPNVEHVVRTEMECAVRADTRNAALMLRLHFHDCFVQGCDGSVLLDDTATMIGEKQAEQNVNSLKGFDLVDKIKEKLEAECPGTVSCADLLAIAARDAVVLVGGPYWDVPVGRLDSKKASLDLANSDIPTAQQGLLTLIAKFWEKGLDATDMVALVGSHTIGFARCENFRDRIYGDFEMTSKYNPSSEAYLSKLKEVCPRDGGDDNISAMDSHTSDVFDKRLLRDPHQGRGPAQLRPGDVVQHRGLLHLRHSQQVLGRPRGLLQAVLRLHGEDGQHHQPCRRRGQEDLQICQHIGYDNIYRMLETAGETRWL

SEQ ID NO: 17876 - protein, 364 aa, Zea mays subsp. mays
  peptide (1)..(364): Ceres Seq. ID no. 12364287
  misc_feature (60)..(283): Pfam Name: Peroxidase Pfam Description: Peroxidase
  misc_feature (18)..(283): Homolog of NCBI NO: 34903038 NR Description: unnamed protein product [Oryza sativa (japonica
  misc_feature (44)..(271): Homolog of NCBI NO: 7658147 NR Description: peroxidase [Asparagus officinalis]
  misc_feature (48)..(283): Homolog of NCBI NO: 15224114 NR Description: peroxidase, putative; protein id: At2g18140.1
  misc_feature (40)..(283): Homolog of NCBI NO: 21537275 NR Description: putative peroxidase [Arabidopsis thaliana]
  misc_feature (40)..(283): Homolog of NCBI NO: 15224116 NR Description: peroxidase, putative
  misc_feature (26)..(283): Homolog of NCBI NO: 15234394 NR Description: peroxidase, putative
  misc_feature (44)..(283): Homolog of NCBI NO: 18409140 NR Description: peroxidase, putative; protein id: At1g68850.1
  misc_feature (9)..(67): Homolog of NCBI NO: 34898676 NR Description: putative peroxidase [Oryza sativa (japonica
  misc_feature (90)..(283): Homolog of NCBI NO: 34898676 NR Description: putative peroxidase [Oryza sativa (japonica
  misc_feature (9)..(283): Homolog of NCBI NO: 11862958 NR Description: putative peroxidase [Oryza sativa (japonica
MGRASATAGVLRFVRAFALCVATACLLLAAGMPSPVAAQDPSKLSLQYYSKTCPNVEHVVRTEMECAVRADTRNAALMLRLHFHDCFVQGCDGSVLLDDTATMIGEKQAEQNVNSLKGFDLVDKIKEKLEAECPGTVSCADLLAIAARDAVVLVGGPYWDVPVGRLDSKKASLDLANSDIPTAQQGLLTLIAKFWEKGLDATDMVALVGSHTIGFARCENFRDRIYGDFEMTSKYNPSSEAYLSKLKEVCPRDGGDDNISAMDSHTSDVFDKRLLRDPHQGRGPAQLRPGDVVQHRGLLHLRHSQQVLGRPRGLLQAVLRLHGEDGQHHQPCRRRGQEDLQICQHIGYDNIYRMLETAGETRWL

SEQ ID NO: 17877 - protein, 333 aa, Zea mays subsp. mays
  peptide (1)..(333): Ceres Seq. ID no. 12364288
  misc_feature (29)..(252): Pfam Name: Peroxidase Pfam Description: Peroxidase
  misc_feature (1)..(252): Homolog of NCBI NO: 34903038 NR Description: unnamed protein product [Oryza sativa (japonica
  misc_feature (13)..(240): Homolog of NCBI NO: 7658147 NR Description: peroxidase [Asparagus officinalis]
  misc_feature (17)..(252): Homolog of NCBI NO: 15224114 NR Description: peroxidase, putative; protein id: At2g18140.1
  misc_feature (9)..(252): Homolog of NCBI NO: 21537275 NR Description: putative peroxidase [Arabidopsis thaliana]
  misc_feature (9)..(252): Homolog of NCBI NO: 15224116 NR Description: peroxidase, putative
  misc_feature (1)..(252): Homolog of NCBI NO: 15234394 NR Description: peroxidase, putative
  misc_feature (13)..(252): Homolog of NCBI NO: 18409140 NR Description: peroxidase, putative; protein id: At1g68850.1
  misc_feature (1)..(36): Homolog of NCBI NO: 34898676 NR Description: putative peroxidase [Oryza sativa (japonica
  misc_feature (59)..(252): Homolog of NCBI NO: 34898676 NR Description: putative peroxidase [Oryza sativa (japonica
  misc_feature (1)..(252): Homolog of NCBI NO: 11862958 NR Description: putative peroxidase [Oryza sativa (japonica
MPSPVAAQDPSKLSLQYYSKTCPNVEHVVRTEMECAVRADTRNAALMLRLHFHDCFVQGCDGSVLLDDTATMIGEKQAEQNVNSLKGFDLVDKIKEKLEAECPGTVSCADLLAIAARDAVVLVGGPYWDVPVGRLDSKKASLDLANSDIPTAQQGLLTLIAKFWEKGLDATDMVALVGSHTIGFARCENFRDRIYGDFEMTSKYNPSSEAYLSKLKEVCPRDGGDDNISAMDSHTSDVFDKRLLRDPHQGRGPAQLRPGDVVQHRGLLHLRHSQQVLGRPRGLLQAVLRLHGEDGQHHQPCRRRGQEDLQICQHIGYDNIYRMLETAGETRWL

SEQ ID NO: 17878 - DNA, 1726 bp, Zea mays subsp. mays
  misc_feature (1)..(1726): Ceres Seq. ID no. 12381349
  misc_feature: MA Experiment ID: 108527 Result: Down-regulated in Transcription
  misc_feature: MA Experiment 108527 PARAMETER Experiment Name: Zm_5mM_NO_P Parameter: Age (day) Value: 8
  misc_feature: MA Experiment 108527 PARAMETER Experiment Name: Zm_5mM_NO_P Parameter: Organism Value: Zea mays
  misc_feature: MA Experiment 108527 PARAMETER Experiment Name: Zm_5mM_NO_P Parameter: Plant Line Value: 35A19
  misc_feature: MA Experiment 108527 PARAMETER Experiment Name: Zm_5mM_NO_P Parameter: Timepoint (hr) Value: 6
  misc_feature: MA Experiment 108527 PARAMETER Experiment Name: Zm_5mM_NO_P Parameter: Tissue Value: Aerial
  misc_feature: MA Experiment 108527 PARAMETER Experiment Name: Zm_5mM_NO_P Parameter: Treatment Value: 5mM NO vs. No Treatment
  misc_feature: MA Experiment ID: 108528 Result: Down-regulated in Transcription
  misc_feature: MA Experiment 108528 PARAMETER Experiment Name: Zm_Imbibed_Seeds_P Parameter: Age (day) Value: 5 vs. 2
  misc_feature: MA Experiment 108528 PARAMETER Experiment Name: Zm_Imbibed_Seeds_P Parameter: Organism Value: Zea mays
  misc_feature: MA Experiment 108528 PARAMETER Experiment Name: Zm_Imbibed_Seeds_P Parameter: Plant Line Value: 35A19
  misc_feature: MA Experiment 108528 PARAMETER Experiment Name: Zm_Imbibed_Seeds_P Parameter: Tissue Value: Aerial vs. Embryo
  misc_feature: MA Experiment ID: 108530 Result: Down-regulated in Transcription
  misc_feature: MA Experiment 108530 PARAMETER Experiment Name: Zm_Imbibed_Seeds_P Parameter: Age (day) Value: 6 vs. 2
  misc_feature: MA Experiment 108530 PARAMETER Experiment Name: Zm_Imbibed_Seeds_P Parameter: Organism Value: Zea mays
  misc_feature: MA Experiment 108530 PARAMETER Experiment Name: Zm_Imbibed_Seeds_P Parameter: Plant Line Value: 35A19
  misc_feature: MA Experiment 108530 PARAMETER Experiment Name: Zm_Imbibed_Seeds_P Parameter: Tissue Value: Aerial vs. Embryo
  misc_feature: MA Experiment ID: 108535 Result: Down-regulated in Transcription
  misc_feature: MA Experiment 108535 PARAMETER Experiment Name: Zm_Meristem_P Parameter: Age (day) Value: 8
  misc_feature: MA Experiment 108535 PARAMETER Experiment Name: Zm_Meristem_P Parameter: Organism Value: Zea mays
  misc_feature: MA Experiment 108535 PARAMETER Experiment Name: Zm_Meristem_P Parameter: Plant Line Value: 35A19
  misc_feature: MA Experiment 108535 PARAMETER Experiment Name: Zm_Meristem_P Parameter: Tissue Value: Root Meristem vs. Above Root Meristem
  misc_feature: MA Experiment ID: 108547 Result: Down-regulated in Transcription
  misc_feature: MA Experiment 108547 PARAMETER Experiment Name: Zm_Imbibed_Seeds_P Parameter: Age (day) Value: 4 vs. 2
  misc_feature: MA Experiment 108547 PARAMETER Experiment Name: Zm_Imbibed_Seeds_P Parameter: Organism Value: Zea mays
  misc_feature: MA Experiment 108547 PARAMETER Experiment Name: Zm_Imbibed_Seeds_P Parameter: Plant Line Value: 35A19
  misc_feature: MA Experiment 108547 PARAMETER Experiment Name: Zm_Imbibed_Seeds_P Parameter: Tissue Value: Aerial vs. Embryo
  misc_feature: MA Experiment ID: 108548 Result: Down-regulated in Transcription
  misc_feature: MA Experiment 108548 PARAMETER Experiment Name: Zm_20uM_KNO3_H-to-L_P Parameter: Age (day) Value: 11
  misc_feature: MA Experiment 108548 PARAMETER Experiment Name: Zm_20uM_KNO3_H-to-L_P Parameter: Organism Value: Zea mays
  misc_feature: MA Experiment 108548 PARAMETER Experiment Name: Zm_20uM_KNO3_H-to-L_P Parameter: Plant Line Value: 35A19
  misc_feature: MA Experiment 108548 PARAMETER Experiment Name: Zm_20uM_KNO3_H-to-L_P Parameter: Timepoint (hr) Value: 4
  misc_feature: MA Experiment 108548 PARAMETER Experiment Name: Zm_20uM_KNO3_H-to-L_P Parameter: Tissue Value: Roots
  misc_feature: MA Experiment 108548 PARAMETER Experiment Name: Zm_20uM_KNO3_H-to-L_P Parameter: Treatment Value: 20uM KNO3 vs. 60mM KNO3
  misc_feature: MA Experiment ID: 20000108 Result: Down-regulated in Transcription
  misc_feature: MA Experiment 20000108 PARAMETER Experiment Name: Zm_Root-Tips_P Parameter: Age (day) Value: 12
  misc_feature: MA Experiment 20000108 PARAMETER Experiment Name: Zm_Root-Tips_P Parameter: Organism Value: Zea mays
  misc_feature: MA Experiment 20000108 PARAMETER Experiment Name: Zm_Root-Tips_P Parameter: Tissue Value: Root tips vs. Root mid region    35
  misc_feature: MA Experiment 20000108 PARAMETER Experiment Name: Zm_Root-Tips_P Parameter: Tissue Value: Root tips vs. Root mid region   Sequence Listing-Misc Features (4)
  misc_feature: MA Experiment ID: 20000535 Result: Up-regulated in Transcription
  misc_feature: MA Experiment 20000535 PARAMETER Experiment Name: Zm_Hybrid_Seed_Dev_P Parameter: DAP Value: 30 vs. 12
  misc_feature: MA Experiment 20000535 PARAMETER Experiment Name: Zm_Hybrid_Seed_Dev_P Parameter: Organism Value: Zea mays
  misc_feature: MA Experiment 20000535 PARAMETER Experiment Name: Zm_Hybrid_Seed_Dev_P Parameter: Plant Line Value: 35A19
  misc_feature: MA Experiment 20000535 PARAMETER Experiment Name: Zm_Hybrid_Seed_Dev_P Parameter: Tissue Value: Embryo vs. Unfert Floret
  misc_feature: MA Experiment ID: 20000632 Result: Down-regulated in Transcription
  misc_feature: MA Experiment 20000632 PARAMETER Experiment Name: Zm_Herbicide-Treatments_P Parameter: Timepoint (hr) Value: 4
  misc_feature: MA Experiment 20000632 PARAMETER Experiment Name: Zm_Herbicide-Treatments_P Parameter: Tissue Value: Aerial
  misc_feature: MA Experiment 20000632 PARAMETER Experiment Name: Zm_Herbicide-Treatments_P Parameter: Treatment Value: Glean vs. No Treatment
gcacgagaccattacctagaacatcctaatcgaaaaggaactgaatactacaatggagctctcgtgggacgaatgggatgtcattatactggctgcctgcagcttcctcatccctctcgtgttcctctgcaatgctacgaagcggcggcggcggcgcgcgccccctggcccggccaccgtacccatcatcgggaacctggcgtggctaacgttgcgcgacgggttgggtgagctggacatcctgcgacgactgcactcgcgctttggcccgctgctgtcggtccgcttgggttcatcggagcaggtgaacgtggcggaccgccgtctcgcacacgccttgctcgtggagcgtggcgccgctgtggctgaccgctcgccgctgctggtgtccaccgagaggttcggggccttcggctctttcagcatacacgtgtccagctacggcccacgctggagtgttctccgccgcaacttcgcggcggaggtcgtgagcccagcgcggttccggcagatggcggcctcgcgggagctggcgcttgccgacctcatccggaagctgaagctgcaggagggcgtcgtcgtctgcagggacgcgttccagcacgccatgtccagcctcttcatcgccatgtgcttcggcaaggtcctcgacgactcgtccgtggacagcatcggcgtcgcgctgcgcgacttcgtcctccacggcggcgcgtcggggatggggatggcgctattcttgttcctccctgctctcaccacgcgactcttccgtggcctcctgcggtctaaggaggccaagcgccagaagctcgaaaacgtgtactgcctgccattgatccatgagcggagagagcgcaggaagacgaagcagctgacgcaggagcacccgcactgctacgttgacacgttgctcgacctcaggctcgacgaggaacaggatggtggccgccttctcacagaccacgagatagcaagcctgtgcatcgagatcctcatcgttggctcggagctaccggcgacggcgctggagtggatcatggcggagctagtaaagaacccaggcgtgcaggacaagctctacgaggagatgatggtgaaagccaaagccaccactgacgcttctgctggcgtgctcccgttctcggaggatgacttgcccaagataccctacctgagagcggtggtgctggagggtctccggcgccatccgccggggcaccagatgccgccacgcagggtgagggaggacgtggaggtgggtgactacgtggtgcccaagggctcagcgatcaacttcatgctgtacgacctgggcatggacgacgccacgtgggaccgcccagcagtgttcatgccggagaggttcctgcccggcggggaagccgaggcgctggacatcaccggcaccaaggagatgaagatgataccgtttggggcgggcagaaggatctgcccgggcctcaggatcgctctcctgctcctcgagtacttcgtcgccaacctcgtagcgaccttccactggaaagaggtggaagagggcgacgtcgatgtcaccaccgaggacgctcagctcaccgtcctcatggggaagccgctccgggcgcgcctgcttccaagactgcattcgtctgcttaattttcttcatcatcatggtgtatgtcagtgtgtcaccgaataattaattaatgcgaataaagatcaagcttcaaagactcttcaccgttc

SEQ ID NO: 17879 - protein, 527 aa, Zea mays subsp. mays
  peptide (1)..(527): Ceres Seq. ID no. 12381350
  misc_feature (37)..(521): Pfam Name: Cytochrome P450 Pfam Description: Cytochrome P450
  misc_feature (279)..(525): Homolog of NCBI NO: 13661764 NR Description: putative cytochrome P450 [Lolium rigidum]
  misc_feature (55)..(523): Homolog of NCBI NO: 28393336 NR Description: putative cytochrome p450 [Arabidopsis thaliana]
  misc_feature (55)..(523): Homolog of NCBI NO: 15228331 NR Description: cytochrome p450, putative; protein id:
  misc_feature (281)..(509): Homolog of NCBI NO: 28971943 NR Description: putative cytochrome P450 [Oryza sativa (japonica
  misc_feature (22)..(524): Homolog of NCBI NO: 15224379 NR Description: cytochrome p450, putative; protein id:
  misc_feature (8)..(522): Homolog of NCBI NO: 15217771 NR Description: cytochrome p450, putative
  misc_feature (7)..(522): Homolog of NCBI NO: 37536034 NR Description: putative cytochrome P450 [Oryza sativa (japonica
  misc_feature (6)..(516): Homolog of NCBI NO: 37536046 NR Description: putative cytochrome P450 [Oryza sativa (japonica
  misc_feature (6)..(522): Homolog of NCBI NO: 37536044 NR Description: putative cytochrome P450 [Oryza sativa (japonica
  misc_feature (1)..(522): Homolog of NCBI NO: 37530946 NR Description: putative cytochrome P450 [Oryza sativa (japonica
MELSWDEWDVIILAACSFLIPLVFLCNATKRRRRRAPPGPATVPIIGNLAWLTLRDGLGELDILRRLHSRFGPLLSVRLGSSEQVNVADRRLAHALLVERGAAVADRSPLLVSTERFGAFGSFSIHVSSYGPRWSVLRRNFAAEVVSPARFRQMAASRELALADLIRKLKLQEGVVVCRDAFQHAMSSLFIAMCFGKVLDDSSVDSIGVALRDFVLHGGASGMGMALFLFLPALTTRLFRGLLRSKEAKRQKLENVYCLPLIHERRERRKTKQLTQEHPHCYVDTLLDLRLDEEQDGGRLLTDHEIASLCIEILIVGSELPATALEWIMAELVKNPGVQDKLYEEMMVKAKATTDASAGVLPFSEDDLPKIPYLRAVVLEGLRRHPPGHQMPPRRVREDVEVGDYVVPKGSAINFMLYDLGMDDATWDRPAVFMPERFLPGGEAEALDITGTKEMKMIPFGAGRRICPGLRIALLLLEYFVANLVATFHWKEVEEGDVDVTTEDAQLTVLMGKPLRARLLPRLHSSA

SEQ ID NO: 17880 - protein, 374 aa, Zea mays subsp. mays
  peptide (1)..(374): Ceres Seq. ID no. 12381351
  misc_feature (1)..(368): Pfam Name: Cytochrome P450 Pfam Description: Cytochrome P450
  misc_feature (126)..(372): Homolog of NCBI NO: 13661764 NR Description: putative cytochrome P450 [Lolium rigidum]
  misc_feature (1)..(370): Homolog of NCBI NO: 28393336 NR Description: putative cytochrome p450 [Arabidopsis thaliana]
  misc_feature (1)..(370): Homolog of NCBI NO: 15228331 NR Description: cytochrome p450, putative; protein id:
  misc_feature (128)..(356): Homolog of NCBI NO: 28971943 NR Description: putative cytochrome P450 [Oryza sativa (japonica
  misc_feature (1)..(371): Homolog of NCBI NO: 15224379 NR Description: cytochrome p450, putative; protein id:
  misc_feature (1)..(369): Homolog of NCBI NO: 15217771 NR Description: cytochrome p450, putative
  misc_feature (1)..(369): Homolog of NCBI NO: 37536034 NR Description: putative cytochrome P450 [Oryza sativa (japonica
  misc_feature (1)..(363): Homolog of NCBI NO: 37536046 NR Description: putative cytochrome P450 [Oryza sativa (japonica
  misc_feature (1)..(369): Homolog of NCBI NO: 37536044 NR Description: putative cytochrome P450 [Oryza sativa (japonica
  misc_feature (1)..(369): Homolog of NCBI NO: 37530946 NR Description: putative cytochrome P450 [Oryza sativa (japonica
MAASRELALADLIRKLKLQEGVVVCRDAFQHAMSSLFIAMCFGKVLDDSSVDSIGVALRDFVLHGGASGMGMALFLFLPALTTRLFRGLLRSKEAKRQKLENVYCLPLIHERRERRKTKQLTQEHPHCYVDTLLDLRLDEEQDGGRLLTDHEIASLCIEILIVGSELPATALEWIMAELVKNPGVQDKLYEEMMVKAKATTDASAGVLPFSEDDLPKIPYLRAVVLEGLRRHPPGHQMPPRRVREDVEVGDYVVPKGSAINFMLYDLGMDDATWDRPAVFMPERFLPGGEAEALDITGTKEMKMIPFGAGRRICPGLRIALLLLEYFVANLVATFHWKEVEEGDVDVTTEDAQLTVLMGKPLRARLLPRLHSSA

SEQ ID NO: 17881 - protein, 342 aa, Zea mays subsp. mays
  peptide (1)..(342): Ceres Seq. ID no. 12381352
  misc_feature (1)..(336): Pfam Name: Cytochrome P450 Pfam Description: Cytochrome P450
  misc_feature (1)..(331): Homolog of NCBI NO: 37536046 NR Description: putative cytochrome P450 [Oryza sativa (japonica
  misc_feature (1)..(337): Homolog of NCBI NO: 37536044 NR Description: putative cytochrome P450 [Oryza sativa (japonica
  misc_feature (1)..(338): Homolog of NCBI NO: 28393336 NR Description: putative cytochrome p450 [Arabidopsis thaliana]
  misc_feature (96)..(324): Homolog of NCBI NO: 28971943 NR Description: putative cytochrome P450 [Oryza sativa (japonica
  misc_feature (1)..(337): Homolog of NCBI NO: 15217771 NR Description: cytochrome p450, putative
  misc_feature (1)..(337): Homolog of NCBI NO: 37536034 NR Description: putative cytochrome P450 [Oryza sativa (japonica
  misc_feature (1)..(339): Homolog of NCBI NO: 15224379 NR Description: cytochrome p450, putative; protein id:
  misc_feature (1)..(338): Homolog of NCBI NO: 15228331 NR Description: cytochrome p450, putative; protein id:
  misc_feature (94)..(340): Homolog of NCBI NO: 13661764 NR Description: putative cytochrome P450 [Lolium rigidum]
  misc_feature (1)..(337): Homolog of NCBI NO: 37530946 NR Description: putative cytochrome P450 [Oryza sativa (japonica
MSSLFIAMCFGKVLDDSSVDSIGVALRDFVLHGGASGMGMALFLFLPALTTRLFRGLLRSKEAKRQKLENVYCLPLIHERRERRKTKQLTQEHPHCYVDTLLDLRLDEEQDGGRLLTDHEIASLCIEILIVGSELPATALEWIMAELVKNPGVQDKLYEEMMVKAKATTDASAGVLPFSEDDLPKIPYLRAVVLEGLRRHPPGHQMPPRRVREDVEVGDYVVPKGSAINFMLYDLGMDDATWDRPAVFMPERFLPGGEAEALDITGTKEMKMIPFGAGRRICPGLRIALLLLEYFVANLVATFHWKEVEEGDVDVTTEDAQLTVLMGKPLRARLLPRLHSSA

SEQ ID NO: 17882 - DNA, 1251 bp, Zea mays subsp. mays
  misc_feature (1)..(1251): Ceres Seq. ID no. 12359009
  misc_feature: MA Experiment ID: 108535 Result: Up-regulated in Transcription
  misc_feature: MA Experiment 108535 PARAMETER Experiment Name: Zm_Meristem_P Parameter: Age (day) Value: 8
  misc_feature: MA Experiment 108535 PARAMETER Experiment Name: Zm_Meristem_P Parameter: Organism Value: Zea mays
  misc_feature: MA Experiment 108535 PARAMETER Experiment Name: Zm_Meristem_P Parameter: Plant Line Value: 35A19
  misc_feature: MA Experiment 108535 PARAMETER Experiment Name: Zm_Meristem_P Parameter: Tissue Value: Root Meristem vs. Above Root Meristem
  misc_feature: MA Experiment ID: 108543 Result: Down-regulated in Transcription
  misc_feature: MA Experiment ID: 108544 Result: Down-regulated in Transcription
aaaattactgattgattgaattgcgaagcatatatatggcggccttctcctccagcaacggcgtgccgccgggcttccggttccacccgaccgacgaggagctgctgctatactacctcaagaagaaggtcggattcgagaagttcgaactcgaggtcatcagggaggtcgacctcaacaagatcgagccatgggagctgcaagagacgtgccggatcgggtcggcgccgcagaacgagtggtacttcttcagccacaaggaccgcaagtacccgacggggtcgaggacgaaccgcgccacgacggccggcttctggaaggccacgggccgggacaagtgcatccggaccagctaccgcaagatcggcatgcgaaagacgctcgtcttctaccgcggccgcgcccctcacggccagaagaccgactggatcatgcacgagtaccgcctcgaggacgccgacgacgacgcccagggcggcacccagcgaggacggatgggtggtgtgccgcgtgttcaagaagaagtgcttcttcaagattggcggaggcgaagggagcaccaccagcagccagggcgcggatgccggcggccacctggccaccatgtcgccgccgctcggcggacaccacgacctggcgtacatgcacccgcacccgtactaccaccacgccgcctcctactactcccagatgcagaccccggggccgcacgccaccgcatactcgcaccacgtgcaggtccaggacctcctcaccaaccaccgacccacggacgacgacggcgccggcaccggctacgacttctccggcctgcatgtcgagcatcaacccggtggcggccttgacgtcggcagcagcgatggcgtcgccacagacgacggtggccagctggccggcgaaaggagggatcagaccaccggtacagccgcagatcatcagtggcaggcgatggatggtttcagcaacggcgggagcgccgaggtgcagcaaatgaccggcgcccaacgaggcggggagatggatttgtggggttacggaaggtaaaaacttgatgaccaccacctatacgatcgaaaacatggacgtcaagtgagcatctttcatgcatacatgatcgaagatatggtgcaaattgatgcatgcgttcattgggagtttatatatagcttgatgacttgtttggactagttttggtgtttacgatgtgtttgtatatgttggttaatttgttggtacaataagagccaaagg

SEQ ID NO: 17883 - protein, 269 aa, Zea mays subsp. mays
  peptide (1)..(269): Ceres Seq. ID no. 12359010
  misc_feature (10)..(139): Pfam Name: No apical meristem (NAM) protein Pfam Description: No apical meristem (NAM) protein
  misc_feature (10)..(264): Homolog of NCBI NO: 6730944 NR Description: OsNAC7 protein [Oryza sativa]
  misc_feature (10)..(142): Homolog of NCBI NO: 24413978 NR Description: NAM-like protein [Oryza sativa (japonica
  misc_feature (6)..(140): Homolog of NCBI NO: 6006373 NR Description: Similar to NAM like protein (AC005310)
  misc_feature (10)..(145): Homolog of NCBI NO: 34902254 NR Description: Putative NAM-like protein
  misc_feature (7)..(145): Homolog of NCBI NO: 15227958 NR Description: putative NAM (no apical meristem)-like protein
  misc_feature (1)..(145): Homolog of NCBI NO: 15234325 NR Description: NAM like protein; protein id: At4g36160.1
  misc_feature (6)..(140): Homolog of NCBI NO: 15223299 NR Description: OsNAC7 protein, putative; protein id: At1g32770.1
  misc_feature (1)..(146): Homolog of NCBI NO: 15219419 NR Description: NAM (no apical meristem)-like protein OsNAC4,
  misc_feature (5)..(144): Homolog of NCBI NO: 15217491 NR Description: unknown protein; protein id: At1g33280.1
  misc_feature (5)..(152): Homolog of NCBI NO: 15235031 NR Description: NAM/NAP like protein; protein id: At4g10350.1
MAAFSSSNGVPPGFRFHPTDEELLLYYLKKKVGFEKFELEVIREVDLNKIEPWELQETCRIGSAPQNEWYFFSHKDRKYPTGSRTNRATTAGFWKATGRDKCIRTSYRKIGMRKTLVFYRGRAPHGQKTDWIMHEYRLEDADDDAQGGTQRGRMGGVPRVQEEVLLQDWRRRREHHQQPGRGCRRPPGHHVAAARRTPRPGVHAPAPVLPPRRLLLLPDADPGAARHRILAPRAGPGPPHQPPTHGRRRRRHRLRLLRPACRASTRWRP

SEQ ID NO: 17884 - protein, 267 aa, Zea mays subsp. mays
  peptide (1)..(267): Ceres Seq. ID no. 12359011
  misc_feature (112)..(236): Pfam Name: Equine herpesvirus glycoprotein gp2 Pfam Description: Equine herpesvirus glycoprotein gp2
  misc_feature (143)..(267): Homolog of NCBI NO: 28574039 NR Description: Salivary gland secretion 1 CG3047-PA
  misc_feature (98)..(230): Homolog of NCBI NO: 28574039 NR Description: Salivary gland secretion 1 CG3047-PA
  misc_feature (143)..(230): Homolog of NCBI NO: 28574039 NR Description: Salivary gland secretion 1 CG3047-PA
  misc_feature (128)..(247): Homolog of NCBI NO: 28574039 NR Description: Salivary gland secretion 1 CG3047-PA
  misc_feature (109)..(207): Homolog of NCBI NO: 28574039 NR Description: Salivary gland secretion 1 CG3047-PA
  misc_feature (132)..(246): Homolog of NCBI NO: 28574039 NR Description: Salivary gland secretion 1 CG3047-PA
  misc_feature (115)..(235): Homolog of NCBI NO: 28574039 NR Description: Salivary gland secretion 1 CG3047-PA
  misc_feature (98)..(235): Homolog of NCBI NO: 28574039 NR Description: Salivary gland secretion 1 CG3047-PA
  misc_feature (78)..(229): Homolog of NCBI NO: 6649242 NR Description: splicing coactivator subunit SRm300 [Homo sapiens]
  misc_feature (69)..(243): Homolog of NCBI NO: 6649242 NR Description: splicing coactivator subunit SRm300 [Homo sapiens]
MGAARDVPDRVGAAERVVLLQPQGPQVPDGVEDEPRHDGRLLEGHGPGQVHPDQLPQDRHAKDARLLPRPRPSRPEDRLDHARVPPRGRRRRRPGRHPARTDGWCAACSRRSASSRLAEAKGAPPAARARMPAATWPPCRRRSADTTTWRTCTRTRTTTTPPPTTPRCRPRGRTPPHTRTTCRSRTSSPTTDPRTTTAPAPATTSPACMSSINPVAALTSAAAMASPQTTVASWPAKGGIRPPVQPQIISGRRWMVSATAGAPRCSK

SEQ ID NO: 17885 - protein, 158 aa, Zea mays subsp. mays
  peptide (1)..(158): Ceres Seq. ID no. 12359012
  misc_feature (1)..(153): Homolog of NCBI NO: 6730944 NR Description: OsNAC7 protein [Oryza sativa]
  misc_feature (1)..(31): Homolog of NCBI NO: 24413978 NR Description: NAM-like protein [Oryza sativa (japonica
  misc_feature (1)..(29): Homolog of NCBI NO: 6006373 NR Description: Similar to NAM like protein (AC005310)
  misc_feature (1)..(34): Homolog of NCBI NO: 34902254 NR Description: Putative NAM-like protein
  misc_feature (1)..(34): Homolog of NCBI NO: 15227958 NR Description: putative NAM (no apical meristem)-like protein
  misc_feature (1)..(34): Homolog of NCBI NO: 15234325 NR Description: NAM like protein; protein id: At4g36160.1
  misc_feature (1)..(29): Homolog of NCBI NO: 15223299 NR Description: OsNAC7 protein, putative; protein id: At1g32770.1
  misc_feature (1)..(35): Homolog of NCBI NO: 15219419 NR Description: NAM (no apical meristem)-like protein OsNAC4,
  misc_feature (1)..(33): Homolog of NCBI NO: 15217491 NR Description: unknown protein; protein id: At1g33280.1
  misc_feature (1)..(41): Homolog of NCBI NO: 15235031 NR Description: NAM/NAP like protein; protein id: At4g10350.1
MRKTLVFYRGRAPHGQKTDWIMHEYRLEDADDDAQGGTQRGRMGGVPRVQEEVLLQDWRRRREHHQQPGRGCRRPPGHHVAAARRTPRPGVHAPAPVLPPRRLLLLPDADPGAARHRILAPRAGPGPPHQPPTHGRRRRRHRLRLLRPACRASTRWRP

SEQ ID NO: 17886 - DNA, 579 bp, Zea mays subsp. mays
  misc_feature (1)..(579): Ceres Seq. ID no. 13622385
  misc_feature: MA Experiment ID: 20000534 Result: Up-regulated in Transcription
  misc_feature: MA Experiment 20000534 PARAMETER Experiment Name: Zm_Hybrid_Pollen_P Parameter: Age (day) Value: 8
  misc_feature: MA Experiment 20000534 PARAMETER Experiment Name: Zm_Hybrid_Pollen_P Parameter: Organism Value: Zea mays
  misc_feature: MA Experiment 20000534 PARAMETER Experiment Name: Zm_Hybrid_Pollen_P Parameter: Plant Line Value: 35A19
  misc_feature: MA Experiment 20000534 PARAMETER Experiment Name: Zm_Hybrid_Pollen_P Parameter: Tissue Value: Pollen vs. Aerial
aattgtcgttgccatccatcactcacctggccgcggaaactgatccatgatctgatcccacggcaccagcagcaacggccgaccgccgggccggccggccggcgcgcacgcgcggtggcaaataaagagcttagagccgccggccgggatctatggggcgcgaggcggcagcgacgaggccgcccaagctgcggaggggcctgtggtcgccggaggaggacgagaagctgtacaatcacatcatccgatatggcgtcggctgctgtagctcacccccaaagctcgctggcttggagagatgcggcaagagctgcaggctgagatggatcaactacctgcggcctgacctcaagaggggcagcttctcccagcaggaggaggatctcatcgtcagcctccacaagatactaggcaacaggtggtcccagatcgcgtcgcagctgccggggaggacggacaacgagatcaaaaacttctggaactcgtgcatcaagaagaagctccggcagcatggcatcgaccccgccacccacaagccgctcannnacgacgacaacgttgctgctgccgctgctgcgg

SEQ ID NO: 17887 - protein, 142 aa, Zea mays subsp. mays
  peptide (1)..(142): Ceres Seq. ID no. 13622386
  misc_feature (15)..(62): Pfam Name: Myb-like DNA-binding domain Pfam Description: Myb-like DNA-binding domain
  misc_feature (12)..(130): Homolog of NCBI NO: 28628949 NR Description: MYB2 [Dendrobium sp. XMW-2002-2]
  misc_feature (1)..(134): Homolog of NCBI NO: 30690317 NR Description: myb transcription factor (ATMYB4) [Arabidopsis
  misc_feature (1)..(134): Homolog of NCBI NO: 2280530 NR Description: ATMYB4 [Arabidopsis thaliana]
  misc_feature (1)..(138): Homolog of NCBI NO: 34902542 NR Description: putative transcription factor (myb)
  misc_feature (1)..(130): Homolog of NCBI NO: 34913340 NR Description: contains ESTs
  misc_feature (12)..(141): Homolog of NCBI NO: 28927688 NR Description: putative Myb-like DNA-binding protein
  misc_feature (1)..(141): Homolog of NCBI NO: 34911526 NR Description: putative myb-related protein
  misc_feature (1)..(141): Homolog of NCBI NO: 547958 NR Description: Myb-related protein Hv33
  misc_feature (1)..(141): Homolog of NCBI NO: 19059 NR Description: MybHv33 [Hordeum vulgare subsp. vulgare]
  misc_feature (1)..(139): Homolog of NCBI NO: 34913750 NR Description: OSJNBa0051H17.23 [Oryza sativa (japonica
  misc_feature (131)..(131): Xaa is any aa, unknown or other
  misc_feature (132)..(132): Xaa is any aa, unknown or other
MGREAAATRPPKLRRGLWSPEEDEKLYNHIIRYGVGCCSSPPKLAGLERCGKSCRLRWINYLRPDLKRGSFSQQEEDLIVSLHKILGNRWSQIASQLPGRTDNEIKNFWNSCIKKKLRQHGIDPATHKPLXXDDNVAAAAAA

SEQ ID NO: 17888 - protein, 106 aa, Zea mays subsp. mays
  peptide (1)..(106): Ceres Seq. ID no. 13622387
NCRCHPSLTWPRKLIHDLIPRHQQQRPTAGPAGRRARAVANKELRAAGRDLWGARRQRRGRPSCGGACGRRRRTRSCTITSSDMASAAVAHPQSSLAWRDAARAAG

SEQ ID NO: 17889 - DNA, 1117 bp, Zea mays subsp. mays
  misc_feature (1)..(1117): Ceres Seq. ID no. 12350716
  misc_feature: MA Experiment ID: 108528 Result: Up-regulated in Transcription
  misc_feature: MA Experiment 108528 PARAMETER Experiment Name: Zm_Imbibed_Seeds_P Parameter: Age (day) Value: 5 vs. 2
  misc_feature: MA Experiment 108528 PARAMETER Experiment Name: Zm_Imbibed_Seeds_P Parameter: Organism Value: Zea mays
  misc_feature: MA Experiment 108528 PARAMETER Experiment Name: Zm_Imbibed_Seeds_P Parameter: Plant Line Value: 35A19
  misc_feature: MA Experiment 108528 PARAMETER Experiment Name: Zm_Imbibed_Seeds_P Parameter: Tissue Value: Aerial vs. Embryo
  misc_feature: MA Experiment ID: 108543 Result: Down-regulated in Transcription
  misc_feature: MA Experiment ID: 108544 Result: Down-regulated in Transcription
  misc_feature: MA Experiment ID: 20000492 Result: Down-regulated in Transcription
  misc_feature: MA Experiment 20000492 PARAMETER Experiment Name: Zm_Hybrid_Seed_Dev_P Parameter: DAP Value: 12
  misc_feature: MA Experiment 20000492 PARAMETER Experiment Name: Zm_Hybrid_Seed_Dev_P Parameter: Organism Value: Zea mays
  misc_feature: MA Experiment 20000492 PARAMETER Experiment Name: Zm_Hybrid_Seed_Dev_P Parameter: Plant Line Value: 35A19
  misc_feature: MA Experiment 20000492 PARAMETER Experiment Name: Zm_Hybrid_Seed_Dev_P Parameter: Tissue Value: Fert Kernel vs. Unfert Floret
atgagctgcttccagcccggaaccgaggctaactccgccagccgactcggaccggtggtggtgtcgtggaagctgcgcagccacgggcgggcctgttcgctgttcgcagccgtgcctcgatcgccgcccgtgccagaggtctctctccaatggcggtgacgagcgccgcagcccgccgcttcctcgcgctcgcgcccgcccggggaccccgcgccttctggtcggcctcgtgtccacccgaccccgacgcaccttccgcctcgtcgacgtctaccgacaacaacagcaggaggaagaagaaggagccgtccgggtccgcccaccaccgcctcgccgccgtcatggacgccgtcaacgagcgcaagctcccacccgagctcagtgggcgcggcaacgcagtaaggtctgaaactgacattgtaaatgtcgttgaacaaagaatatggcattcaatggaggaagggcactttgaaaatctaccagggaagggcaaacccttaaacctcacttcaaatcctcatgccgatcctgccgaagacaccctttacaggatactttcaaagaatggttgtgcacctgaatgggttgaactgaataaggaaattcgtggcatgatcttgagctggaggtcggcattaaggaaagcatgggcaaaccgctctgaagatgatgattctaactggagtgatgacagcagggctctccaggagcgaattcgccagataaatgataaggttttccggtacaacctgatagtaccctttgggcgtcagttgtttggtctgaactgggacaaggagctggacaagttgaaggaagaataaaggacaaagaggtggacacattggtgaacatagcatggaggacttttgttgtatcaaaatgacctgtaactaggaatacctgataggacatacacatacttaagaaaaaccatgaaagctgagtataggtatttacacgtaggcttttattagtttatatatttttggagaaccaagttttccggtgtttccggtgctgtagccgattttgtgataaaactctgtcacatgggtaaaacctgagataatttcttagcggtaaaactcgatctatgccacatgggctaagctcc

SEQ ID NO: 17890 - protein, 224 aa, Zea mays subsp. mays
  peptide (1)..(224): Ceres Seq. ID no. 12350717
  misc_feature (93)..(224): Homolog of NCBI NO: 31233474 NR Description: ENSANGP00000015813 [Anopheles gambiae]
  misc_feature (90)..(204): Homolog of NCBI NO: 7020577 NR Description: unnamed protein product [Homo sapiens]
  misc_feature (112)..(223): Homolog of NCBI NO: 13542805 NR Description: Unknown (protein for IMAGE:3483507) [Mus musculus]
  misc_feature (90)..(218): Homolog of NCBI NO: 40254908 NR Description: chromosome 21 open reading frame 55 [Homo
  misc_feature (80)..(224): Homolog of NCBI NO: 24582398 NR Description: CG13776-PA [Drosophila melanogaster]
  misc_feature (90)..(223): Homolog of NCBI NO: 26349033 NR Description: unnamed protein product [Mus musculus]
  misc_feature (90)..(223): Homolog of NCBI NO: 20149746 NR Description: cDNA sequence BC020175; cDNA, sequence BC020175
  misc_feature (22)..(92): Homolog of NCBI NO: 11357378 NR Description: hypothetical protein F12E4.360 - Arabidopsis
  misc_feature (85)..(223): Homolog of NCBI NO: 11357378 NR Description: hypothetical protein F12E4.360 - Arabidopsis
  misc_feature (22)..(223): Homolog of NCBI NO: 18414270 NR Description: putative protein
MAVTSAAARRFLALAPARGPRAFWSASCPPDPDAPSASSTSTDNNSRRKKKEPSGSAHHRLAAVMDAVNERKLPPELSGRGNAVRSETDIVNVVEQRIWHSMEEGHFENLPGKGKPLNLTSNPHADPAEDTLYRILSKNGCAPEWVELNKEIRGMILSWRSALRKAWANRSEDDDSNWSDDSRALQERIRQINDKVFRYNLIVPFGRQLFGLNWDKELDKLKEE

SEQ ID NO: 17891 - protein, 160 aa, Zea mays subsp. mays
  peptide (1)..(160): Ceres Seq. ID no. 12350718
  misc_feature (29)..(160): Homolog of NCBI NO: 31233474 NR Description: ENSANGP00000015813 [Anopheles gambiae]
  misc_feature (26)..(140): Homolog of NCBI NO: 7020577 NR Description: unnamed protein product [Homo sapiens]
  misc_feature (48)..(159): Homolog of NCBI NO: 13542805 NR Description: Unknown (protein for IMAGE:3483507) [Mus musculus]
  misc_feature (26)..(154): Homolog of NCBI NO: 40254908 NR Description: chromosome 21 open reading frame 55 [Homo
  misc_feature (16)..(160): Homolog of NCBI NO: 24582398 NR Description: CG13776-PA [Drosophila melanogaster]
  misc_feature (26)..(159): Homolog of NCBI NO: 26349033 NR Description: unnamed protein product [Mus musculus]
  misc_feature (26)..(159): Homolog of NCBI NO: 20149746 NR Description: cDNA sequence BC020175; cDNA, sequence BC020175
  misc_feature (1)..(28): Homolog of NCBI NO: 11357378 NR Description: hypothetical protein F12E4.360 - Arabidopsis
  misc_feature (21)..(159): Homolog of NCBI NO: 11357378 NR Description: hypothetical protein F12E4.360 - Arabidopsis
  misc_feature (1)..(159): Homolog of NCBI NO: 18414270 NR Description: putative protein
MDAVNERKLPPELSGRGNAVRSETDIVNVVEQRIWHSMEEGHFENLPGKGKPLNLTSNPHADPAEDTLYRILSKNGCAPEWVELNKEIRGMILSWRSALRKAWANRSEDDDSNWSDDSRALQERIRQINDKVFRYNLIVPFGRQLFGLNWDKELDKLKEE

SEQ ID NO: 17892 - protein, 123 aa, Zea mays subsp. mays
  peptide (1)..(123): Ceres Seq. ID no. 12350719
  misc_feature (1)..(103): Homolog of NCBI NO: 20810277 NR Description: Unknown (protein for MGC:33722) [Homo sapiens]
  misc_feature (1)..(123): Homolog of NCBI NO: 31233474 NR Description: ENSANGP00000015813 [Anopheles gambiae]
  misc_feature (1)..(103): Homolog of NCBI NO: 7020577 NR Description: unnamed protein product [Homo sapiens]
  misc_feature (11)..(122): Homolog of NCBI NO: 13542805 NR Description: Unknown (protein for IMAGE:3483507) [Mus musculus]
  misc_feature (1)..(117): Homolog of NCBI NO: 40254908 NR Description: chromosome 21 open reading frame 55 [Homo
  misc_feature (1)..(123): Homolog of NCBI NO: 24582398 NR Description: CG13776-PA [Drosophila melanogaster]
  misc_feature (1)..(122): Homolog of NCBI NO: 26349033 NR Description: unnamed protein product [Mus musculus]
  misc_feature (1)..(122): Homolog of NCBI NO: 20149746 NR Description: cDNA sequence BC020175; cDNA, sequence BC020175
  misc_feature (1)..(122): Homolog of NCBI NO: 11357378 NR Description: hypothetical protein F12E4.360 - Arabidopsis
  misc_feature (1)..(122): Homolog of NCBI NO: 18414270 NR Description: putative protein
MEEGHFENLPGKGKPLNLTSNPHADPAEDTLYRILSKNGCAPEWVELNKEIRGMILSWRSALRKAWANRSEDDDSNWSDDSRALQERIRQINDKVFRYNLIVPFGRQLFGLNWDKELDKLKEE

SEQ ID NO: 17893 - DNA, 1321 bp, Zea mays subsp. mays
  misc_feature (1)..(1321): Ceres Seq. ID no. 12360757
  misc_feature: MA Experiment ID: 108535 Result: Up-regulated in Transcription
  misc_feature: MA Experiment 108535 PARAMETER Experiment Name: Zm_Meristem_P Parameter: Age (day) Value: 8
  misc_feature: MA Experiment 108535 PARAMETER Experiment Name: Zm_Meristem_P Parameter: Organism Value: Zea mays
  misc_feature: MA Experiment 108535 PARAMETER Experiment Name: Zm_Meristem_P Parameter: Plant Line Value: 35A19
  misc_feature: MA Experiment 108535 PARAMETER Experiment Name: Zm_Meristem_P Parameter: Tissue Value: Root Meristem vs. Above Root Meristem
  misc_feature: MA Experiment ID: 108556 Result: Down-regulated in Transcription
  misc_feature: MA Experiment 108556 PARAMETER Experiment Name: Zm_Drought_P Parameter: Age (day) Value: 9
  misc_feature: MA Experiment 108556 PARAMETER Experiment Name: Zm_Drought_P Parameter: Organism Value: Zea mays
  misc_feature: MA Experiment 108556 PARAMETER Experiment Name: Zm_Drought_P Parameter: Plant Line Value: 35A19
  misc_feature: MA Experiment 108556 PARAMETER Experiment Name: Zm_Drought_P Parameter: Timepoint (hr) Value: 24
  misc_feature: MA Experiment 108556 PARAMETER Experiment Name: Zm_Drought_P Parameter: Tissue Value: Aerial
  misc_feature: MA Experiment 108556 PARAMETER Experiment Name: Zm_Drought_P Parameter: Treatment Value: Drought vs. No Drought
  misc_feature: MA Experiment ID: 20000477 Result: Down-regulated in Transcription
  misc_feature: MA Experiment 20000477 PARAMETER Experiment Name: Zm_5mM_SA_P Parameter: Age (day) Value: 10
  misc_feature: MA Experiment 20000477 PARAMETER Experiment Name: Zm_5mM_SA_P Parameter: Organism Value: Zea mays
  misc_feature: MA Experiment 20000477 PARAMETER Experiment Name: Zm_5mM_SA_P Parameter: Plant Line Value: 35A19
  misc_feature: MA Experiment 20000477 PARAMETER Experiment Name: Zm_5mM_SA_P Parameter: Timepoint (hr) Value: 48
  misc_feature: MA Experiment 20000477 PARAMETER Experiment Name: Zm_5mM_SA_P Parameter: Tissue Value: Aerial
  misc_feature: MA Experiment 20000477 PARAMETER Experiment Name: Zm_5mM_SA_P Parameter: Treatment Value: 5mM SA vs. No Treatment
gcacgagaccattacctagaacatcctaacaaaatcttttttttttgttcctgtgatgaactgagagagttggtttttgagttctgcaggctattgaagtttcgaagcgccaaatgaaactaagagaggcgtctggaaatagtgatatggtttcaaggctagaagcagctgagtcaaagctgcaagagttgaaatcgaatatgggggtattgggcaaagaagctgttgcagcaatgactgccgttgaggcccaacagcaaagattgaccttgcagcgtcttattgcattggtacattatttgtctagttgggtgatttgggccacttgactttttgtttgtttgtcttgaagttgtctattgtgtctcataacatttgtggacttaattgaaggttgaatcagagagaaactaccaccaaaaggtcctacaaattcttgatcaacttgagagagaggtctgatggtttcacatccacatcctttccatccttgcccattgtgctaaagaaagtttacaacttcaagaaaaatctggtcggttatgttatcttgattgagctttcttattttttttctagatggtatctgagcgccaaagaatcgaaggagcacctccggtggttgagagttccatgcctccaccgcctgcatatgaagaagtcaatggtatattcatgagaaatacagttgcagaattggtcgagactgtggagtatttcttggctgaggcaatccagtcataccaagccgaaagcgataccgagctcaacctttcaactggtgactacatagtggtccgaaaggtagtgctttcagatttctcttacacgtcatttacgaattgctcatgtagtcatgttatgctgcggccagcttcacacatattggttgcccatttcatgagtatctcaatcacatttcacattgtacccgaacttgattaccgaatttacataaaaaaccctttcctaatcaggtgtcgaacaatggatgggccgaaggtgaatgcagggggaaagctggttggttcccctacgactacatcgagaaacgggagcgtgtgcttgcaagtaaagtcggccaagttttctaagtcttccgctgagccatgtagtatatccccggggttgtacactgtgtgttgtttatgcttgtcatcttcagagaatcagaggagatctgtaattttgctgaaagctgcctgttgggtggtttgtttctgcctggccgccttaattgttcaaattcatgtggcaggaactgaatatattcattcttcagttatcctgtcaatatatataatttttttgtttgaagcac

SEQ ID NO: 17894 - protein, 247 aa, Zea mays subsp. mays
  peptide (1)..(247): Ceres Seq. ID no. 12360758
  misc_feature (42)..(76): Homolog of NCBI NO: 22328762 NR Description: putative protein
  misc_feature (42)..(76): Homolog of NCBI NO: 21928139 NR Description: AT4g18060/F15J5_30 [Arabidopsis thaliana]
  misc_feature (1)..(77): Homolog of NCBI NO: 7487662 NR Description: hypothetical protein T4L20.240 - Arabidopsis
  misc_feature (1)..(82): Homolog of NCBI NO: 18418491 NR Description: putative protein
  misc_feature (1)..(76): Homolog of NCBI NO: 38344978 NR Description: OSJNBa0011L07.8 [Oryza sativa (japonica
  misc_feature (1)..(76): Homolog of NCBI NO: 37535998 NR Description: unknown protein [Oryza sativa (japonica
  misc_feature (16)..(82): Homolog of NCBI NO: 15221714 NR Description: unknown protein
  misc_feature (42)..(76): Homolog of NCBI NO: 22093679 NR Description: putative SH3(Src homology) domain-containing
  misc_feature (42)..(76): Homolog of NCBI NO: 16974680 NR Description: SH3 domain-containing protein 3 [Arabidopsis
  misc_feature (42)..(76): Homolog of NCBI NO: 7485521 NR Description: hypothetical protein F15J5.30 - Arabidopsis
MVSERQRIEGAPPVVESSMPPPPAYEEVNGIFMRNTVAELVETVEYFLAEAIQSYQAESDTELNLSTGDYIVVRKVVLSDFSYTSFTNCSCSHVMLRPASHILVAHFMSISITFHIVPELDYRIYIKNPFLIRCRTMDGPKVNAGGKLVGSPTTTSRNGSVCLQVKSAKFSKSSAEPCSISPGLYTVCCLCLSSSENQRRSVILLKAACWVVCFCLAALIVQIHVAGTEYIHSSVILSIYIIFLFEA

SEQ ID NO: 17895 - protein, 229 aa, Zea mays subsp. mays
  peptide (1)..(229): Ceres Seq. ID no. 12360759
  misc_feature (1)..(64): Homolog of NCBI NO: 15221714 NR Description: unknown protein
  misc_feature (24)..(58): Homolog of NCBI NO: 22093679 NR Description: putative SH3(Src homology) domain-containing
  misc_feature (24)..(58): Homolog of NCBI NO: 16974680 NR Description: SH3 domain-containing protein 3 [Arabidopsis
  misc_feature (24)..(58): Homolog of NCBI NO: 7485521 NR Description: hypothetical protein F15J5.30 - Arabidopsis
  misc_feature (24)..(58): Homolog of NCBI NO: 22328762 NR Description: putative protein
  misc_feature (24)..(58): Homolog of NCBI NO: 21928139 NR Description: AT4g18060/F15J5_30 [Arabidopsis thaliana]
  misc_feature (1)..(59): Homolog of NCBI NO: 7487662 NR Description: hypothetical protein T4L20.240 - Arabidopsis
  misc_feature (1)..(64): Homolog of NCBI NO: 18418491 NR Description: putative protein
  misc_feature (1)..(58): Homolog of NCBI NO: 38344978 NR Description: OSJNBa0011L07.8 [Oryza sativa (japonica
  misc_feature (1)..(58): Homolog of NCBI NO: 37535998 NR Description: unknown protein [Oryza sativa (japonica
MPPPPAYEEVNGIFMRNTVAELVETVEYFLAEAIQSYQAESDTELNLSTGDYIVVRKVVLSDFSYTSFTNCSCSHVMLRPASHILVAHFMSISITFHIVPELDYRIYIKNPFLIRCRTMDGPKVNAGGKLVGSPTTTSRNGSVCLQVKSAKFSKSSAEPCSISPGLYTVCCLCLSSSENQRRSVILLKAACWVVCFCLAALIVQIHVAGTEYIHSSVILSIYIIFLFEA

SEQ ID NO: 17896 - protein, 215 aa, Zea mays subsp. mays
  peptide (1)..(215): Ceres Seq. ID no. 12360760
  misc_feature (1)..(50): Homolog of NCBI NO: 15221714 NR Description: unknown protein
  misc_feature (10)..(44): Homolog of NCBI NO: 22093679 NR Description: putative SH3(Src homology) domain-containing
  misc_feature (10)..(44): Homolog of NCBI NO: 16974680 NR Description: SH3 domain-containing protein 3 [Arabidopsis
  misc_feature (10)..(44): Homolog of NCBI NO: 7485521 NR Description: hypothetical protein F15J5.30 - Arabidopsis
  misc_feature (10)..(44): Homolog of NCBI NO: 22328762 NR Description: putative protein
  misc_feature (10)..(44): Homolog of NCBI NO: 21928139 NR Description: AT4g18060/F15J5_30 [Arabidopsis thaliana]
  misc_feature (1)..(45): Homolog of NCBI NO: 7487662 NR Description: hypothetical protein T4L20.240 - Arabidopsis
  misc_feature (1)..(50): Homolog of NCBI NO: 18418491 NR Description: putative protein
  misc_feature (1)..(44): Homolog of NCBI NO: 38344978 NR Description: OSJNBa0011L07.8 [Oryza sativa (japonica
  misc_feature (1)..(44): Homolog of NCBI NO: 37535998 NR Description: unknown protein [Oryza sativa (japonica
MRNTVAELVETVEYFLAEAIQSYQAESDTELNLSTGDYIVVRKVVLSDFSYTSFTNCSCSHVMLRPASHILVAHFMSISITFHIVPELDYRIYIKNPFLIRCRTMDGPKVNAGGKLVGSPTTTSRNGSVCLQVKSAKFSKSSAEPCSISPGLYTVCCLCLSSSENQRRSVILLKAACWVVCFCLAALIVQIHVAGTEYIHSSVILSIYIIFLFEA

SEQ ID NO: 17897 - DNA, 1051 bp, Zea mays subsp. mays
  misc_feature (1)..(1051): Ceres Seq. ID no. 12359310
  misc_feature: MA Experiment ID: 108529 Result: Up-regulated in Transcription
  misc_feature: MA Experiment 108529 PARAMETER Experiment Name: Zm_Imbibed_Seeds_P Parameter: Age (day) Value: 5 vs. 2
  misc_feature: MA Experiment 108529 PARAMETER Experiment Name: Zm_Imbibed_Seeds_P Parameter: Organism Value: Zea mays
  misc_feature: MA Experiment 108529 PARAMETER Experiment Name: Zm_Imbibed_Seeds_P Parameter: Plant Line Value: 35A19
  misc_feature: MA Experiment 108529 PARAMETER Experiment Name: Zm_Imbibed_Seeds_P Parameter: Tissue Value: Roots vs. Embryo
  misc_feature: MA Experiment ID: 108535 Result: Down-regulated in Transcription
  misc_feature: MA Experiment 108535 PARAMETER Experiment Name: Zm_Meristem_P Parameter: Age (day) Value: 8
  misc_feature: MA Experiment 108535 PARAMETER Experiment Name: Zm_Meristem_P Parameter: Organism Value: Zea mays
  misc_feature: MA Experiment 108535 PARAMETER Experiment Name: Zm_Meristem_P Parameter: Plant Line Value: 35A19
  misc_feature: MA Experiment 108535 PARAMETER Experiment Name: Zm_Meristem_P Parameter: Tissue Value: Root Meristem vs. Above Root Meristem
  misc_feature: MA Experiment ID: 108536 Result: Up-regulated in Transcription
  misc_feature: MA Experiment 108536 PARAMETER Experiment Name: Zm_Meristem_P Parameter: Age (day) Value: 8
  misc_feature: MA Experiment 108536 PARAMETER Experiment Name: Zm_Meristem_P Parameter: Organism Value: Zea mays
  misc_feature: MA Experiment 108536 PARAMETER Experiment Name: Zm_Meristem_P Parameter: Plant Line Value: 35A19
  misc_feature: MA Experiment 108536 PARAMETER Experiment Name: Zm_Meristem_P Parameter: Tissue Value: Shoot Meristem vs. Above Shoot Meristem
  misc_feature: MA Experiment ID: 108547 Result: Up-regulated in Transcription
  misc_feature: MA Experiment 108547 PARAMETER Experiment Name: Zm_Imbibed_Seeds_P Parameter: Age (day) Value: 4 vs. 2
  misc_feature: MA Experiment 108547 PARAMETER Experiment Name: Zm_Imbibed_Seeds_P Parameter: Organism Value: Zea mays
  misc_feature: MA Experiment 108547 PARAMETER Experiment Name: Zm_Imbibed_Seeds_P Parameter: Plant Line Value: 35A19
  misc_feature: MA Experiment 108547 PARAMETER Experiment Name: Zm_Imbibed_Seeds_P Parameter: Tissue Value: Aerial vs. Embryo
acacacacacgactagcaggcacagcagcaccgactagtcaatctctacttgcctacacagcagaaggaaccagacagggaagtagggaaccagagaaagcatagcaatggtgcggaagccgatccacgctgacgacgccggcgctaagagcacggaggcgagcaaggagaggaaggggttgtggtcgccggaggaggacgagcggctcttcacccacatcacctaccacgtcgtctccacctggagctccgtcgcgcagctagcaggcctgcggaggagcggcaagagctgccggctgcggtggctgaactacctgcgcccggacctcaagaaggagcccatctccaagcgcgaggaggagaccatcatctccctgcagcagtcgctcggcaaccggtggtcgactatcgcggcgaggatgccaggcaggacggacaacgagatcaagaactactggaactcccgcatcaggaagcgcctcaacgccgccgcctccagagctgcaggctgcggcgacggcggtgacagcgcggccgagccatcgggggccgcggccgcgggaggaaaggaggattcggccaacgctgcgccgccgccagcggcccagcctacgcccatcccggcgcggttcccggtcttcgggtgccagctgcccgacggagccggcggcggcatttcgtctcccggcagcggcaagagtccacagtcgtcgactactgcgagtatgcggcagaacgcgggtgacgagagcgatgcgagcgacggtggcggtggcgacagcgacatggtccatttcctctcgttcgatgatctggattatcccggggatttgctcattgatgtgccgggcgccatggacgcgtgggagagccaactgtgctatgcgaatccgatgatgagctcgctctgttgatccacactaccaattgcatatagcacagccattgtcttgttcccgctaatcatatataggttgtatgaattgtttatgtgaaatttcactgggttttttggagaaggaatgcatgatgacgtgtgggtattcctatt

SEQ ID NO: 17898 - protein, 268 aa, Zea mays subsp. mays
  peptide (1)..(268): Ceres Seq. ID no. 12359311
  misc_feature (76)..(121): Pfam Name: Myb-like DNA-binding domain Pfam Description: Myb-like DNA-binding domain
  misc_feature (20)..(178): Homolog of NCBI NO: 547958 NR Description: Myb-related protein Hv33
  misc_feature (20)..(178): Homolog of NCBI NO: 19059 NR Description: MybHv33 [Hordeum vulgare subsp. vulgare]
  misc_feature (20)..(194): Homolog of NCBI NO: 34911526 NR Description: putative myb-related protein
  misc_feature (22)..(253): Homolog of NCBI NO: 33087073 NR Description: myb-related protein [Oryza sativa (japonica
  misc_feature (22)..(253): Homolog of NCBI NO: 7438336 NR Description: myb protein homolog - rice
  misc_feature (10)..(144): Homolog of NCBI NO: 34913750 NR Description: OSJNBa0051H17.23 [Oryza sativa (japonica
  misc_feature (4)..(225): Homolog of NCBI NO: 34896174 NR Description: putative transcription factor (myb)
  misc_feature (4)..(225): Homolog of NCBI NO: 19072768 NR Description: typical P-type R2R3 Myb protein [Oryza sativa]
  misc_feature (1)..(49): Homolog of NCBI NO: 34896170 NR Description: hypothetical protein [Oryza sativa (japonica
  misc_feature (53)..(261): Homolog of NCBI NO: 34896170 NR Description: hypothetical protein [Oryza sativa (japonica
MVRKPIHADDAGAKSTEASKERKGLWSPEEDERLFTHITYHVVSTWSSVAQLAGLRRSGKSCRLRWLNYLRPDLKKEPISKREEETIISLQQSLGNRWSTIAARMPGRTDNEIKNYWNSRIRKRLNAAASRAAGCGDGGDSAAEPSGAAAAGGKEDSANAAPPPAAQPTPIPARFPVFGCQLPDGAGGGISSPGSGKSPQSSTTASMRQNAGDESDASDGGGGDSDMVHFLSFDDLDYPGDLLIDVPGAMDAWESQLCYANPMMSSLC

SEQ ID NO: 17899 - protein, 164 aa, Zea mays subsp. mays
  peptide (1)..(164): Ceres Seq. ID no. 12359312
  misc_feature (1)..(100): Homolog of NCBI NO: 28927688 NR Description: putative Myb-like DNA-binding protein
  misc_feature (1)..(74): Homolog of NCBI NO: 547958 NR Description: Myb-related protein Hv33
  misc_feature (1)..(74): Homolog of NCBI NO: 19059 NR Description: MybHv33 [Hordeum vulgare subsp. vulgare]
  misc_feature (1)..(90): Homolog of NCBI NO: 34911526 NR Description: putative myb-related protein
  misc_feature (1)..(149): Homolog of NCBI NO: 33087073 NR Description: myb-related protein [Oryza sativa (japonica
  misc_feature (1)..(149): Homolog of NCBI NO: 7438336 NR Description: myb protein homolog - rice
  misc_feature (1)..(40): Homolog of NCBI NO: 34913750 NR Description: OSJNBa0051H17.23 [Oryza sativa (japonica
  misc_feature (1)..(121): Homolog of NCBI NO: 34896174 NR Description: putative transcription factor (myb)
  misc_feature (1)..(121): Homolog of NCBI NO: 19072768 NR Description: typical P-type R2R3 Myb protein [Oryza sativa]
  misc_feature (1)..(157): Homolog of NCBI NO: 34896170 NR Description: hypothetical protein [Oryza sativa (japonica
MPGRTDNEIKNYWNSRIRKRLNAAASRAAGCGDGGDSAAEPSGAAAAGGKEDSANAAPPPAAQPTPIPARFPVFGCQLPDGAGGGISSPGSGKSPQSSTTASMRQNAGDESDASDGGGGDSDMVHFLSFDDLDYPGDLLIDVPGAMDAWESQLCYANPMMSSLC

SEQ ID NO: 17900 - DNA, 852 bp, Zea mays subsp. mays
  misc_feature (1)..(852): Ceres Seq. ID no. 12391900
  misc_feature: MA Experiment ID: 108526 Result: Up-regulated in Transcription
  misc_feature: MA Experiment 108526 PARAMETER Experiment Name: Zm_5mM_NO_P Parameter: Age (day) Value: 8
  misc_feature: MA Experiment 108526 PARAMETER Experiment Name: Zm_5mM_NO_P Parameter: Organism Value: Zea mays
  misc_feature: MA Experiment 108526 PARAMETER Experiment Name: Zm_5mM_NO_P Parameter: Plant Line Value: 35A19
  misc_feature: MA Experiment 108526 PARAMETER Experiment Name: Zm_5mM_NO_P Parameter: Timepoint (hr) Value: 1
  misc_feature: MA Experiment 108526 PARAMETER Experiment Name: Zm_5mM_NO_P Parameter: Tissue Value: Aerial
  misc_feature: MA Experiment 108526 PARAMETER Experiment Name: Zm_5mM_NO_P Parameter: Treatment Value: 5mM NO vs. No Treatment
  misc_feature: MA Experiment ID: 108527 Result: Up-regulated in Transcription
  misc_feature: MA Experiment 108527 PARAMETER Experiment Name: Zm_5mM_NO_P Parameter: Age (day) Value: 8
  misc_feature: MA Experiment 108527 PARAMETER Experiment Name: Zm_5mM_NO_P Parameter: Organism Value: Zea mays
  misc_feature: MA Experiment 108527 PARAMETER Experiment Name: Zm_5mM_NO_P Parameter: Plant Line Value: 35A19
  misc_feature: MA Experiment 108527 PARAMETER Experiment Name: Zm_5mM_NO_P Parameter: Timepoint (hr) Value: 6
  misc_feature: MA Experiment 108527 PARAMETER Experiment Name: Zm_5mM_NO_P Parameter: Tissue Value: Aerial
  misc_feature: MA Experiment 108527 PARAMETER Experiment Name: Zm_5mM_NO_P Parameter: Treatment Value: 5mM NO vs. No Treatment
  misc_feature: MA Experiment ID: 108534 Result: Up-regulated in Transcription
  misc_feature: MA Experiment 108534 PARAMETER Experiment Name: Zm_4deg_Cold_P Parameter: Age (hr) Value: 8
  misc_feature: MA Experiment 108534 PARAMETER Experiment Name: Zm_4deg_Cold_P Parameter: Organism Value: Zea mays
  misc_feature: MA Experiment 108534 PARAMETER Experiment Name: Zm_4deg_Cold_P Parameter: Plant Line Value: 35A19
  misc_feature: MA Experiment 108534 PARAMETER Experiment Name: Zm_4deg_Cold_P Parameter: Temperature (deg C) Value: 4 vs. 22
  misc_feature: MA Experiment 108534 PARAMETER Experiment Name: Zm_4deg_Cold_P Parameter: Timepoint (hr) Value: 6
  misc_feature: MA Experiment 108534 PARAMETER Experiment Name: Zm_4deg_Cold_P Parameter: Tissue Value: Aerial
  misc_feature: MA Experiment ID: 108542 Result: Up-regulated in Transcription
  misc_feature: MA Experiment 108542 PARAMETER Experiment Name: Zm_150mM_NaCl_P Parameter: Age (day) Value: 8
  misc_feature: MA Experiment 108542 PARAMETER Experiment Name: Zm_150mM_NaCl_P Parameter: Organism Value: Zea mays
  misc_feature: MA Experiment 108542 PARAMETER Experiment Name: Zm_150mM_NaCl_P Parameter: Plant Line Value: 35A19
  misc_feature: MA Experiment 108542 PARAMETER Experiment Name: Zm_150mM_NaCl_P Parameter: Timepoint (hr) Value: 6
  misc_feature: MA Experiment 108542 PARAMETER Experiment Name: Zm_150mM_NaCl_P Parameter: Tissue Value: Aerial
  misc_feature: MA Experiment 108542 PARAMETER Experiment Name: Zm_150mM_NaCl_P Parameter: Treatment Value: 150mM NaCl vs. No Treatment
  misc_feature: MA Experiment ID: 20000479 Result: Up-regulated in Transcription
  misc_feature: MA Experiment 20000479 PARAMETER Experiment Name: Zm_Drought_P Parameter: Age (day) Value: 10
  misc_feature: MA Experiment 20000479 PARAMETER Experiment Name: Zm_Drought_P Parameter: Organism Value: Zea mays
  misc_feature: MA Experiment 20000479 PARAMETER Experiment Name: Zm_Drought_P Parameter: Plant Line Value: 35A19
  misc_feature: MA Experiment 20000479 PARAMETER Experiment Name: Zm_Drought_P Parameter: Timepoint (hr) Value: 48
  misc_feature: MA Experiment 20000479 PARAMETER Experiment Name: Zm_Drought_P Parameter: Tissue Value: Aerial
  misc_feature: MA Experiment 20000479 PARAMETER Experiment Name: Zm_Drought_P Parameter: Treatment Value: Drought vs. No Drought
  misc_feature: MA Experiment ID: 20000480 Result: Up-regulated in Transcription
  misc_feature: MA Experiment 20000480 PARAMETER Experiment Name: Zm_Drought_P Parameter: Age (day) Value: 11
  misc_feature: MA Experiment 20000480 PARAMETER Experiment Name: Zm_Drought_P Parameter: Organism Value: Zea mays
  misc_feature: MA Experiment 20000480 PARAMETER Experiment Name: Zm_Drought_P Parameter: Plant Line Value: 35A19
  misc_feature: MA Experiment 20000480 PARAMETER Experiment Name: Zm_Drought_P Parameter: Timepoint (hr) Value: 72
  misc_feature: MA Experiment 20000480 PARAMETER Experiment Name: Zm_Drought_P Parameter: Tissue Value: Aerial
  misc_feature: MA Experiment 20000480 PARAMETER Experiment Name: Zm_Drought_P Parameter: Treatment Value: Drought vs. No Drought
ctcgcctcccgtcgcgttcttatccatccaccccgtccggcacccatttatatcctgtcgtccctccctccctccttcggccacaccgtgtcacaccgctgcttgcttgcttgcgatcgggtttggatttggggagcatcatggaggcctacttcttgttccacagcgggagggcgcacgagttcgcgtacgcggagcaggaggaggacatcggctcgccgtcggattccgaacccccgtccacgtccacgtcgagggagtccgcgggctcgtcggcggagctcgacgacgacgccacctcctccggctccggctccggctcggaccgcttcgagatgtccgccctcatgacgcagctccctcccttcaagcggggcctgtccaggttcttcgacggcaagtcgcagtccttcgcctcgctcgccgccgtggggtcgctagaggacctggccaagccggcccggaagcgcctcaagccgtcgcggagctgcggcggcgccctcgacgcgcaccgcggacgcctcctctcgccgcgcgaggcattattgcaccaagcccaccgctaggattaggaaggcagccgcgaggagcggcacgttgtcggttctcgcggccggcgcgccgaggatgccgccggcggtggcgagggccgagggcgtggccgccaaggttctgatcgtcagttgagccgcggatcggcctgcctgagctcaacatcgacgcacacactcgcaggcacagctagtacggaccgccgcatccacccctctgcctgaagctgttcggttttctttttgtttcccaatgcgtctgtgatctgatctctttgtaatgaaaacgcgcagctcaatt

SEQ ID NO: 17901 - protein, 224 aa, Zea mays subsp. mays
  peptide (1)..(224): Ceres Seq. ID no. 12391901
SPPVAFLSIHPVRHPFISCRPSLPPSATPCHTAACLLAIGFGFGEHHGGLLLVPQREGARVRVRGAGGGHRLAVGFRTPVHVHVEGVRGLVGGARRRRHLLRLRLRLGPLRDVRPHDAAPSLQAGPVQVLRRQVAVLRLARRRGVARGPGQAGPEAPQAVAELRRRPRRAPRTPPLAARGIIAPSPPLGLGRQPRGAARCRFSRPARRGCRRRWRGPRAWPPRF

SEQ ID NO: 17902 - protein, 187 aa, Zea mays subsp. mays
  peptide (1)..(187): Ceres Seq. ID no. 12391902
  misc_feature (65)..(171): Homolog of NCBI NO: 34909358 NR Description: P0638D12.11 [Oryza sativa (japonica
  misc_feature (65)..(187): Homolog of NCBI NO: 15241248 NR Description: putative protein; protein id: At5g56550.1
  misc_feature (47)..(187): Homolog of NCBI NO: 38346806 NR Description: OSJNBa0088A01.13 [Oryza sativa (japonica
RLPSRSYPSTPSGTHLYPVVPPSLLRPHRVTPLLACLRSGLDLGSIMEAYFLFHSGRAHEFAYAEQEEDIGSPSDSEPPSTSTSRESAGSSAELDDDATSSGSGSGSDRFEMSALMTQLPPFKRGLSRFFDGKSQSFASLAAVGSLEDLAKPARKRLKPSRSCGGALDAHRGRLLSPREALLHQAHR

SEQ ID NO: 17903 - protein, 141 aa, Zea mays subsp. mays
  peptide (1)..(141): Ceres Seq. ID no. 12391903
  misc_feature (19)..(125): Homolog of NCBI NO: 34909358 NR Description: P0638D12.11 [Oryza sativa (japonica
  misc_feature (19)..(141): Homolog of NCBI NO: 15241248 NR Description: putative protein; protein id: At5g56550.1
  misc_feature (1)..(141): Homolog of NCBI NO: 38346806 NR Description: OSJNBa0088A01.13 [Oryza sativa (japonica
MEAYFLFHSGRAHEFAYAEQEEDIGSPSDSEPPSTSTSRESAGSSAELDDDATSSGSGSGSDRFEMSALMTQLPPFKRGLSRFFDGKSQSFASLAAVGSLEDLAKPARKRLKPSRSCGGALDAHRGRLLSPREALLHQAHR

SEQ ID NO: 17904 - DNA, 1004 bp, Zea mays subsp. mays
  misc_feature (1)..(1004): Ceres Seq. ID no. 12383275
  misc_feature: MA Experiment ID: 108523 Result: Down-regulated in Transcription
  misc_feature: MA Experiment 108523 PARAMETER Experiment Name: Zm_42deg_Heat_P Parameter: Age (day) Value: 8
  misc_feature: MA Experiment 108523 PARAMETER Experiment Name: Zm_42deg_Heat_P Parameter: Organism Value: Zea mays
  misc_feature: MA Experiment 108523 PARAMETER Experiment Name: Zm_42deg_Heat_P Parameter: Plant Line Value: 35A19
  misc_feature: MA Experiment 108523 PARAMETER Experiment Name: Zm_42deg_Heat_P Parameter: Temperature (deg C) Value: 42 vs. 22
  misc_feature: MA Experiment 108523 PARAMETER Experiment Name: Zm_42deg_Heat_P Parameter: Timepoint (hr) Value: 6
  misc_feature: MA Experiment 108523 PARAMETER Experiment Name: Zm_42deg_Heat_P Parameter: Tissue Value: Aerial
  misc_feature: MA Experiment ID: 108527 Result: Down-regulated in Transcription
  misc_feature: MA Experiment 108527 PARAMETER Experiment Name: Zm_5mM_NO_P Parameter: Age (day) Value: 8
  misc_feature: MA Experiment 108527 PARAMETER Experiment Name: Zm_5mM_NO_P Parameter: Organism Value: Zea mays
  misc_feature: MA Experiment 108527 PARAMETER Experiment Name: Zm_5mM_NO_P Parameter: Plant Line Value: 35A19
  misc_feature: MA Experiment 108527 PARAMETER Experiment Name: Zm_5mM_NO_P Parameter: Timepoint (hr) Value: 6
  misc_feature: MA Experiment 108527 PARAMETER Experiment Name: Zm_5mM_NO_P Parameter: Tissue Value: Aerial
  misc_feature: MA Experiment 108527 PARAMETER Experiment Name: Zm_5mM_NO_P Parameter: Treatment Value: 5mM NO vs. No Treatment
  misc_feature: MA Experiment ID: 108528 Result: Up-regulated in Transcription
  misc_feature: MA Experiment 108528 PARAMETER Experiment Name: Zm_Imbibed_Seeds_P Parameter: Age (day) Value: 5 vs. 2
  misc_feature: MA Experiment 108528 PARAMETER Experiment Name: Zm_Imbibed_Seeds_P Parameter: Organism Value: Zea mays
  misc_feature: MA Experiment 108528 PARAMETER Experiment Name: Zm_Imbibed_Seeds_P Parameter: Plant Line Value: 35A19
  misc_feature: MA Experiment 108528 PARAMETER Experiment Name: Zm_Imbibed_Seeds_P Parameter: Tissue Value: Aerial vs. Embryo
  misc_feature: MA Experiment ID: 108530 Result: Up-regulated in Transcription
  misc_feature: MA Experiment 108530 PARAMETER Experiment Name: Zm_Imbibed_Seeds_P Parameter: Age (day) Value: 6 vs. 2
  misc_feature: MA Experiment 108530 PARAMETER Experiment Name: Zm_Imbibed_Seeds_P Parameter: Organism Value: Zea mays
  misc_feature: MA Experiment 108530 PARAMETER Experiment Name: Zm_Imbibed_Seeds_P Parameter: Plant Line Value: 35A19
  misc_feature: MA Experiment 108530 PARAMETER Experiment Name: Zm_Imbibed_Seeds_P Parameter: Tissue Value: Aerial vs. Embryo
  misc_feature: MA Experiment ID: 108536 Result: Down-regulated in Transcription
  misc_feature: MA Experiment 108536 PARAMETER Experiment Name: Zm_Meristem_P Parameter: Age (day) Value: 8
  misc_feature: MA Experiment 108536 PARAMETER Experiment Name: Zm_Meristem_P Parameter: Organism Value: Zea mays
  misc_feature: MA Experiment 108536 PARAMETER Experiment Name: Zm_Meristem_P Parameter: Plant Line Value: 35A19
  misc_feature: MA Experiment 108536 PARAMETER Experiment Name: Zm_Meristem_P Parameter: Tissue Value: Shoot Meristem vs. Above Shoot Meristem
  misc_feature: MA Experiment ID: 108543 Result: Up-regulated in Transcription
  misc_feature: MA Experiment ID: 108545 Result: Up-regulated in Transcription
  misc_feature: MA Experiment 108545 PARAMETER Experiment Name: Zm_Imbibed_Seeds_P Parameter: Age (day) Value: 3 vs. 2
  misc_feature: MA Experiment 108545 PARAMETER Experiment Name: Zm_Imbibed_Seeds_P Parameter: Organism Value: Zea mays
  misc_feature: MA Experiment 108545 PARAMETER Experiment Name: Zm_Imbibed_Seeds_P Parameter: Plant Line Value: 35A19
  misc_feature: MA Experiment 108545 PARAMETER Experiment Name: Zm_Imbibed_Seeds_P Parameter: Tissue Value: Aerial vs. Embryo
  misc_feature: MA Experiment ID: 108546 Result: Down-regulated in Transcription
  misc_feature: MA Experiment 108546 PARAMETER Experiment Name: Zm_Imbibed_Seeds_P Parameter: Age (day) Value: 3 vs. 2
  misc_feature: MA Experiment 108546 PARAMETER Experiment Name: Zm_Imbibed_Seeds_P Parameter: Organism Value: Zea mays
  misc_feature: MA Experiment 108546 PARAMETER Experiment Name: Zm_Imbibed_Seeds_P Parameter: Plant Line Value: 35A19
  misc_feature: MA Experiment 108546 PARAMETER Experiment Name: Zm_Imbibed_Seeds_P Parameter: Tissue Value: Roots vs. Embryo
  misc_feature: MA Experiment ID: 108547 Result: Up-regulated in Transcription
  misc_feature: MA Experiment 108547 PARAMETER Experiment Name: Zm_Imbibed_Seeds_P Parameter: Age (day) Value: 4 vs. 2
  misc_feature: MA Experiment 108547 PARAMETER Experiment Name: Zm_Imbibed_Seeds_P Parameter: Organism Value: Zea mays
  misc_feature: MA Experiment 108547 PARAMETER Experiment Name: Zm_Imbibed_Seeds_P Parameter: Plant Line Value: 35A19
  misc_feature: MA Experiment 108547 PARAMETER Experiment Name: Zm_Imbibed_Seeds_P Parameter: Tissue Value: Aerial vs. Embryo
  misc_feature: MA Experiment ID: 20000478 Result: Down-regulated in Transcription
  misc_feature: MA Experiment 20000478 PARAMETER Experiment Name: Zm_5mM_SA_P Parameter: Age (day) Value: 11
  misc_feature: MA Experiment 20000478 PARAMETER Experiment Name: Zm_5mM_SA_P Parameter: Organism Value: Zea mays
  misc_feature: MA Experiment 20000478 PARAMETER Experiment Name: Zm_5mM_SA_P Parameter: Plant Line Value: 35A19
  misc_feature: MA Experiment 20000478 PARAMETER Experiment Name: Zm_5mM_SA_P Parameter: Timepoint (hr) Value: 72
  misc_feature: MA Experiment 20000478 PARAMETER Experiment Name: Zm_5mM_SA_P Parameter: Tissue Value: Aerial
  misc_feature: MA Experiment 20000478 PARAMETER Experiment Name: Zm_5mM_SA_P Parameter: Treatment Value: 5mM SA vs. No Treatment
  misc_feature: MA Experiment ID: 20000479 Result: Down-regulated in Transcription
  misc_feature: MA Experiment 20000479 PARAMETER Experiment Name: Zm_Drought_P Parameter: Age (day) Value: 10
  misc_feature: MA Experiment 20000479 PARAMETER Experiment Name: Zm_Drought_P Parameter: Organism Value: Zea mays
  misc_feature: MA Experiment 20000479 PARAMETER Experiment Name: Zm_Drought_P Parameter: Plant Line Value: 35A19
  misc_feature: MA Experiment 20000479 PARAMETER Experiment Name: Zm_Drought_P Parameter: Timepoint (hr) Value: 48
  misc_feature: MA Experiment 20000479 PARAMETER Experiment Name: Zm_Drought_P Parameter: Tissue Value: Aerial
  misc_feature: MA Experiment 20000479 PARAMETER Experiment Name: Zm_Drought_P Parameter: Treatment Value: Drought vs. No Drought
  misc_feature: MA Experiment ID: 20000480 Result: Down-regulated in Transcription
  misc_feature: MA Experiment 20000480 PARAMETER Experiment Name: Zm_Drought_P Parameter: Age (day) Value: 11
  misc_feature: MA Experiment 20000480 PARAMETER Experiment Name: Zm_Drought_P Parameter: Organism Value: Zea mays
  misc_feature: MA Experiment 20000480 PARAMETER Experiment Name: Zm_Drought_P Parameter: Plant Line Value: 35A19
  misc_feature: MA Experiment 20000480 PARAMETER Experiment Name: Zm_Drought_P Parameter: Timepoint (hr) Value: 72
  misc_feature: MA Experiment 20000480 PARAMETER Experiment Name: Zm_Drought_P Parameter: Tissue Value: Aerial
  misc_feature: MA Experiment 20000480 PARAMETER Experiment Name: Zm_Drought_P Parameter: Treatment Value: Drought vs. No Drought
  misc_feature: MA Experiment ID: 20000534 Result: Down-regulated in Transcription
  misc_feature: MA Experiment 20000534 PARAMETER Experiment Name: Zm_Hybrid_Pollen_P Parameter: Age (day) Value: 8
  misc_feature: MA Experiment 20000534 PARAMETER Experiment Name: Zm_Hybrid_Pollen_P Parameter: Organism Value: Zea mays
  misc_feature: MA Experiment 20000534 PARAMETER Experiment Name: Zm_Hybrid_Pollen_P Parameter: Plant Line Value: 35A19
  misc_feature: MA Experiment 20000534 PARAMETER Experiment Name: Zm_Hybrid_Pollen_P Parameter: Tissue Value: Pollen vs. Aerial
  misc_feature: MA Experiment ID: 20000626 Result: Down-regulated in Transcription
  misc_feature: MA Experiment 20000626 PARAMETER Experiment Name: Zm_Herbicide-Treatments_P Parameter: Timepoint (hr) Value: 12
  misc_feature: MA Experiment 20000626 PARAMETER Experiment Name: Zm_Herbicide-Treatments_P Parameter: Tissue Value: Aerial
  misc_feature: MA Experiment 20000626 PARAMETER Experiment Name: Zm_Herbicide-Treatments_P Parameter: Treatment Value: Roundup vs. No Treatment
gaaaagtcgaaatccaaacccgctggtcagcttatccccttcgcaggagccaggacggacgaactgcgagtacacgagagaggagagaggagaggagacacaggcgacacgcgccatttgggagagggaaaggaatggagctgacgtcttcttcccgctccgtgctctcctcctgcaaccggccggtcgctcgtgctctttgcaggacggcgtacccgggtgcaaggaggaaggagaagggaatagtatgtatcttgagcgaggagaaagaagtggtacaaaggacgatccggaggcgagctgccttttctttgttgctggcttcgccggtgctatcagtggcgttctcggcctatgggaagagtaaaaccatgaacccttacgatgaaaggcgtctgcttcagcagaataagaagattcaggaagccaaccgtgcccctgaggatttcccaaacttcatcagagaaggcttccaggtcaaagtagtgacaccggacaactatattacacgggcctctggactaatgtatgaggacattaaagtcggtacaggcgactctccaaaggatggtcagcagattatattccattatgtgggctacaatgaagcaggacgaagaatagatagcacctatattcagggttcccctgcaaaaattcggttagggaacggaacactagttccaggttttgaagaaggcatacgggacatgaaaccaggtggtaagagaagaattataatacctccagagcttggtcctcctgttgggccttcgacgttcttcagtgcgaagcagttcgaagtgttcgatgtggagttactggcggtgcaggactgccagcggaggacgatagcattttactctgatgtcgtgtgcagctgaacttcggtttgtctagtcttccgcctatggcacatcgcagcagcatcctgcacttttggctgctggtctgagttgccgtccaattgtgtgtatgtatatagccagctgttgttactgcgg

SEQ ID NO: 17905 - protein, 293 aa, Zea mays subsp. mays
  peptide (1)..(293): Ceres Seq. ID no. 12383276
  misc_feature (182)..(229): Pfam Name: FKBP-type peptidyl-prolyl cis-trans isomerase Pfam Description: FKBP-type peptidyl-prolyl cis-trans isomerase
  misc_feature (163)..(277): Homolog of NCBI NO: 27377516 NR Description: Peptidylprolyl isomerase [Bradyrhizobium
  misc_feature (164)..(274): Homolog of NCBI NO: 23053670 NR Description: hypothetical protein [Geobacter metallireducens]
  misc_feature (168)..(277): Homolog of NCBI NO: 22298646 NR Description: FKBP-type peptidyl-prolyl cis-trans isomerase
  misc_feature (166)..(277): Homolog of NCBI NO: 23129112 NR Description: hypothetical protein [Nostoc punctiforme]
  misc_feature (163)..(277): Homolog of NCBI NO: 37520410 NR Description: FKBP-type peptidyl-prolyl cis-trans isomerase
  misc_feature (168)..(276): Homolog of NCBI NO: 39997372 NR Description: FKBP-type peptidyl-prolyl cis-trans isomerase
  misc_feature (262)..(293): Homolog of NCBI NO: 11283515 NR Description: hypothetical protein T8B10.30 - Arabidopsis
  misc_feature (95)..(229): Homolog of NCBI NO: 11283515 NR Description: hypothetical protein T8B10.30 - Arabidopsis
  misc_feature (53)..(293): Homolog of NCBI NO: 30695188 NR Description: immunophilin / FKBP-type peptidyl-prolyl
  misc_feature (45)..(293): Homolog of NCBI NO: 33146997 NR Description: putative FKBP-type peptidyl-prolyl cis-trans
KVEIQTRWSAYPLRRSQDGRTASTRERREERRHRRHAPFGRGKGMELTSSSRSVLSSCNRPVARALCRTAYPGARRKEKGIVCILSEEKEVVQRTIRRRAAFSLLLASPVLSVAFSAYGKSKTMNPYDERRLLQQNKKIQEANRAPEDFPNFIREGFQVKVVTPDNYITRASGLMYEDIKVGTGDSPKDGQQIIFHYVGYNEAGRRIDSTYIQGSPAKIRLGNGTLVPGFEEGIRDMKPGGKRRIIIPPELGPPVGPSTFFSAKQFEVFDVELLAVQDCQRRTIAFYSDVVCS

SEQ ID NO: 17906 - protein, 249 aa, Zea mays subsp. mays
  peptide (1)..(249): Ceres Seq. ID no. 12383277
  misc_feature (138)..(185): Pfam Name: FKBP-type peptidyl-prolyl cis-trans isomerase Pfam Description: FKBP-type peptidyl-prolyl cis-trans isomerase
  misc_feature (119)..(233): Homolog of NCBI NO: 27377516 NR Description: Peptidylprolyl isomerase [Bradyrhizobium
  misc_feature (120)..(230): Homolog of NCBI NO: 23053670 NR Description: hypothetical protein [Geobacter metallireducens]
  misc_feature (124)..(233): Homolog of NCBI NO: 22298646 NR Description: FKBP-type peptidyl-prolyl cis-trans isomerase
  misc_feature (122)..(233): Homolog of NCBI NO: 23129112 NR Description: hypothetical protein [Nostoc punctiforme]
  misc_feature (119)..(233): Homolog of NCBI NO: 37520410 NR Description: FKBP-type peptidyl-prolyl cis-trans isomerase
  misc_feature (124)..(232): Homolog of NCBI NO: 39997372 NR Description: FKBP-type peptidyl-prolyl cis-trans isomerase
  misc_feature (218)..(249): Homolog of NCBI NO: 11283515 NR Description: hypothetical protein T8B10.30 - Arabidopsis
  misc_feature (51)..(185): Homolog of NCBI NO: 11283515 NR Description: hypothetical protein T8B10.30 - Arabidopsis
  misc_feature (9)..(249): Homolog of NCBI NO: 30695188 NR Description: immunophilin / FKBP-type peptidyl-prolyl
  misc_feature (1)..(249): Homolog of NCBI NO: 33146997 NR Description: putative FKBP-type peptidyl-prolyl cis-trans
MELTSSSRSVLSSCNRPVARALCRTAYPGARRKEKGIVCILSEEKEVVQRTIRRRAAFSLLLASPVLSVAFSAYGKSKTMNPYDERRLLQQNKKIQEANRAPEDFPNFIREGFQVKVVTPDNYITRASGLMYEDIKVGTGDSPKDGQQIIFHYVGYNEAGRRIDSTYIQGSPAKIRLGNGTLVPGFEEGIRDMKPGGKRRIIIPPELGPPVGPSTFFSAKQFEVFDVELLAVQDCQRRTIAFYSDVVCS

SEQ ID NO: 17907 - protein, 170 aa, Zea mays subsp. mays
  peptide (1)..(170): Ceres Seq. ID no. 12383278
  misc_feature (59)..(106): Pfam Name: FKBP-type peptidyl-prolyl cis-trans isomerase Pfam Description: FKBP-type peptidyl-prolyl cis-trans isomerase
  misc_feature (40)..(154): Homolog of NCBI NO: 27377516 NR Description: Peptidylprolyl isomerase [Bradyrhizobium
  misc_feature (41)..(151): Homolog of NCBI NO: 23053670 NR Description: hypothetical protein [Geobacter metallireducens]
  misc_feature (45)..(154): Homolog of NCBI NO: 22298646 NR Description: FKBP-type peptidyl-prolyl cis-trans isomerase
  misc_feature (43)..(154): Homolog of NCBI NO: 23129112 NR Description: hypothetical protein [Nostoc punctiforme]
  misc_feature (40)..(154): Homolog of NCBI NO: 37520410 NR Description: FKBP-type peptidyl-prolyl cis-trans isomerase
  misc_feature (45)..(153): Homolog of NCBI NO: 39997372 NR Description: FKBP-type peptidyl-prolyl cis-trans isomerase
  misc_feature (139)..(170): Homolog of NCBI NO: 11283515 NR Description: hypothetical protein T8B10.30 - Arabidopsis
  misc_feature (1)..(106): Homolog of NCBI NO: 11283515 NR Description: hypothetical protein T8B10.30 - Arabidopsis
  misc_feature (1)..(170): Homolog of NCBI NO: 30695188 NR Description: immunophilin / FKBP-type peptidyl-prolyl
  misc_feature (1)..(170): Homolog of NCBI NO: 33146997 NR Description: putative FKBP-type peptidyl-prolyl cis-trans
MNPYDERRLLQQNKKIQEANRAPEDFPNFIREGFQVKVVTPDNYITRASGLMYEDIKVGTGDSPKDGQQIIFHYVGYNEAGRRIDSTYIQGSPAKIRLGNGTLVPGFEEGIRDMKPGGKRRIIIPPELGPPVGPSTFFSAKQFEVFDVELLAVQDCQRRTIAFYSDVVCS

SEQ ID NO: 17908 - DNA, 429 bp, Zea mays subsp. mays
  misc_feature (1)..(429): Ceres Seq. ID no. 1676685
  misc_feature: MA Experiment ID: 20000534 Result: Up-regulated in Transcription
  misc_feature: MA Experiment 20000534 PARAMETER Experiment Name: Zm_Hybrid_Pollen_P Parameter: Age (day) Value: 8
  misc_feature: MA Experiment 20000534 PARAMETER Experiment Name: Zm_Hybrid_Pollen_P Parameter: Organism Value: Zea mays
  misc_feature: MA Experiment 20000534 PARAMETER Experiment Name: Zm_Hybrid_Pollen_P Parameter: Plant Line Value: 35A19
  misc_feature: MA Experiment 20000534 PARAMETER Experiment Name: Zm_Hybrid_Pollen_P Parameter: Tissue Value: Pollen vs. Aerial
ctttctacccccagggtcgcggcgagcgcgcctatgacatctactcgcggctgctgcgggagcgcatcgtgtgcgtcatgggcccgatcgatgacagcgttgccagccttgttatcgcacagctcctcttcctgcaatccgagagcaacaagaagcccatccacatgtacatcaacagccctggtggtgtggtgaccgcgggcctggccatctacgacacgatgcagtacatcctcaacccgatctgcacctggtgcgtgggccaggccgccagcatgggctccctgcttctcgccgccggcaccccaggcatgcccactcgctcctcctctccagaatcatgtggaggggccagaggctgccagacccccagctgggccctgctcaccccttgttgctgggcttggaggggcctcttgaggaactttt

SEQ ID NO: 17909 - protein, 142 aa, Zea mays subsp. mays
  peptide (1)..(142): Ceres Seq. ID no. 1676686
  misc_feature (5)..(122): Pfam Name: Clp protease Pfam Description: Clp protease
  misc_feature (5)..(122): Homolog of NCBI NO: 5174419 NR Description: endopeptidase Clp precursor
  misc_feature (5)..(122): Homolog of NCBI NO: 23474550 NR Description: hypothetical protein [Desulfovibrio desulfuricans
  misc_feature (6)..(119): Homolog of NCBI NO: 38344435 NR Description: OSJNBa0038O10.7 [Oryza sativa (japonica
  misc_feature (4)..(119): Homolog of NCBI NO: 17538017 NR Description: Clp protease [Caenorhabditis elegans]
  misc_feature (4)..(119): Homolog of NCBI NO: 39589096 NR Description: Hypothetical protein CBG00853 [Caenorhabditis
  misc_feature (26)..(122): Homolog of NCBI NO: 26324293 NR Description: unnamed protein product [Mus musculus]
  misc_feature (5)..(122): Homolog of NCBI NO: 20129427 NR Description: CG5045-PA [Drosophila melanogaster]
  misc_feature (5)..(122): Homolog of NCBI NO: 31238393 NR Description: ENSANGP00000017225 [Anopheles gambiae]
  misc_feature (5)..(122): Homolog of NCBI NO: 34882298 NR Description: similar to ClpP protease [Rattus norvegicus]
  misc_feature (5)..(122): Homolog of NCBI NO: 8393156 NR Description: caseinolytic protease, ATP-dependent, proteolytic
FYPQGRGERAYDIYSRLLRERIVCVMGPIDDSVASLVIAQLLFLQSESNKKPIHMYINSPGGVVTAGLAIYDTMQYILNPICTWCVGQAASMGSLLLAAGTPGMPTRSSSPESCGGARGCQTPSWALLTPCCWAWRGLLRNF

SEQ ID NO: 17910 - protein, 117 aa, Zea mays subsp. mays
  peptide (1)..(117): Ceres Seq. ID no. 1676687
  misc_feature (1)..(97): Pfam Name: Clp protease Pfam Description: Clp protease
  misc_feature (1)..(97): Homolog of NCBI NO: 23474550 NR Description: hypothetical protein [Desulfovibrio desulfuricans
  misc_feature (1)..(94): Homolog of NCBI NO: 38344435 NR Description: OSJNBa0038O10.7 [Oryza sativa (japonica
  misc_feature (1)..(94): Homolog of NCBI NO: 17538017 NR Description: Clp protease [Caenorhabditis elegans]
  misc_feature (1)..(94): Homolog of NCBI NO: 39589096 NR Description: Hypothetical protein CBG00853 [Caenorhabditis
  misc_feature (1)..(97): Homolog of NCBI NO: 26324293 NR Description: unnamed protein product [Mus musculus]
  misc_feature (1)..(97): Homolog of NCBI NO: 20129427 NR Description: CG5045-PA [Drosophila melanogaster]
  misc_feature (1)..(97): Homolog of NCBI NO: 31238393 NR Description: ENSANGP00000017225 [Anopheles gambiae]
  misc_feature (1)..(97): Homolog of NCBI NO: 34882298 NR Description: similar to ClpP protease [Rattus norvegicus]
  misc_feature (1)..(97): Homolog of NCBI NO: 8393156 NR Description: caseinolytic protease, ATP-dependent, proteolytic
  misc_feature (1)..(97): Homolog of NCBI NO: 5174419 NR Description: endopeptidase Clp precursor
MGPIDDSVASLVIAQLLFLQSESNKKPIHMYINSPGGVVTAGLAIYDTMQYILNPICTWCVGQAASMGSLLLAAGTPGMPTRSSSPESCGGARGCQTPSWALLTPCCWAWRGLLRNF

SEQ ID NO: 17911 - protein, 88 aa, Zea mays subsp. mays
  peptide (1)..(88): Ceres Seq. ID no. 1676688
  misc_feature (1)..(68): Pfam Name: Clp protease Pfam Description: Clp protease
  misc_feature (1)..(68): Homolog of NCBI NO: 23474550 NR Description: hypothetical protein [Desulfovibrio desulfuricans
  misc_feature (1)..(65): Homolog of NCBI NO: 38344435 NR Description: OSJNBa0038O10.7 [Oryza sativa (japonica
  misc_feature (1)..(65): Homolog of NCBI NO: 17538017 NR Description: Clp protease [Caenorhabditis elegans]
  misc_feature (1)..(65): Homolog of NCBI NO: 39589096 NR Description: Hypothetical protein CBG00853 [Caenorhabditis
  misc_feature (1)..(68): Homolog of NCBI NO: 26324293 NR Description: unnamed protein product [Mus musculus]
  misc_feature (1)..(68): Homolog of NCBI NO: 20129427 NR Description: CG5045-PA [Drosophila melanogaster]
  misc_feature (1)..(68): Homolog of NCBI NO: 31238393 NR Description: ENSANGP00000017225 [Anopheles gambiae]
  misc_feature (1)..(68): Homolog of NCBI NO: 34882298 NR Description: similar to ClpP protease [Rattus norvegicus]
  misc_feature (1)..(68): Homolog of NCBI NO: 8393156 NR Description: caseinolytic protease, ATP-dependent, proteolytic
  misc_feature (1)..(68): Homolog of NCBI NO: 5174419 NR Description: endopeptidase Clp precursor
MYINSPGGVVTAGLAIYDTMQYILNPICTWCVGQAASMGSLLLAAGTPGMPTRSSSPESCGGARGCQTPSWALLTPCCWAWRGLLRNF

SEQ ID NO: 17912 - DNA, 1211 bp, Zea mays subsp. mays
  misc_feature (1)..(1211): Ceres Seq. ID no. 12415232
  misc_feature: MA Experiment ID: 108544 Result: Down-regulated in Transcription
  misc_feature: MA Experiment ID: 20000477 Result: Down-regulated in Transcription
  misc_feature: MA Experiment 20000477 PARAMETER Experiment Name: Zm_5mM_SA_P Parameter: Age (day) Value: 10
  misc_feature: MA Experiment 20000477 PARAMETER Experiment Name: Zm_5mM_SA_P Parameter: Organism Value: Zea mays
  misc_feature: MA Experiment 20000477 PARAMETER Experiment Name: Zm_5mM_SA_P Parameter: Plant Line Value: 35A19
  misc_feature: MA Experiment 20000477 PARAMETER Experiment Name: Zm_5mM_SA_P Parameter: Timepoint (hr) Value: 48
  misc_feature: MA Experiment 20000477 PARAMETER Experiment Name: Zm_5mM_SA_P Parameter: Tissue Value: Aerial
  misc_feature: MA Experiment 20000477 PARAMETER Experiment Name: Zm_5mM_SA_P Parameter: Treatment Value: 5mM SA vs. No Treatment
  misc_feature: MA Experiment ID: 20000478 Result: Down-regulated in Transcription
  misc_feature: MA Experiment 20000478 PARAMETER Experiment Name: Zm_5mM_SA_P Parameter: Age (day) Value: 11
  misc_feature: MA Experiment 20000478 PARAMETER Experiment Name: Zm_5mM_SA_P Parameter: Organism Value: Zea mays
  misc_feature: MA Experiment 20000478 PARAMETER Experiment Name: Zm_5mM_SA_P Parameter: Plant Line Value: 35A19
  misc_feature: MA Experiment 20000478 PARAMETER Experiment Name: Zm_5mM_SA_P Parameter: Timepoint (hr) Value: 72
  misc_feature: MA Experiment 20000478 PARAMETER Experiment Name: Zm_5mM_SA_P Parameter: Tissue Value: Aerial
  misc_feature: MA Experiment 20000478 PARAMETER Experiment Name: Zm_5mM_SA_P Parameter: Treatment Value: 5mM SA vs. No Treatment
  misc_feature: MA Experiment ID: 20000480 Result: Down-regulated in Transcription
  misc_feature: MA Experiment 20000480 PARAMETER Experiment Name: Zm_Drought_P Parameter: Age (day) Value: 11
  misc_feature: MA Experiment 20000480 PARAMETER Experiment Name: Zm_Drought_P Parameter: Organism Value: Zea mays
  misc_feature: MA Experiment 20000480 PARAMETER Experiment Name: Zm_Drought_P Parameter: Plant Line Value: 35A19
  misc_feature: MA Experiment 20000480 PARAMETER Experiment Name: Zm_Drought_P Parameter: Timepoint (hr) Value: 72
  misc_feature: MA Experiment 20000480 PARAMETER Experiment Name: Zm_Drought_P Parameter: Tissue Value: Aerial
  misc_feature: MA Experiment 20000480 PARAMETER Experiment Name: Zm_Drought_P Parameter: Treatment Value: Drought vs. No Drought
  misc_feature: MA Experiment ID: 20000626 Result: Down-regulated in Transcription
  misc_feature: MA Experiment 20000626 PARAMETER Experiment Name: Zm_Herbicide-Treatments_P Parameter: Timepoint (hr) Value: 12
  misc_feature: MA Experiment 20000626 PARAMETER Experiment Name: Zm_Herbicide-Treatments_P Parameter: Tissue Value: Aerial
  misc_feature: MA Experiment 20000626 PARAMETER Experiment Name: Zm_Herbicide-Treatments_P Parameter: Treatment Value: Roundup vs. No Treatment
gcacgagaccattacctagaacatcctaatcgaaaaagggtgccgtgcgagtacaagcacaggaacctgtcggtgagggtgcaggagaagaggcgctccccggggggccctggcgacctcgccatcaggtttctctaccagggcggccagaccgacatcgtcgccgtcgacgtcgcgcaggtgggctcgtccaactggaagtccatgacgcgccacagcggcgggccggcgtggagcacgaggcaggcgccggcggggccgctccagctcagggtggtggtgacgggcggctacgacggcaagtgggtgtgggcggagcgcgaggtgctgccgcggcggcggcgcgccggcgaggtctacgacacgggcgtccagatcaccgacgtcgccccaacccgcagggctccttccactacggcgccatcccgacttccaggacgctggtgctggccagctccgcttccctcgacggcgccggccgtaggcgctgcgcctgtcaacgcagtgtccttcgtcgtgcccgacacgccgctcaagctcgccgacagatacgacatcgccggcgtcatcgactgggacggcctccccgcgcggctcgacggcgccgcggcggtgccgcgcgccgggacgcccgtgctcaggctcggcctgcacgagttcgtggaggtggtgttccagaacacggaggaggagctgcagtcgtggcacctcgatggatacgacttctgggttgtagggtacggcgatggccagtggaatgagacgcagcggcagacgtacaacttggtggacgcgcaggcaagacacaccgttcaggtgtaccccaacgggtggtcggcgatcctggtgtcgctggacaaccaggggatgtggaacctgcggtcggcgatgtgggaccggcattacctcgggcagcagctctacctcagggtgtggacgccggagcagagcctctccaacgagtacgccatccccgccaacgccatcctctgcgggaaggccgccgccctcccacactgacacgacgacgttcagcagccatactactgcctgctccattcgaccaaccaagtgaaagaagaagaggagaatctatttttgttgctgcaagaattaatgtgaaaaaaaacacaattactgccactggtatacgtatctcctaactcctaattgtccagcaacagttacagcgtttttttatgcaannctgc

SEQ ID NO: 17913 - protein, 339 aa, Zea mays subsp. mays
  peptide (1)..(339): Ceres Seq. ID no. 12415233
  misc_feature (23)..(111): Pfam Name: Pollen allergen Pfam Description: Pollen allergen
  misc_feature (166)..(334): Homolog of NCBI NO: 18400335 NR Description: pectinesterase (pectin methylesterase) family
  misc_feature (166)..(335): Homolog of NCBI NO: 34394659 NR Description: putative PS60 [Oryza sativa (japonica
  misc_feature (166)..(335): Homolog of NCBI NO: 15982771 NR Description: At1g76160/T23E18_10 [Arabidopsis thaliana]
  misc_feature (166)..(335): Homolog of NCBI NO: 15222981 NR Description: pectinesterase (pectin methylesterase), putative
  misc_feature (166)..(334): Homolog of NCBI NO: 15235448 NR Description: pectinesterase (pectin methylesterase) family
  misc_feature (166)..(334): Homolog of NCBI NO: 18425129 NR Description: pectinesterase (pectin methylesterase) family
  misc_feature (166)..(334): Homolog of NCBI NO: 9758142 NR Description: pectinesterase like protein [Arabidopsis thaliana]
  misc_feature (166)..(334): Homolog of NCBI NO: 21536987 NR Description: pectinesterase-like protein [Arabidopsis thaliana]
  misc_feature (154)..(339): Homolog of NCBI NO: 34915400 NR Description: contains ESTs
  misc_feature (154)..(339): Homolog of NCBI NO: 33146556 NR Description: putative pollen-specific protein NTP303 precursor
ARDHYLEHPNRKRVPCEYKHRNLSVRVQEKRRSPGGPGDLAIRFLYQGGQTDIVAVDVAQVGSSNWKSMTRHSGGPAWSTRQAPAGPLQLRVVVTGGYDGKWVWAEREVLPRRRRAGEVYDTGVQITDVAPTRRAPSTTAPSRLPGRWCWPAPLPSTAPAVGAAPVNAVSFVVPDTPLKLADRYDIAGVIDWDGLPARLDGAAAVPRAGTPVLRLGLHEFVEVVFQNTEEELQSWHLDGYDFWVVGYGDGQWNETQRQTYNLVDAQARHTVQVYPNGWSAILVSLDNQGMWNLRSAMWDRHYLGQQLYLRVWTPEQSLSNEYAIPANAILCGKAAALPH

SEQ ID NO: 17914 - protein, 271 aa, Zea mays subsp. mays
  peptide (1)..(271): Ceres Seq. ID no. 12415234
  misc_feature (98)..(266): Homolog of NCBI NO: 18400335 NR Description: pectinesterase (pectin methylesterase) family
  misc_feature (98)..(267): Homolog of NCBI NO: 34394659 NR Description: putative PS60 [Oryza sativa (japonica
  misc_feature (98)..(267): Homolog of NCBI NO: 15982771 NR Description: At1g76160/T23E18_10 [Arabidopsis thaliana]
  misc_feature (98)..(267): Homolog of NCBI NO: 15222981 NR Description: pectinesterase (pectin methylesterase), putative
  misc_feature (98)..(266): Homolog of NCBI NO: 15235448 NR Description: pectinesterase (pectin methylesterase) family
  misc_feature (98)..(266): Homolog of NCBI NO: 18425129 NR Description: pectinesterase (pectin methylesterase) family
  misc_feature (98)..(266): Homolog of NCBI NO: 9758142 NR Description: pectinesterase like protein [Arabidopsis thaliana]
  misc_feature (98)..(266): Homolog of NCBI NO: 21536987 NR Description: pectinesterase-like protein [Arabidopsis thaliana]
  misc_feature (86)..(271): Homolog of NCBI NO: 34915400 NR Description: contains ESTs
  misc_feature (86)..(271): Homolog of NCBI NO: 33146556 NR Description: putative pollen-specific protein NTP303 precursor
MTRHSGGPAWSTRQAPAGPLQLRVVVTGGYDGKWVWAEREVLPRRRRAGEVYDTGVQITDVAPTRRAPSTTAPSRLPGRWCWPAPLPSTAPAVGAAPVNAVSFVVPDTPLKLADRYDIAGVIDWDGLPARLDGAAAVPRAGTPVLRLGLHEFVEVVFQNTEEELQSWHLDGYDFWVVGYGDGQWNETQRQTYNLVDAQARHTVQVYPNGWSAILVSLDNQGMWNLRSAMWDRHYLGQQLYLRVWTPEQSLSNEYAIPANAILCGKAAALPH

SEQ ID NO: 17915 - DNA, 1362 bp, Zea mays subsp. mays
  misc_feature (1)..(1362): Ceres Seq. ID no. 12368239
  misc_feature: MA Experiment ID: 108522 Result: Down-regulated in Transcription
  misc_feature: MA Experiment 108522 PARAMETER Experiment Name: Zm_42deg_Heat_P Parameter: Age (day) Value: 8
  misc_feature: MA Experiment 108522 PARAMETER Experiment Name: Zm_42deg_Heat_P Parameter: Organism Value: Zea mays
  misc_feature: MA Experiment 108522 PARAMETER Experiment Name: Zm_42deg_Heat_P Parameter: Plant Line Value: 35A19
  misc_feature: MA Experiment 108522 PARAMETER Experiment Name: Zm_42deg_Heat_P Parameter: Temperature (deg C) Value: 42 vs. 22
  misc_feature: MA Experiment 108522 PARAMETER Experiment Name: Zm_42deg_Heat_P Parameter: Timepoint (hr) Value: 1
  misc_feature: MA Experiment 108522 PARAMETER Experiment Name: Zm_42deg_Heat_P Parameter: Tissue Value: Aerial
  misc_feature: MA Experiment ID: 108523 Result: Down-regulated in Transcription
  misc_feature: MA Experiment 108523 PARAMETER Experiment Name: Zm_42deg_Heat_P Parameter: Age (day) Value: 8
  misc_feature: MA Experiment 108523 PARAMETER Experiment Name: Zm_42deg_Heat_P Parameter: Organism Value: Zea mays
  misc_feature: MA Experiment 108523 PARAMETER Experiment Name: Zm_42deg_Heat_P Parameter: Plant Line Value: 35A19
  misc_feature: MA Experiment 108523 PARAMETER Experiment Name: Zm_42deg_Heat_P Parameter: Temperature (deg C) Value: 42 vs. 22
  misc_feature: MA Experiment 108523 PARAMETER Experiment Name: Zm_42deg_Heat_P Parameter: Timepoint (hr) Value: 6
  misc_feature: MA Experiment 108523 PARAMETER Experiment Name: Zm_42deg_Heat_P Parameter: Tissue Value: Aerial
  misc_feature: MA Experiment ID: 108534 Result: Down-regulated in Transcription
  misc_feature: MA Experiment 108534 PARAMETER Experiment Name: Zm_4deg_Cold_P Parameter: Age (hr) Value: 8
  misc_feature: MA Experiment 108534 PARAMETER Experiment Name: Zm_4deg_Cold_P Parameter: Organism Value: Zea mays
  misc_feature: MA Experiment 108534 PARAMETER Experiment Name: Zm_4deg_Cold_P Parameter: Plant Line Value: 35A19
  misc_feature: MA Experiment 108534 PARAMETER Experiment Name: Zm_4deg_Cold_P Parameter: Temperature (deg C) Value: 4 vs. 22
  misc_feature: MA Experiment 108534 PARAMETER Experiment Name: Zm_4deg_Cold_P Parameter: Timepoint (hr) Value: 6
  misc_feature: MA Experiment 108534 PARAMETER Experiment Name: Zm_4deg_Cold_P Parameter: Tissue Value: Aerial
  misc_feature: MA Experiment ID: 108543 Result: Up-regulated in Transcription
  misc_feature: MA Experiment ID: 108545 Result: Up-regulated in Transcription
  misc_feature: MA Experiment 108545 PARAMETER Experiment Name: Zm_Imbibed_Seeds_P Parameter: Age (day) Value: 3 vs. 2
  misc_feature: MA Experiment 108545 PARAMETER Experiment Name: Zm_Imbibed_Seeds_P Parameter: Organism Value: Zea mays
  misc_feature: MA Experiment 108545 PARAMETER Experiment Name: Zm_Imbibed_Seeds_P Parameter: Plant Line Value: 35A19
  misc_feature: MA Experiment 108545 PARAMETER Experiment Name: Zm_Imbibed_Seeds_P Parameter: Tissue Value: Aerial vs. Embryo
gcacgagaccattacctagaacatcctaatcgaaaacccagaacccagagctccaaacctaggccggagccgcggtgcaagcagctacgtggattggacttggacgtctggctctggaggtcccaagttcccaacgcttgctggagttgagatctggtgggcttccggaggagacgccgacggtttgcgaggtttgctggctccgtggcgtcgcggaaggtcatggagcaccgcgccttcgactgcagcgggagtgatgatgatctccctccaacatatcaaattagagtaccgagaatgcatttcagtgggaacagaaggccattagcaggcgcattttctcagccaagaccacacaacaagttggatagcgatatacatcagattgagcaacaggcatatactggtgttcttagagcattcaaaatgcaatcggatgccctgacatgggaaaaagaaagtctaattactgaactaagaagagagttgaaagtctctgatgtggaacacaggatgctattaaacatggtcaatgaagaggaggctatccatacaataaggcagtcaaggcagggatgtggaatgcaatctagcttgccttataatagcgtagttgatcacaaccttggacctatcaagcggcagaagaaatcacatcccatctattcactccctgtggatccccattcacccagcatgcctttgaaagcattggtgggcaacaagacatatacactggcacctgaaaacataagacggggatctgcctatcaaacccttccacatcaggttggttggctgggcatctgatggtgctacgaaaggtatggatgggagaagcggaaggtatcacacgaacgagtattatgcttcacataatgacatggggcttttgaacttcaatcgtactgacatacctgatactgaaactcttgtgaaaaaggtggagagggtattatcccggccagatgtgtatgcaattgaaagggcaaaggaactgcttataggccaagagcagtcattgcttgatgcaattgccaaacttgatgaagcatctgaccatgaaagcgatgatatgctagttgggagccggatacacgccaccattgggtgacgcgggcagcacgcctctgacacggggcgatgctttggagttcagacctctggcagcaggcggagaggcaacgatatgtgaaatagtgctgtgtattgtaaaacgctacctgttttagtccggtagtagcctagtaggttaggttcttttggcagcctggcaaatctgtgcatgcgccatgcagtgtgatgggaatatatgtcttgagcaccatcacatgtgatgtgatgctgtctcgtttcatctcc

SEQ ID NO: 17916 - protein, 195 aa, Zea mays subsp. mays
  peptide (1)..(195): Ceres Seq. ID no. 12368240
  misc_feature (48)..(120): Pfam Name: ENT domain Pfam Description: ENT domain
  misc_feature (48)..(180): Homolog of NCBI NO: 15224878 NR Description: hypothetical protein; protein id: At2g44440.1
  misc_feature (48)..(149): Homolog of NCBI NO: 9294111 NR Description: emb|CAB88266.1~gene_id:T23B7.8~similar to unknown
  misc_feature (48)..(176): Homolog of NCBI NO: 21553685 NR Description: unknown [Arabidopsis thaliana]
  misc_feature (45)..(176): Homolog of NCBI NO: 15240146 NR Description: putative protein
  misc_feature (48)..(149): Homolog of NCBI NO: 15229958 NR Description: unknown protein; protein id: At3g12140.1
  misc_feature (1)..(159): Homolog of NCBI NO: 30684221 NR Description: expressed protein [Arabidopsis thaliana]
  misc_feature (1)..(174): Homolog of NCBI NO: 38637206 NR Description: unknown protein [Oryza sativa (japonica
  misc_feature (1)..(159): Homolog of NCBI NO: 11358228 NR Description: hypothetical protein T24H18.190 - Arabidopsis
  misc_feature (6)..(160): Homolog of NCBI NO: 19387275 NR Description: unknown [Oryza sativa (japonica cultivar-group)]
  misc_feature (1)..(184): Homolog of NCBI NO: 28411871 NR Description: OSJNBa0016N23.23 [Oryza sativa (japonica
MEHRAFDCSGSDDDLPPTYQIRVPRMHFSGNRRPLAGAFSQPRPHNKLDSDIHQIEQQAYTGVLRAFKMQSDALTWEKESLITELRRELKVSDVEHRMLLNMVNEEEAIHTIRQSRQGCGMQSSLPYNSVVDHNLGPIKRQKKSHPIYSLPVDPHSPSMPLKALVGNKTYTLAPENIRRGSAYQTLPHQVGWLGI

SEQ ID NO: 17917 - protein, 170 aa, Zea mays subsp. mays
  peptide (1)..(170): Ceres Seq. ID no. 12368241
  misc_feature (23)..(95): Pfam Name: ENT domain Pfam Description: ENT domain
  misc_feature (23)..(155): Homolog of NCBI NO: 15224878 NR Description: hypothetical protein; protein id: At2g44440.1
  misc_feature (23)..(124): Homolog of NCBI NO: 9294111 NR Description: emb|CAB88266.1~gene_id:T23B7.8~similar to unknown
  misc_feature (23)..(151): Homolog of NCBI NO: 21553685 NR Description: unknown [Arabidopsis thaliana]
  misc_feature (20)..(151): Homolog of NCBI NO: 15240146 NR Description: putative protein
  misc_feature (23)..(124): Homolog of NCBI NO: 15229958 NR Description: unknown protein; protein id: At3g12140.1
  misc_feature (1)..(134): Homolog of NCBI NO: 30684221 NR Description: expressed protein [Arabidopsis thaliana]
  misc_feature (1)..(149): Homolog of NCBI NO: 38637206 NR Description: unknown protein [Oryza sativa (japonica
  misc_feature (1)..(134): Homolog of NCBI NO: 11358228 NR Description: hypothetical protein T24H18.190 - Arabidopsis
  misc_feature (1)..(135): Homolog of NCBI NO: 19387275 NR Description: unknown [Oryza sativa (japonica cultivar-group)]
  misc_feature (1)..(159): Homolog of NCBI NO: 28411871 NR Description: OSJNBa0016N23.23 [Oryza sativa (japonica
MHFSGNRRPLAGAFSQPRPHNKLDSDIHQIEQQAYTGVLRAFKMQSDALTWEKESLITELRRELKVSDVEHRMLLNMVNEEEAIHTIRQSRQGCGMQSSLPYNSVVDHNLGPIKRQKKSHPIYSLPVDPHSPSMPLKALVGNKTYTLAPENIRRGSAYQTLPHQVGWLGI

SEQ ID NO: 17918 - protein, 127 aa, Zea mays subsp. mays
  peptide (1)..(127): Ceres Seq. ID no. 12368242
  misc_feature (1)..(52): Pfam Name: ENT domain Pfam Description: ENT domain
  misc_feature (1)..(112): Homolog of NCBI NO: 15224878 NR Description: hypothetical protein; protein id: At2g44440.1
  misc_feature (1)..(81): Homolog of NCBI NO: 9294111 NR Description: emb|CAB88266.1~gene_id:T23B7.8~similar to unknown
  misc_feature (1)..(108): Homolog of NCBI NO: 21553685 NR Description: unknown [Arabidopsis thaliana]
  misc_feature (1)..(108): Homolog of NCBI NO: 15240146 NR Description: putative protein
  misc_feature (1)..(81): Homolog of NCBI NO: 15229958 NR Description: unknown protein; protein id: At3g12140.1
  misc_feature (1)..(91): Homolog of NCBI NO: 30684221 NR Description: expressed protein [Arabidopsis thaliana]
  misc_feature (1)..(106): Homolog of NCBI NO: 38637206 NR Description: unknown protein [Oryza sativa (japonica
  misc_feature (1)..(91): Homolog of NCBI NO: 11358228 NR Description: hypothetical protein T24H18.190 - Arabidopsis
  misc_feature (1)..(92): Homolog of NCBI NO: 19387275 NR Description: unknown [Oryza sativa (japonica cultivar-group)]
  misc_feature (1)..(116): Homolog of NCBI NO: 28411871 NR Description: OSJNBa0016N23.23 [Oryza sativa (japonica
MQSDALTWEKESLITELRRELKVSDVEHRMLLNMVNEEEAIHTIRQSRQGCGMQSSLPYNSVVDHNLGPIKRQKKSHPIYSLPVDPHSPSMPLKALVGNKTYTLAPENIRRGSAYQTLPHQVGWLGI

SEQ ID NO: 17919 - DNA, 790 bp, Zea mays subsp. mays
  misc_feature (1)..(790): Ceres Seq. ID no. 12359021
  misc_feature: MA Experiment ID: 108527 Result: Up-regulated in Transcription
  misc_feature: MA Experiment 108527 PARAMETER Experiment Name: Zm_5mM_NO_P Parameter: Age (day) Value: 8
  misc_feature: MA Experiment 108527 PARAMETER Experiment Name: Zm_5mM_NO_P Parameter: Organism Value: Zea mays
  misc_feature: MA Experiment 108527 PARAMETER Experiment Name: Zm_5mM_NO_P Parameter: Plant Line Value: 35A19
  misc_feature: MA Experiment 108527 PARAMETER Experiment Name: Zm_5mM_NO_P Parameter: Timepoint (hr) Value: 6
  misc_feature: MA Experiment 108527 PARAMETER Experiment Name: Zm_5mM_NO_P Parameter: Tissue Value: Aerial
  misc_feature: MA Experiment 108527 PARAMETER Experiment Name: Zm_5mM_NO_P Parameter: Treatment Value: 5mM NO vs. No Treatment
  misc_feature: MA Experiment ID: 108528 Result: Down-regulated in Transcription
  misc_feature: MA Experiment 108528 PARAMETER Experiment Name: Zm_Imbibed_Seeds_P Parameter: Age (day) Value: 5 vs. 2
  misc_feature: MA Experiment 108528 PARAMETER Experiment Name: Zm_Imbibed_Seeds_P Parameter: Organism Value: Zea mays
  misc_feature: MA Experiment 108528 PARAMETER Experiment Name: Zm_Imbibed_Seeds_P Parameter: Plant Line Value: 35A19
  misc_feature: MA Experiment 108528 PARAMETER Experiment Name: Zm_Imbibed_Seeds_P Parameter: Tissue Value: Aerial vs. Embryo
  misc_feature: MA Experiment ID: 108535 Result: Down-regulated in Transcription
  misc_feature: MA Experiment 108535 PARAMETER Experiment Name: Zm_Meristem_P Parameter: Age (day) Value: 8
  misc_feature: MA Experiment 108535 PARAMETER Experiment Name: Zm_Meristem_P Parameter: Organism Value: Zea mays
  misc_feature: MA Experiment 108535 PARAMETER Experiment Name: Zm_Meristem_P Parameter: Plant Line Value: 35A19
  misc_feature: MA Experiment 108535 PARAMETER Experiment Name: Zm_Meristem_P Parameter: Tissue Value: Root Meristem vs. Above Root Meristem
  misc_feature: MA Experiment ID: 108544 Result: Down-regulated in Transcription
  misc_feature: MA Experiment ID: 20000535 Result: Up-regulated in Transcription
  misc_feature: MA Experiment 20000535 PARAMETER Experiment Name: Zm_Hybrid_Seed_Dev_P Parameter: DAP Value: 30 vs. 12
  misc_feature: MA Experiment 20000535 PARAMETER Experiment Name: Zm_Hybrid_Seed_Dev_P Parameter: Organism Value: Zea mays
  misc_feature: MA Experiment 20000535 PARAMETER Experiment Name: Zm_Hybrid_Seed_Dev_P Parameter: Plant Line Value: 35A19
  misc_feature: MA Experiment 20000535 PARAMETER Experiment Name: Zm_Hybrid_Seed_Dev_P Parameter: Tissue Value: Embryo vs. Unfert Floret
acaccggcattctgctctgcactccattgctagctgcaacgcactgcaagaaagagctagctagctcaccgtcgttacgaagatgatcaagctgaggtaccctaagaagctgttcaggaggagctcctccaagggcagcagcactaccaccaccaccagcagcagcagcagcgacggtgatgccgccggcagcgcccgcggcggggagatcgagtgggaggtgcggccgggcggcatgctggtgcagaagagggacggcagggggcacgtggacgtcatcaccgtgagggtcgccaccggcttctcctggcacgacgtctccgtcgtggctacctgcacttttggtgagctgaaggcggtgctgtggaagatgacagggctggagcctcgggagcagaggctcctgttcaggggcaaggagagggaggacggcgaccacctccacatgatcggggtgagggacatggacaaggtgctgctcctggaggaccctgccctcaaggacatgaagctccgggccggcctcacggcggcgtatcgtcagactttcatcagggtgtagtagtaggcttaggcttgccgcccccgccccctaattaactgtgatgcatgatatatatagagagagtaaaacgaaccagtatcgtgttttcggctgctctcggtcggtgaacgactgcctgcctgttgaagagaagccactgcttgtttttgtttatgtttagctgtgtcttttgtcatttttgtagggtagagagatgaatcacgtacgctgagtttttactggcct

SEQ ID NO: 17920 - protein, 159 aa, Zea mays subsp. mays
  peptide (1)..(159): Ceres Seq. ID no. 12359022
  misc_feature (66)..(138): Pfam Name: Ubiquitin family Pfam Description: Ubiquitin family
  misc_feature (13)..(137): Homolog of NCBI NO: 6624711 NR Description: hypothetical protein [Oryza sativa (indica
  misc_feature (10)..(137): Homolog of NCBI NO: 38344334 NR Description: OSJNBa0058K23.16 [Oryza sativa (japonica
  misc_feature (29)..(92): Homolog of NCBI NO: 34907972 NR Description: P0446G04.18 [Oryza sativa (japonica
  misc_feature (82)..(146): Homolog of NCBI NO: 34907972 NR Description: P0446G04.18 [Oryza sativa (japonica
  misc_feature (36)..(144): Homolog of NCBI NO: 21553443 NR Description: unknown [Arabidopsis thaliana]
  misc_feature (34)..(144): Homolog of NCBI NO: 34898024 NR Description: ESTs AU082174(S13676),AU032395(R3986) correspond a region of the predicted gene.~Similar to Arabidopsis thaliana
  misc_feature (12)..(143): Homolog of NCBI NO: 15237460 NR Description: putative protein; protein id: At5g40630.1
  misc_feature (1)..(144): Homolog of NCBI NO: 15241381 NR Description: putative protein; protein id: At5g14360.1
  misc_feature (1)..(146): Homolog of NCBI NO: 20804881 NR Description: P0497A05.5 [Oryza sativa (japonica
  misc_feature (1)..(150): Homolog of NCBI NO: 32488469 NR Description: OSJNBa0081L15.2 [Oryza sativa (japonica
MIKLRYPKKLFRRSSSKGSSTTTTTSSSSSDGDAAGSARGGEIEWEVRPGGMLVQKRDGRGHVDVITVRVATGFSWHDVSVVATCTFGELKAVLWKMTGLEPREQRLLFRGKEREDGDHLHMIGVRDMDKVLLLEDPALKDMKLRAGLTAAYRQTFIRV

SEQ ID NO: 17921 - protein, 108 aa, Zea mays subsp. mays
  peptide (1)..(108): Ceres Seq. ID no. 12359023
  misc_feature (15)..(87): Pfam Name: Ubiquitin family Pfam Description: Ubiquitin family
  misc_feature (1)..(93): Homolog of NCBI NO: 21553443 NR Description: unknown [Arabidopsis thaliana]
  misc_feature (1)..(93): Homolog of NCBI NO: 34898024 NR Description: ESTs AU082174(S13676),AU032395(R3986) correspond a region of the predicted gene.~Similar to Arabidopsis thaliana
  misc_feature (1)..(86): Homolog of NCBI NO: 6624711 NR Description: hypothetical protein [Oryza sativa (indica
  misc_feature (1)..(86): Homolog of NCBI NO: 38344334 NR Description: OSJNBa0058K23.16 [Oryza sativa (japonica
  misc_feature (1)..(41): Homolog of NCBI NO: 34907972 NR Description: P0446G04.18 [Oryza sativa (japonica
  misc_feature (31)..(95): Homolog of NCBI NO: 34907972 NR Description: P0446G04.18 [Oryza sativa (japonica
  misc_feature (1)..(92): Homolog of NCBI NO: 15237460 NR Description: putative protein; protein id: At5g40630.1
  misc_feature (1)..(93): Homolog of NCBI NO: 15241381 NR Description: putative protein; protein id: At5g14360.1
  misc_feature (1)..(95): Homolog of NCBI NO: 20804881 NR Description: P0497A05.5 [Oryza sativa (japonica
  misc_feature (1)..(99): Homolog of NCBI NO: 32488469 NR Description: OSJNBa0081L15.2 [Oryza sativa (japonica
MLVQKRDGRGHVDVITVRVATGFSWHDVSVVATCTFGELKAVLWKMTGLEPREQRLLFRGKEREDGDHLHMIGVRDMDKVLLLEDPALKDMKLRAGLTAAYRQTFIRV

SEQ ID NO: 17922 - DNA, 1887 bp, Zea mays subsp. mays
  misc_feature (1)..(1887): Ceres Seq. ID no. 12374668
  misc_feature: MA Experiment ID: 20000535 Result: Down-regulated in Transcription
  misc_feature: MA Experiment 20000535 PARAMETER Experiment Name: Zm_Hybrid_Seed_Dev_P Parameter: DAP Value: 30 vs. 12
  misc_feature: MA Experiment 20000535 PARAMETER Experiment Name: Zm_Hybrid_Seed_Dev_P Parameter: Organism Value: Zea mays
  misc_feature: MA Experiment 20000535 PARAMETER Experiment Name: Zm_Hybrid_Seed_Dev_P Parameter: Plant Line Value: 35A19
  misc_feature: MA Experiment 20000535 PARAMETER Experiment Name: Zm_Hybrid_Seed_Dev_P Parameter: Tissue Value: Embryo vs. Unfert Floret
gcttgcaaacgccgcattctcgacagacgacagatgctttgcaacatagacgccgatgcacccgtcaccctgcaagaaaagaaatctacaggaagactctcagctcgccggtgatcgagtggcatggatgtgccaaacgcaagcgtggaggccgagccactgctcgtgccacgcagctccaccgaaggtggctcggcggcggcaaccgagtcgaagagactgctgcggctcgctgggccactggtcctgagcttcatcctgcggaacgccgtccagatggtgtccgtcatgtttgtcggccacctcgggaagctccccctcgccggtgcctccctggcctcgtcgctcgccaacgtcacgggcttcagcctggtcgccggcatggccggcgccctcgacacgctgtgcgggcaggcgttcggggcgcggcggtacgcgctgctgggcgtctacaagcagcgctccatgctggtgctagcgctcgccagcctccccgtcgtgctgacgtgggtgttcgtggagcagctcctcctgaccatcggcgaggacccggacatcgccgcggaggccggcgcgtacgcgcggtggctgatcccgtccctcgccgcgttcgtgcccctcacctgccacatgaggttcctgcagacgcagagcgtcgtggtgcccgtcatggccagctccggcgtcacggcgctcgcccacgtcctgctgtgctacacgctggtgtacaaggtgggcatggggagcaagggcgccgcgctcggcgccgccgtctcctacagcgtcaacttggccgtgctcgctctttacgtcaggctgtccagcgcttgcaaggcaacatggacagggttctccaccgaggccttctctttctctgggctgcgggagtacgcgaagctcgccgtcccgtcggcgatgatggtttgcttggagtggtggtcgtttgagctgctcgttcttctctctgggtttttgccaaaccctaaactcgagacttccgtcctgtcaatatgcgtcaacaccgctattctgctgtacatggtaccgctgggccttggcacatctgcaagtacacgcgtctccaatgagctcggcgcagggcagcctgaagcagcaaggctagcagcgcgagttgtggtctgcatgaccttgtgtggaggggtggtgttggcaaccatcatgattctcctgcgcaacatctggggatacgcatacagcagcgaggaggatgtggtggcatacattgccagaatgcttcccatccttgctgtttccttcttcgtcgacggccttaacggttctctttcaggggtaatcataggatgtggcaaacagaagattggagcacgcgtaaacctcggcgccttttacatggttggcattccaacagggctgttgcttgcgtttgtgttcaaactaaatggaatgggtctttggcttggcattgtgtgcggtagcatcagcaaactggcgttgctcctgtggattgcactgcgcatagattgggagagcgaagctatcaaggccaagaacagggtcctccgttcgtcagggcaaacataatgatgagggtctcctacctttgtcgcataaccatatgtcatatgtcagggatatttagtggtaaggatccgtttggcattgctgaaccacccaatctcagtctcagctctacttcaaagccttcatcatgaagttagagaaggggaaaaaaggcgtgcaactttgacgttaactccagctactgccggtcctgcttttaagggcatgcgtgtatttttatactatgttccagcaagtgtgtgtattttttatataccatctaatttttattgtctcctagtttacttttaaactacaacacgataaataaaaaagaattgagag

SEQ ID NO: 17923 - protein, 479 aa, Zea mays subsp. mays
  peptide (1)..(479): Ceres Seq. ID no. 12374669
  misc_feature (262)..(425): Pfam Name: MatE Pfam Description: MatE
  misc_feature (29)..(464): Homolog of NCBI NO: 15226290 NR Description: hypothetical protein; protein id: At2g34360.1
  misc_feature (36)..(475): Homolog of NCBI NO: 16797803 NR Description: hypothetical membrane protein-1 [Marchantia
  misc_feature (12)..(472): Homolog of NCBI NO: 21537267 NR Description: putative integral membrane protein [Arabidopsis
  misc_feature (12)..(472): Homolog of NCBI NO: 15219524 NR Description: putative integral membrane protein
  misc_feature (24)..(476): Homolog of NCBI NO: 15237158 NR Description: MATE efflux family protein, putative
  misc_feature (6)..(474): Homolog of NCBI NO: 22138480 NR Description: hypothetical protein [Oryza sativa (japonica
  misc_feature (7)..(476): Homolog of NCBI NO: 38346676 NR Description: OSJNBa0069D17.7 [Oryza sativa (japonica
  misc_feature (1)..(467): Homolog of NCBI NO: 37533130 NR Description: putative integral membrane protein
  misc_feature (21)..(476): Homolog of NCBI NO: 37533148 NR Description: putative transmembrane protein
  misc_feature (1)..(476): Homolog of NCBI NO: 37533146 NR Description: putative integral membrane protein
MDVPNASVEAEPLLVPRSSTEGGSAAATESKRLLRLAGPLVLSFILRNAVQMVSVMFVGHLGKLPLAGASLASSLANVTGFSLVAGMAGALDTLCGQAFGARRYALLGVYKQRSMLVLALASLPVVLTWVFVEQLLLTIGEDPDIAAEAGAYARWLIPSLAAFVPLTCHMRFLQTQSVVVPVMASSGVTALAHVLLCYTLVYKVGMGSKGAALGAAVSYSVNLAVLALYVRLSSACKATWTGFSTEAFSFSGLREYAKLAVPSAMMVCLEWWSFELLVLLSGFLPNPKLETSVLSICVNTAILLYMVPLGLGTSASTRVSNELGAGQPEAARLAARVVVCMTLCGGVVLATIMILLRNIWGYAYSSEEDVVAYIARMLPILAVSFFVDGLNGSLSGVIIGCGKQKIGARVNLGAFYMVGIPTGLLLAFVFKLNGMGLWLGIVCGSISKLALLLWIALRIDWESEAIKAKNRVLRSSGQT

SEQ ID NO: 17924 - protein, 428 aa, Zea mays subsp. mays
  peptide (1)..(428): Ceres Seq. ID no. 12374670
  misc_feature (211)..(374): Pfam Name: MatE Pfam Description: MatE
  misc_feature (1)..(413): Homolog of NCBI NO: 15226290 NR Description: hypothetical protein; protein id: At2g34360.1
  misc_feature (1)..(424): Homolog of NCBI NO: 16797803 NR Description: hypothetical membrane protein-1 [Marchantia
  misc_feature (1)..(421): Homolog of NCBI NO: 21537267 NR Description: putative integral membrane protein [Arabidopsis
  misc_feature (1)..(421): Homolog of NCBI NO: 15219524 NR Description: putative integral membrane protein
  misc_feature (1)..(425): Homolog of NCBI NO: 15237158 NR Description: MATE efflux family protein, putative
  misc_feature (1)..(423): Homolog of NCBI NO: 22138480 NR Description: hypothetical protein [Oryza sativa (japonica
  misc_feature (1)..(425): Homolog of NCBI NO: 38346676 NR Description: OSJNBa0069D17.7 [Oryza sativa (japonica
  misc_feature (1)..(416): Homolog of NCBI NO: 37533130 NR Description: putative integral membrane protein
  misc_feature (1)..(425): Homolog of NCBI NO: 37533148 NR Description: putative transmembrane protein
  misc_feature (1)..(425): Homolog of NCBI NO: 37533146 NR Description: putative integral membrane protein
MVSVMFVGHLGKLPLAGASLASSLANVTGFSLVAGMAGALDTLCGQAFGARRYALLGVYKQRSMLVLALASLPVVLTWVFVEQLLLTIGEDPDIAAEAGAYARWLIPSLAAFVPLTCHMRFLQTQSVVVPVMASSGVTALAHVLLCYTLVYKVGMGSKGAALGAAVSYSVNLAVLALYVRLSSACKATWTGFSTEAFSFSGLREYAKLAVPSAMMVCLEWWSFELLVLLSGFLPNPKLETSVLSICVNTAILLYMVPLGLGTSASTRVSNELGAGQPEAARLAARVVVCMTLCGGVVLATIMILLRNIWGYAYSSEEDVVAYIARMLPILAVSFFVDGLNGSLSGVIIGCGKQKIGARVNLGAFYMVGIPTGLLLAFVFKLNGMGLWLGIVCGSISKLALLLWIALRIDWESEAIKAKNRVLRSSGQT

SEQ ID NO: 17925 - protein, 424 aa, Zea mays subsp. mays
  peptide (1)..(424): Ceres Seq. ID no. 12374671
  misc_feature (207)..(370): Pfam Name: MatE Pfam Description: MatE
  misc_feature (1)..(409): Homolog of NCBI NO: 15226290 NR Description: hypothetical protein; protein id: At2g34360.1
  misc_feature (1)..(420): Homolog of NCBI NO: 16797803 NR Description: hypothetical membrane protein-1 [Marchantia
  misc_feature (1)..(417): Homolog of NCBI NO: 21537267 NR Description: putative integral membrane protein [Arabidopsis
  misc_feature (1)..(417): Homolog of NCBI NO: 15219524 NR Description: putative integral membrane protein
  misc_feature (1)..(421): Homolog of NCBI NO: 15237158 NR Description: MATE efflux family protein, putative
  misc_feature (1)..(419): Homolog of NCBI NO: 22138480 NR Description: hypothetical protein [Oryza sativa (japonica
  misc_feature (1)..(421): Homolog of NCBI NO: 38346676 NR Description: OSJNBa0069D17.7 [Oryza sativa (japonica
  misc_feature (1)..(412): Homolog of NCBI NO: 37533130 NR Description: putative integral membrane protein
  misc_feature (1)..(421): Homolog of NCBI NO: 37533148 NR Description: putative transmembrane protein
  misc_feature (1)..(421): Homolog of NCBI NO: 37533146 NR Description: putative integral membrane protein
MFVGHLGKLPLAGASLASSLANVTGFSLVAGMAGALDTLCGQAFGARRYALLGVYKQRSMLVLALASLPVVLTWVFVEQLLLTIGEDPDIAAEAGAYARWLIPSLAAFVPLTCHMRFLQTQSVVVPVMASSGVTALAHVLLCYTLVYKVGMGSKGAALGAAVSYSVNLAVLALYVRLSSACKATWTGFSTEAFSFSGLREYAKLAVPSAMMVCLEWWSFELLVLLSGFLPNPKLETSVLSICVNTAILLYMVPLGLGTSASTRVSNELGAGQPEAARLAARVVVCMTLCGGVVLATIMILLRNIWGYAYSSEEDVVAYIARMLPILAVSFFVDGLNGSLSGVIIGCGKQKIGARVNLGAFYMVGIPTGLLLAFVFKLNGMGLWLGIVCGSISKLALLLWIALRIDWESEAIKAKNRVLRSSGQT

SEQ ID NO: 17926 - DNA, 2125 bp, Zea mays subsp. mays
  misc_feature (1)..(2125): Ceres Seq. ID no. 12383484
  misc_feature: MA Experiment ID: 20000534 Result: Up-regulated in Transcription
  misc_feature: MA Experiment 20000534 PARAMETER Experiment Name: Zm_Hybrid_Pollen_P Parameter: Age (day) Value: 8
  misc_feature: MA Experiment 20000534 PARAMETER Experiment Name: Zm_Hybrid_Pollen_P Parameter: Organism Value: Zea mays
  misc_feature: MA Experiment 20000534 PARAMETER Experiment Name: Zm_Hybrid_Pollen_P Parameter: Plant Line Value: 35A19
  misc_feature: MA Experiment 20000534 PARAMETER Experiment Name: Zm_Hybrid_Pollen_P Parameter: Tissue Value: Pollen vs. Aerial
cgcaattaaccctcactaaagggaacaaaagctggagctccaccgcggtggcggccgctctagaactagtggatcccccgggctgcaggaattcgcacgagaccattacctagaacatcctaatcgaaaaactcgatcgtcgtgcacgcccccccaccggccggatcgacagcaccgatcaccctgaccgtctgcgcgcggcggctctcactccggtgacacgcagggcgcgcataggcgagggcctccccccccggcgagggatggtgtggtcggctgggatggcaacaatgcgaggcgcctccgccgccgcgctactggtgctggcgctcgccgccgccgtggcgcgcgcggaggacccctaccacttcttcgagtggaaggtgacgtacgggacgaggaccatcatggggacggcgcagcaggtgatcctcatcaacgacatgttcccgggccctaccatcaactgctcatccaacaacaacatcctcgtcaacgtcttcaacatgctcgaccagccgctcctcttcacctggcacgggatccagcagaggaagaactcgtggcaggacggcatgccgggcaccatgtgcccgatccagcccaacaccaacttcacgtaccactggcagcccaaggaccagatcggcagcttcttctactaccccagcaccggcatgcagcgggcggcgggcgcctacgggctgatcagcgtccacagccgtgacctgatcccggtgcccttcgacacgccggccgacgacttcccggtgctcatcggcgactggtacaccaaggaccacgccgtgctggccaagaacctggacgccggcaaggggatcgggcggccggcggggctggtgatcaacggcaagaacgagaaggacgcgtcgaacccgcccatgtacaacgtggaggccggcaagacgtaccggttccgcgtgtgcaacgtgggcatcaaggcgtccttcaacgtccgcatccaggaccacatcatgaagctggtggagatggaggggtcccacaccatgcagaacgactacgactcgctggacctccacatcgggcagtgcctgtcgttcctggtgaccgcggaccagaagcccggcgactacctgctggtggcgtccacccggttcatcaaggagaagagcagcaccacggccgtgatccgctacaagggctccagcgccccgccgccggccaagctgccggagggccccagcgggtgggcgtggtccatcaaccagtgcaggtccttccgctggaacctgacggccagcgcggcgcggcccaacccgcaggggtcgtaccactacggccagatcaacatcacccgcaccatcaagctcgccatgggccgcggcaaggtcgacggcaaggagaggttcggcttcaacggcgtgtcgcacgtggacccggaaacccccgtgaagctcgccgagtacttcaacgccagcgacggcgtgttcaagtacaacctcatcggggacgtgccgccctccaacacggcccccaccaagatggcacccaacgtcatcagcgccgagttccgcacgttcattgaggtggtcttcgagaaccccgagaagagcatcgacaccatccacatcgacggctacgccttcttcgccgtcggcatggggcccggcaaatggacggcagcgtcgcggagtacgtacaacctcctggacacggtgagccggcacacgatccaggtgtacccaaggtcgtggacggcggtgatgatgacgttcgacaacgcgggcatgtggagcgtccgctccaacatctgggagaggcagtacctcggcgagcagctgtacgtgagcgtcatctcgccggagcggtcgctcagggacgagtacaacatgccggagaccagcctccgctgcggcaaggtcgtcggcctgccgatgccaccgtcctaccgcgccgtctagagcgtcgaccgatcgcgcacggtgctgtacacaactaaaggagagcgagaggggactttttctcgcgtttccttctctagccagccttgtctgtccccccctcgtttattctctctctcttttttttcgttcgcttccgaggaataatacccaaacaaaaaaaacaaaggggctcaagactc

SEQ ID NO: 17927 - protein, 559 aa, Zea mays subsp. mays
  peptide (1)..(559): Ceres Seq. ID no. 12383485
  misc_feature (4)..(553): Homolog of NCBI NO: 27817921 NR Description: putative pectinesterase [Oryza sativa (japonica
  misc_feature (19)..(558): Homolog of NCBI NO: 128592 NR Description: POLLEN-SPECIFIC PROTEIN NTP303 PRECURSOR
  misc_feature (10)..(556): Homolog of NCBI NO: 18405425 NR Description: pectinesterase (pectin methylesterase) family
  misc_feature (10)..(556): Homolog of NCBI NO: 15231231 NR Description: pectinesterase (pectin methylesterase) family
  misc_feature (10)..(553): Homolog of NCBI NO: 99807 NR Description: pollen-specific protein Bp10 (clone Bp 1001) -
  misc_feature (15)..(556): Homolog of NCBI NO: 15222747 NR Description: pectinesterase (pectin methylesterase) family
  misc_feature (10)..(553): Homolog of NCBI NO: 99808 NR Description: pollen-specific protein Bp10 (clone Bp 1003) -
  misc_feature (10)..(556): Homolog of NCBI NO: 15231228 NR Description: pectinesterase (pectin methylesterase) family
  misc_feature (10)..(553): Homolog of NCBI NO: 99809 NR Description: pollen-specific protein Bp10 (clone Bp 1002) -
  misc_feature (10)..(553): Homolog of NCBI NO: 114268 NR Description: L-ascorbate oxidase homolog precursor (Ascorbase)
MVWSAGMATMRGASAAALLVLALAAAVARAEDPYHFFEWKVTYGTRTIMGTAQQVILINDMFPGPTINCSSNNNILVNVFNMLDQPLLFTWHGIQQRKNSWQDGMPGTMCPIQPNTNFTYHWQPKDQIGSFFYYPSTGMQRAAGAYGLISVHSRDLIPVPFDTPADDFPVLIGDWYTKDHAVLAKNLDAGKGIGRPAGLVINGKNEKDASNPPMYNVEAGKTYRFRVCNVGIKASFNVRIQDHIMKLVEMEGSHTMQNDYDSLDLHIGQCLSFLVTADQKPGDYLLVASTRFIKEKSSTTAVIRYKGSSAPPPAKLPEGPSGWAWSINQCRSFRWNLTASAARPNPQGSYHYGQINITRTIKLAMGRGKVDGKERFGFNGVSHVDPETPVKLAEYFNASDGVFKYNLIGDVPPSNTAPTKMAPNVISAEFRTFIEVVFENPEKSIDTIHIDGYAFFAVGMGPGKWTAASRSTYNLLDTVSRHTIQVYPRSWTAVMMTFDNAGMWSVRSNIWERQYLGEQLYVSVISPERSLRDEYNMPETSLRCGKVVGLPMPPSYRAV

SEQ ID NO: 17928 - protein, 553 aa, Zea mays subsp. mays
  peptide (1)..(553): Ceres Seq. ID no. 12383486
  misc_feature (1)..(547): Homolog of NCBI NO: 27817921 NR Description: putative pectinesterase [Oryza sativa (japonica
  misc_feature (13)..(552): Homolog of NCBI NO: 128592 NR Description: POLLEN-SPECIFIC PROTEIN NTP303 PRECURSOR
  misc_feature (4)..(550): Homolog of NCBI NO: 18405425 NR Description: pectinesterase (pectin methylesterase) family
  misc_feature (4)..(550): Homolog of NCBI NO: 15231231 NR Description: pectinesterase (pectin methylesterase) family
  misc_feature (4)..(547): Homolog of NCBI NO: 99807 NR Description: pollen-specific protein Bp10 (clone Bp 1001) -
  misc_feature (9)..(550): Homolog of NCBI NO: 15222747 NR Description: pectinesterase (pectin methylesterase) family
  misc_feature (4)..(547): Homolog of NCBI NO: 99808 NR Description: pollen-specific protein Bp10 (clone Bp 1003) -
  misc_feature (4)..(550): Homolog of NCBI NO: 15231228 NR Description: pectinesterase (pectin methylesterase) family
  misc_feature (4)..(547): Homolog of NCBI NO: 99809 NR Description: pollen-specific protein Bp10 (clone Bp 1002) -
  misc_feature (4)..(547): Homolog of NCBI NO: 114268 NR Description: L-ascorbate oxidase homolog precursor (Ascorbase)
MATMRGASAAALLVLALAAAVARAEDPYHFFEWKVTYGTRTIMGTAQQVILINDMFPGPTINCSSNNNILVNVFNMLDQPLLFTWHGIQQRKNSWQDGMPGTMCPIQPNTNFTYHWQPKDQIGSFFYYPSTGMQRAAGAYGLISVHSRDLIPVPFDTPADDFPVLIGDWYTKDHAVLAKNLDAGKGIGRPAGLVINGKNEKDASNPPMYNVEAGKTYRFRVCNVGIKASFNVRIQDHIMKLVEMEGSHTMQNDYDSLDLHIGQCLSFLVTADQKPGDYLLVASTRFIKEKSSTTAVIRYKGSSAPPPAKLPEGPSGWAWSINQCRSFRWNLTASAARPNPQGSYHYGQINITRTIKLAMGRGKVDGKERFGFNGVSHVDPETPVKLAEYFNASDGVFKYNLIGDVPPSNTAPTKMAPNVISAEFRTFIEVVFENPEKSIDTIHIDGYAFFAVGMGPGKWTAASRSTYNLLDTVSRHTIQVYPRSWTAVMMTFDNAGMWSVRSNIWERQYLGEQLYVSVISPERSLRDEYNMPETSLRCGKVVGLPMPPSYRAV

SEQ ID NO: 17929 - protein, 550 aa, Zea mays subsp. mays
  peptide (1)..(550): Ceres Seq. ID no. 12383487
  misc_feature (1)..(544): Homolog of NCBI NO: 27817921 NR Description: putative pectinesterase [Oryza sativa (japonica
  misc_feature (10)..(549): Homolog of NCBI NO: 128592 NR Description: POLLEN-SPECIFIC PROTEIN NTP303 PRECURSOR
  misc_feature (1)..(547): Homolog of NCBI NO: 18405425 NR Description: pectinesterase (pectin methylesterase) family
  misc_feature (1)..(547): Homolog of NCBI NO: 15231231 NR Description: pectinesterase (pectin methylesterase) family
  misc_feature (1)..(544): Homolog of NCBI NO: 99807 NR Description: pollen-specific protein Bp10 (clone Bp 1001) -
  misc_feature (6)..(547): Homolog of NCBI NO: 15222747 NR Description: pectinesterase (pectin methylesterase) family
  misc_feature (1)..(544): Homolog of NCBI NO: 99808 NR Description: pollen-specific protein Bp10 (clone Bp 1003) -
  misc_feature (1)..(547): Homolog of NCBI NO: 15231228 NR Description: pectinesterase (pectin methylesterase) family
  misc_feature (1)..(544): Homolog of NCBI NO: 99809 NR Description: pollen-specific protein Bp10 (clone Bp 1002) -
  misc_feature (1)..(544): Homolog of NCBI NO: 114268 NR Description: L-ascorbate oxidase homolog precursor (Ascorbase)
MRGASAAALLVLALAAAVARAEDPYHFFEWKVTYGTRTIMGTAQQVILINDMFPGPTINCSSNNNILVNVFNMLDQPLLFTWHGIQQRKNSWQDGMPGTMCPIQPNTNFTYHWQPKDQIGSFFYYPSTGMQRAAGAYGLISVHSRDLIPVPFDTPADDFPVLIGDWYTKDHAVLAKNLDAGKGIGRPAGLVINGKNEKDASNPPMYNVEAGKTYRFRVCNVGIKASFNVRIQDHIMKLVEMEGSHTMQNDYDSLDLHIGQCLSFLVTADQKPGDYLLVASTRFIKEKSSTTAVIRYKGSSAPPPAKLPEGPSGWAWSINQCRSFRWNLTASAARPNPQGSYHYGQINITRTIKLAMGRGKVDGKERFGFNGVSHVDPETPVKLAEYFNASDGVFKYNLIGDVPPSNTAPTKMAPNVISAEFRTFIEVVFENPEKSIDTIHIDGYAFFAVGMGPGKWTAASRSTYNLLDTVSRHTIQVYPRSWTAVMMTFDNAGMWSVRSNIWERQYLGEQLYVSVISPERSLRDEYNMPETSLRCGKVVGLPMPPSYRAV

SEQ ID NO: 17930 - DNA, 470 bp, Zea mays subsp. mays
  misc_feature (1)..(470): Ceres Seq. ID no. 2790787
  misc_feature: MA Experiment ID: 108504 Result: Down-regulated in Transcription
  misc_feature: MA Experiment 108504 PARAMETER Experiment Name: Zm_Drought_P Parameter: Age (day) Value: 8
  misc_feature: MA Experiment 108504 PARAMETER Experiment Name: Zm_Drought_P Parameter: Organism Value: Zea mays
  misc_feature: MA Experiment 108504 PARAMETER Experiment Name: Zm_Drought_P Parameter: Plant Line Value: 35A19
  misc_feature: MA Experiment 108504 PARAMETER Experiment Name: Zm_Drought_P Parameter: Timepoint (hr) Value: 12
  misc_feature: MA Experiment 108504 PARAMETER Experiment Name: Zm_Drought_P Parameter: Tissue Value: Aerial
  misc_feature: MA Experiment 108504 PARAMETER Experiment Name: Zm_Drought_P Parameter: Treatment Value: Drought vs. No Drought
  misc_feature: MA Experiment ID: 108522 Result: Up-regulated in Transcription
  misc_feature: MA Experiment 108522 PARAMETER Experiment Name: Zm_42deg_Heat_P Parameter: Age (day) Value: 8
  misc_feature: MA Experiment 108522 PARAMETER Experiment Name: Zm_42deg_Heat_P Parameter: Organism Value: Zea mays
  misc_feature: MA Experiment 108522 PARAMETER Experiment Name: Zm_42deg_Heat_P Parameter: Plant Line Value: 35A19
  misc_feature: MA Experiment 108522 PARAMETER Experiment Name: Zm_42deg_Heat_P Parameter: Temperature (deg C) Value: 42 vs. 22
  misc_feature: MA Experiment 108522 PARAMETER Experiment Name: Zm_42deg_Heat_P Parameter: Timepoint (hr) Value: 1
  misc_feature: MA Experiment 108522 PARAMETER Experiment Name: Zm_42deg_Heat_P Parameter: Tissue Value: Aerial
  misc_feature: MA Experiment ID: 108527 Result: Down-regulated in Transcription
  misc_feature: MA Experiment 108527 PARAMETER Experiment Name: Zm_5mM_NO_P Parameter: Age (day) Value: 8
  misc_feature: MA Experiment 108527 PARAMETER Experiment Name: Zm_5mM_NO_P Parameter: Organism Value: Zea mays
  misc_feature: MA Experiment 108527 PARAMETER Experiment Name: Zm_5mM_NO_P Parameter: Plant Line Value: 35A19
  misc_feature: MA Experiment 108527 PARAMETER Experiment Name: Zm_5mM_NO_P Parameter: Timepoint (hr) Value: 6
  misc_feature: MA Experiment 108527 PARAMETER Experiment Name: Zm_5mM_NO_P Parameter: Tissue Value: Aerial
  misc_feature: MA Experiment 108527 PARAMETER Experiment Name: Zm_5mM_NO_P Parameter: Treatment Value: 5mM NO vs. No Treatment
  misc_feature: MA Experiment ID: 108530 Result: Down-regulated in Transcription
  misc_feature: MA Experiment 108530 PARAMETER Experiment Name: Zm_Imbibed_Seeds_P Parameter: Age (day) Value: 6 vs. 2
  misc_feature: MA Experiment 108530 PARAMETER Experiment Name: Zm_Imbibed_Seeds_P Parameter: Organism Value: Zea mays
  misc_feature: MA Experiment 108530 PARAMETER Experiment Name: Zm_Imbibed_Seeds_P Parameter: Plant Line Value: 35A19
  misc_feature: MA Experiment 108530 PARAMETER Experiment Name: Zm_Imbibed_Seeds_P Parameter: Tissue Value: Aerial vs. Embryo
  misc_feature: MA Experiment ID: 108535 Result: Up-regulated in Transcription
  misc_feature: MA Experiment 108535 PARAMETER Experiment Name: Zm_Meristem_P Parameter: Age (day) Value: 8
  misc_feature: MA Experiment 108535 PARAMETER Experiment Name: Zm_Meristem_P Parameter: Organism Value: Zea mays
  misc_feature: MA Experiment 108535 PARAMETER Experiment Name: Zm_Meristem_P Parameter: Plant Line Value: 35A19
  misc_feature: MA Experiment 108535 PARAMETER Experiment Name: Zm_Meristem_P Parameter: Tissue Value: Root Meristem vs. Above Root Meristem
  misc_feature: MA Experiment ID: 108542 Result: Down-regulated in Transcription
  misc_feature: MA Experiment 108542 PARAMETER Experiment Name: Zm_150mM_NaCl_P Parameter: Age (day) Value: 8
  misc_feature: MA Experiment 108542 PARAMETER Experiment Name: Zm_150mM_NaCl_P Parameter: Organism Value: Zea mays
  misc_feature: MA Experiment 108542 PARAMETER Experiment Name: Zm_150mM_NaCl_P Parameter: Plant Line Value: 35A19
  misc_feature: MA Experiment 108542 PARAMETER Experiment Name: Zm_150mM_NaCl_P Parameter: Timepoint (hr) Value: 6
  misc_feature: MA Experiment 108542 PARAMETER Experiment Name: Zm_150mM_NaCl_P Parameter: Tissue Value: Aerial
  misc_feature: MA Experiment 108542 PARAMETER Experiment Name: Zm_150mM_NaCl_P Parameter: Treatment Value: 150mM NaCl vs. No Treatment
  misc_feature: MA Experiment ID: 108544 Result: Down-regulated in Transcription
  misc_feature: MA Experiment ID: 108556 Result: Down-regulated in Transcription
  misc_feature: MA Experiment 108556 PARAMETER Experiment Name: Zm_Drought_P Parameter: Age (day) Value: 9
  misc_feature: MA Experiment 108556 PARAMETER Experiment Name: Zm_Drought_P Parameter: Organism Value: Zea mays
  misc_feature: MA Experiment 108556 PARAMETER Experiment Name: Zm_Drought_P Parameter: Plant Line Value: 35A19
  misc_feature: MA Experiment 108556 PARAMETER Experiment Name: Zm_Drought_P Parameter: Timepoint (hr) Value: 24
  misc_feature: MA Experiment 108556 PARAMETER Experiment Name: Zm_Drought_P Parameter: Tissue Value: Aerial
  misc_feature: MA Experiment 108556 PARAMETER Experiment Name: Zm_Drought_P Parameter: Treatment Value: Drought vs. No Drought
  misc_feature: MA Experiment ID: 108689 Result: Down-regulated in Transcription
  misc_feature: MA Experiment 108689 PARAMETER Experiment Name: Zm_Drought_Roots_P Parameter: Age (day) Value: 9
  misc_feature: MA Experiment 108689 PARAMETER Experiment Name: Zm_Drought_Roots_P Parameter: Organism Value: Zea mays
  misc_feature: MA Experiment 108689 PARAMETER Experiment Name: Zm_Drought_Roots_P Parameter: Plant Line Value: 35A19
  misc_feature: MA Experiment 108689 PARAMETER Experiment Name: Zm_Drought_Roots_P Parameter: Timepoint (hr) Value: 24
  misc_feature: MA Experiment 108689 PARAMETER Experiment Name: Zm_Drought_Roots_P Parameter: Tissue Value: Roots
  misc_feature: MA Experiment 108689 PARAMETER Experiment Name: Zm_Drought_Roots_P Parameter: Treatment Value: Drought vs. No Drought
  misc_feature: MA Experiment ID: 20000479 Result: Down-regulated in Transcription
  misc_feature: MA Experiment 20000479 PARAMETER Experiment Name: Zm_Drought_P Parameter: Age (day) Value: 10
  misc_feature: MA Experiment 20000479 PARAMETER Experiment Name: Zm_Drought_P Parameter: Organism Value: Zea mays
  misc_feature: MA Experiment 20000479 PARAMETER Experiment Name: Zm_Drought_P Parameter: Plant Line Value: 35A19
  misc_feature: MA Experiment 20000479 PARAMETER Experiment Name: Zm_Drought_P Parameter: Timepoint (hr) Value: 48
  misc_feature: MA Experiment 20000479 PARAMETER Experiment Name: Zm_Drought_P Parameter: Tissue Value: Aerial
  misc_feature: MA Experiment 20000479 PARAMETER Experiment Name: Zm_Drought_P Parameter: Treatment Value: Drought vs. No Drought
  misc_feature: MA Experiment ID: 20000480 Result: Down-regulated in Transcription
  misc_feature: MA Experiment 20000480 PARAMETER Experiment Name: Zm_Drought_P Parameter: Age (day) Value: 11
  misc_feature: MA Experiment 20000480 PARAMETER Experiment Name: Zm_Drought_P Parameter: Organism Value: Zea mays
  misc_feature: MA Experiment 20000480 PARAMETER Experiment Name: Zm_Drought_P Parameter: Plant Line Value: 35A19
  misc_feature: MA Experiment 20000480 PARAMETER Experiment Name: Zm_Drought_P Parameter: Timepoint (hr) Value: 72
  misc_feature: MA Experiment 20000480 PARAMETER Experiment Name: Zm_Drought_P Parameter: Tissue Value: Aerial
  misc_feature: MA Experiment 20000480 PARAMETER Experiment Name: Zm_Drought_P Parameter: Treatment Value: Drought vs. No Drought
  misc_feature: MA Experiment ID: 20000626 Result: Down-regulated in Transcription
  misc_feature: MA Experiment 20000626 PARAMETER Experiment Name: Zm_Herbicide-Treatments_P Parameter: Timepoint (hr) Value: 12
  misc_feature: MA Experiment 20000626 PARAMETER Experiment Name: Zm_Herbicide-Treatments_P Parameter: Tissue Value: Aerial
  misc_feature: MA Experiment 20000626 PARAMETER Experiment Name: Zm_Herbicide-Treatments_P Parameter: Treatment Value: Roundup vs. No Treatment
  misc_feature: MA Experiment ID: 20000632 Result: Down-regulated in Transcription
  misc_feature: MA Experiment 20000632 PARAMETER Experiment Name: Zm_Herbicide-Treatments_P Parameter: Timepoint (hr) Value: 4
  misc_feature: MA Experiment 20000632 PARAMETER Experiment Name: Zm_Herbicide-Treatments_P Parameter: Tissue Value: Aerial
  misc_feature: MA Experiment 20000632 PARAMETER Experiment Name: Zm_Herbicide-Treatments_P Parameter: Treatment Value: Glean vs. No Treatment
cagggtaaatggaaggcacctatgattgacaacccagatttcaaggatgatccgtacatttatgcatttgacagcctgaaatacattggcattgagctgtggcaggttaaatcaggcactttgtttgacaacatcatcatcactgatgatcctgcgttggccaagacttttgcagaggagacatggggcaagcacaaggaggcagagaagactgctttcgatgaggctgagaaaaagaaggaagaagaggaagccgccaagggtggcgatgatgacgatgatgacctagaggatgaggcagacgatgacaaggcagacgatgacaaggccgactctgatgccgaggatgacaaggactctgaggagcacgacgagctctagatgatgagtatgatagaggtggccactgacattggtgccgttggcctggatttatcagctcttccattttgttctccttttctgttatc

SEQ ID NO: 17931 - protein, 126 aa, Zea mays subsp. mays
  peptide (1)..(126): Ceres Seq. ID no. 2790788
  misc_feature (24)..(125): Pfam Name: AMP-binding enzyme Pfam Description: AMP-binding enzyme
  misc_feature (1)..(126): Homolog of NCBI NO: 34393218 NR Description: putative Calreticulin precursor
  misc_feature (1)..(126): Homolog of NCBI NO: 2119370 NR Description: calreticulin precursor - maize
  misc_feature (1)..(126): Homolog of NCBI NO: 7441498 NR Description: calreticulin - barley (fragment)
  misc_feature (1)..(119): Homolog of NCBI NO: 31249766 NR Description: putative calreticulin precursor
  misc_feature (1)..(126): Homolog of NCBI NO: 11131838 NR Description: Calreticulin precursor
  misc_feature (1)..(126): Homolog of NCBI NO: 7441499 NR Description: calreticulin - barley (fragment)
  misc_feature (1)..(122): Homolog of NCBI NO: 13194674 NR Description: calreticulin-like protein [Pennisetum ciliare]
  misc_feature (1)..(122): Homolog of NCBI NO: 34393219 NR Description: putative Calreticulin precursor
  misc_feature (1)..(126): Homolog of NCBI NO: 11131840 NR Description: Calreticulin precursor
  misc_feature (1)..(126): Homolog of NCBI NO: 1181333 NR Description: calreticulin [Zea mays]
QGKWKAPMIDNPDFKDDPYIYAFDSLKYIGIELWQVKSGTLFDNIIITDDPALAKTFAEETWGKHKEAEKTAFDEAEKKKEEEEAAKGGDDDDDDLEDEADDDKADDDKADSDAEDDKDSEEHDEL

SEQ ID NO: 17932 - protein, 119 aa, Zea mays subsp. mays
  peptide (1)..(119): Ceres Seq. ID no. 2790789
  misc_feature (17)..(118): Pfam Name: AMP-binding enzyme Pfam Description: AMP-binding enzyme
  misc_feature (1)..(112): Homolog of NCBI NO: 31249766 NR Description: putative calreticulin precursor
  misc_feature (1)..(115): Homolog of NCBI NO: 13194674 NR Description: calreticulin-like protein [Pennisetum ciliare]
  misc_feature (1)..(119): Homolog of NCBI NO: 11131838 NR Description: Calreticulin precursor
  misc_feature (1)..(119): Homolog of NCBI NO: 7441499 NR Description: calreticulin - barley (fragment)
  misc_feature (1)..(119): Homolog of NCBI NO: 7441498 NR Description: calreticulin - barley (fragment)
  misc_feature (1)..(115): Homolog of NCBI NO: 34393219 NR Description: putative Calreticulin precursor
  misc_feature (1)..(119): Homolog of NCBI NO: 34393218 NR Description: putative Calreticulin precursor
  misc_feature (1)..(119): Homolog of NCBI NO: 2119370 NR Description: calreticulin precursor - maize
  misc_feature (1)..(119): Homolog of NCBI NO: 11131840 NR Description: Calreticulin precursor
  misc_feature (1)..(119): Homolog of NCBI NO: 1181333 NR Description: calreticulin [Zea mays]
MIDNPDFKDDPYIYAFDSLKYIGIELWQVKSGTLFDNIIITDDPALAKTFAEETWGKHKEAEKTAFDEAEKKKEEEEAAKGGDDDDDDLEDEADDDKADDDKADSDAEDDKDSEEHDEL

SEQ ID NO: 17933 - DNA, 1538 bp, Zea mays subsp. mays
  misc_feature (1)..(1538): Ceres Seq. ID no. 12415228
  misc_feature: MA Experiment ID: 108527 Result: Down-regulated in Transcription
  misc_feature: MA Experiment 108527 PARAMETER Experiment Name: Zm_5mM_NO_P Parameter: Age (day) Value: 8
  misc_feature: MA Experiment 108527 PARAMETER Experiment Name: Zm_5mM_NO_P Parameter: Organism Value: Zea mays
  misc_feature: MA Experiment 108527 PARAMETER Experiment Name: Zm_5mM_NO_P Parameter: Plant Line Value: 35A19
  misc_feature: MA Experiment 108527 PARAMETER Experiment Name: Zm_5mM_NO_P Parameter: Timepoint (hr) Value: 6
  misc_feature: MA Experiment 108527 PARAMETER Experiment Name: Zm_5mM_NO_P Parameter: Tissue Value: Aerial
  misc_feature: MA Experiment 108527 PARAMETER Experiment Name: Zm_5mM_NO_P Parameter: Treatment Value: 5mM NO vs. No Treatment
  misc_feature: MA Experiment ID: 108528 Result: Up-regulated in Transcription
  misc_feature: MA Experiment 108528 PARAMETER Experiment Name: Zm_Imbibed_Seeds_P Parameter: Age (day) Value: 5 vs. 2
  misc_feature: MA Experiment 108528 PARAMETER Experiment Name: Zm_Imbibed_Seeds_P Parameter: Organism Value: Zea mays
  misc_feature: MA Experiment 108528 PARAMETER Experiment Name: Zm_Imbibed_Seeds_P Parameter: Plant Line Value: 35A19
  misc_feature: MA Experiment 108528 PARAMETER Experiment Name: Zm_Imbibed_Seeds_P Parameter: Tissue Value: Aerial vs. Embryo
  misc_feature: MA Experiment ID: 108530 Result: Up-regulated in Transcription
  misc_feature: MA Experiment 108530 PARAMETER Experiment Name: Zm_Imbibed_Seeds_P Parameter: Age (day) Value: 6 vs. 2
  misc_feature: MA Experiment 108530 PARAMETER Experiment Name: Zm_Imbibed_Seeds_P Parameter: Organism Value: Zea mays
  misc_feature: MA Experiment 108530 PARAMETER Experiment Name: Zm_Imbibed_Seeds_P Parameter: Plant Line Value: 35A19
  misc_feature: MA Experiment 108530 PARAMETER Experiment Name: Zm_Imbibed_Seeds_P Parameter: Tissue Value: Aerial vs. Embryo
  misc_feature: MA Experiment ID: 108536 Result: Down-regulated in Transcription
  misc_feature: MA Experiment 108536 PARAMETER Experiment Name: Zm_Meristem_P Parameter: Age (day) Value: 8
  misc_feature: MA Experiment 108536 PARAMETER Experiment Name: Zm_Meristem_P Parameter: Organism Value: Zea mays
  misc_feature: MA Experiment 108536 PARAMETER Experiment Name: Zm_Meristem_P Parameter: Plant Line Value: 35A19
  misc_feature: MA Experiment 108536 PARAMETER Experiment Name: Zm_Meristem_P Parameter: Tissue Value: Shoot Meristem vs. Above Shoot Meristem
  misc_feature: MA Experiment ID: 108545 Result: Up-regulated in Transcription
  misc_feature: MA Experiment 108545 PARAMETER Experiment Name: Zm_Imbibed_Seeds_P Parameter: Age (day) Value: 3 vs. 2
  misc_feature: MA Experiment 108545 PARAMETER Experiment Name: Zm_Imbibed_Seeds_P Parameter: Organism Value: Zea mays
  misc_feature: MA Experiment 108545 PARAMETER Experiment Name: Zm_Imbibed_Seeds_P Parameter: Plant Line Value: 35A19
  misc_feature: MA Experiment 108545 PARAMETER Experiment Name: Zm_Imbibed_Seeds_P Parameter: Tissue Value: Aerial vs. Embryo
  misc_feature: MA Experiment ID: 108547 Result: Up-regulated in Transcription
  misc_feature: MA Experiment 108547 PARAMETER Experiment Name: Zm_Imbibed_Seeds_P Parameter: Age (day) Value: 4 vs. 2
  misc_feature: MA Experiment 108547 PARAMETER Experiment Name: Zm_Imbibed_Seeds_P Parameter: Organism Value: Zea mays
  misc_feature: MA Experiment 108547 PARAMETER Experiment Name: Zm_Imbibed_Seeds_P Parameter: Plant Line Value: 35A19
  misc_feature: MA Experiment 108547 PARAMETER Experiment Name: Zm_Imbibed_Seeds_P Parameter: Tissue Value: Aerial vs. Embryo
  misc_feature: MA Experiment ID: 108559 Result: Down-regulated in Transcription
  misc_feature: MA Experiment 108559 PARAMETER Experiment Name: Zm_5mM_NO_P Parameter: Age (day) Value: 8
  misc_feature: MA Experiment 108559 PARAMETER Experiment Name: Zm_5mM_NO_P Parameter: Organism Value: Zea mays
  misc_feature: MA Experiment 108559 PARAMETER Experiment Name: Zm_5mM_NO_P Parameter: Plant Line Value: 35A19
  misc_feature: MA Experiment 108559 PARAMETER Experiment Name: Zm_5mM_NO_P Parameter: Timepoint (hr) Value: 12
  misc_feature: MA Experiment 108559 PARAMETER Experiment Name: Zm_5mM_NO_P Parameter: Tissue Value: Aerial
  misc_feature: MA Experiment 108559 PARAMETER Experiment Name: Zm_5mM_NO_P Parameter: Treatment Value: 5mM NO vs. No Treatment
  misc_feature: MA Experiment ID: 108687 Result: Down-regulated in Transcription
  misc_feature: MA Experiment 108687 PARAMETER Experiment Name: Zm_Embryos-Flowers__P Parameter: Tissue Value: Embryo vs. Aerial+
  misc_feature: MA Experiment ID: 20000492 Result: Up-regulated in Transcription
  misc_feature: MA Experiment 20000492 PARAMETER Experiment Name: Zm_Hybrid_Seed_Dev_P Parameter: DAP Value: 12
  misc_feature: MA Experiment 20000492 PARAMETER Experiment Name: Zm_Hybrid_Seed_Dev_P Parameter: Organism Value: Zea mays
  misc_feature: MA Experiment 20000492 PARAMETER Experiment Name: Zm_Hybrid_Seed_Dev_P Parameter: Plant Line Value: 35A19
  misc_feature: MA Experiment 20000492 PARAMETER Experiment Name: Zm_Hybrid_Seed_Dev_P Parameter: Tissue Value: Fert Kernel vs. Unfert Floret
cgagaccattacctagaacatcctaatcgaaaaaagcagcccaaagcctcaaacccaatgcgaggcccttgggccagcagcgccttatcacttcgcctccgtctccgtggcgcgcgcgctcgcacgaacacgagtcccatgtcgtccaccgcagcgcgcgtcgtccacccggctgccgcggcgccgccgcctccccgcccacgccgcctggcgcccgcgaggtgcgcggctggatccgcgacggacacggccaccgcgggtccgacaagggtgacgaccgtcagcaaccgcggggactccttggcgatatgccgggtgctcaacggcatgtggcagaccagcggagggtggggccgcatagaccgcgacgccgcggttgacgccatgctcgcgcacgccgacgccggactctccaccttcgatatggctgaccactatgggccagcagaggatttgtatggcatgttcatcaacagaattaggagggagcgcccacctgagtttcttgaagaagtcaaggggcttacaaagtgggtaccacccccggttaagatgacaagaagttatgttgaggataatatcaacagatccaggaagaggatggatgttactgcattggacatgttgcagttccactggtgggagtactcaaatccaggctacttggatgcgctaaagcacatcacagacctgaaggaggaaggcaagataaagactgtggccctaacaaacttcgatacagacagactgcaaataattctcgaaaatggaatcccagttgtgagcaaccaggttcaacattctatcgttgatatgcgccctcagcagagaatggcagagctttgccagctaactggagttagacttataacgtatggcacagtgatgggtggtcttttgtctgaaaagtttctcgacaccaatgtatcaataccttttgctggtcctcctctaaataccccatccttgcagaaatataagaggatggttgatgcttggggtggctggagcctgttccagactttgcttcaaaccttaaagaaggtgtcactgaaacacggtgttactatttcaacggttgctgtgaaatacatactgaaccagacgtctgttgcaggttccatggtcggtgtgagattgggactctctgaacacatcaaagacaccaacgccatattctcacttgaattggatgaagaggacatgaacatcatcactgaagtgtcgaagaggggcagaaatttgatcgatattattggggattgtggtgacgagtaccgagcttagttggccatgctgctgctgggctactacagacctatatactcgtgcccaattttgcncagctctaaatttttgcctatttgggtctagcggctcagcgcactgttgaggcaaccatatacctgaatgcctattattcaggcgctagcatgtaccctccagtcctcaacagccagttataaaactgtaaatacacagcgatgcagatcgctaatgtggtaacttgttcagtcctttttagcgattactgtccc

SEQ ID NO: 17934 - protein, 428 aa, Zea mays subsp. mays
  peptide (1)..(428): Ceres Seq. ID no. 12415229
  misc_feature (123)..(408): Homolog of NCBI NO: 40644844 NR Description: side-chain ketoreductase [Streptomyces griseus
  misc_feature (136)..(408): Homolog of NCBI NO: 30020137 NR Description: IolS protein [Bacillus cereus ATCC 14579]
  misc_feature (178)..(410): Homolog of NCBI NO: 24216672 NR Description: Aldo/keto reductase family protein
  misc_feature (136)..(371): Homolog of NCBI NO: 21399879 NR Description: aldo_ket_red, Aldo/keto reductase family
  misc_feature (136)..(408): Homolog of NCBI NO: 30262030 NR Description: oxidoreductase, aldo/keto reductase family
  misc_feature (105)..(427): Homolog of NCBI NO: 40741502 NR Description: hypothetical protein AN8658.2 [Aspergillus
  misc_feature (98)..(426): Homolog of NCBI NO: 13475981 NR Description: hypothetical protein [Mesorhizobium loti]
  misc_feature (101)..(427): Homolog of NCBI NO: 23123814 NR Description: hypothetical protein [Nostoc punctiforme]
  misc_feature (118)..(427): Homolog of NCBI NO: 11762116 NR Description: At2g27680 [Arabidopsis thaliana]
  misc_feature (90)..(427): Homolog of NCBI NO: 18401495 NR Description: expressed protein
RDHYLEHPNRKKQPKASNPMRGPWASSALSLRLRLRGARARTNTSPMSSTAARVVHPAAAAPPPPRPRRLAPARCAAGSATDTATAGPTRVTTVSNRGDSLAICRVLNGMWQTSGGWGRIDRDAAVDAMLAHADAGLSTFDMADHYGPAEDLYGMFINRIRRERPPEFLEEVKGLTKWVPPPVKMTRSYVEDNINRSRKRMDVTALDMLQFHWWEYSNPGYLDALKHITDLKEEGKIKTVALTNFDTDRLQIILENGIPVVSNQVQHSIVDMRPQQRMAELCQLTGVRLITYGTVMGGLLSEKFLDTNVSIPFAGPPLNTPSLQKYKRMVDAWGGWSLFQTLLQTLKKVSLKHGVTISTVAVKYILNQTSVAGSMVGVRLGLSEHIKDTNAIFSLELDEEDMNIITEVSKRGRNLIDIIGDCGDEYRA

SEQ ID NO: 17935 - protein, 409 aa, Zea mays subsp. mays
  peptide (1)..(409): Ceres Seq. ID no. 12415230
  misc_feature (104)..(389): Homolog of NCBI NO: 40644844 NR Description: side-chain ketoreductase [Streptomyces griseus
  misc_feature (117)..(389): Homolog of NCBI NO: 30020137 NR Description: IolS protein [Bacillus cereus ATCC 14579]
  misc_feature (159)..(391): Homolog of NCBI NO: 24216672 NR Description: Aldo/keto reductase family protein
  misc_feature (117)..(352): Homolog of NCBI NO: 21399879 NR Description: aldo_ket_red, Aldo/keto reductase family
  misc_feature (117)..(389): Homolog of NCBI NO: 30262030 NR Description: oxidoreductase, aldo/keto reductase family
  misc_feature (86)..(408): Homolog of NCBI NO: 40741502 NR Description: hypothetical protein AN8658.2 [Aspergillus
  misc_feature (79)..(407): Homolog of NCBI NO: 13475981 NR Description: hypothetical protein [Mesorhizobium loti]
  misc_feature (82)..(408): Homolog of NCBI NO: 23123814 NR Description: hypothetical protein [Nostoc punctiforme]
  misc_feature (99)..(408): Homolog of NCBI NO: 11762116 NR Description: At2g27680 [Arabidopsis thaliana]
  misc_feature (71)..(408): Homolog of NCBI NO: 18401495 NR Description: expressed protein
MRGPWASSALSLRLRLRGARARTNTSPMSSTAARVVHPAAAAPPPPRPRRLAPARCAAGSATDTATAGPTRVTTVSNRGDSLAICRVLNGMWQTSGGWGRIDRDAAVDAMLAHADAGLSTFDMADHYGPAEDLYGMFINRIRRERPPEFLEEVKGLTKWVPPPVKMTRSYVEDNINRSRKRMDVTALDMLQFHWWEYSNPGYLDALKHITDLKEEGKIKTVALTNFDTDRLQIILENGIPVVSNQVQHSIVDMRPQQRMAELCQLTGVRLITYGTVMGGLLSEKFLDTNVSIPFAGPPLNTPSLQKYKRMVDAWGGWSLFQTLLQTLKKVSLKHGVTISTVAVKYILNQTSVAGSMVGVRLGLSEHIKDTNAIFSLELDEEDMNIITEVSKRGRNLIDIIGDCGDEYRA

SEQ ID NO: 17936 - protein, 382 aa, Zea mays subsp. mays
  peptide (1)..(382): Ceres Seq. ID no. 12415231
  misc_feature (77)..(362): Homolog of NCBI NO: 40644844 NR Description: side-chain ketoreductase [Streptomyces griseus
  misc_feature (90)..(362): Homolog of NCBI NO: 30020137 NR Description: IolS protein [Bacillus cereus ATCC 14579]
  misc_feature (132)..(364): Homolog of NCBI NO: 24216672 NR Description: Aldo/keto reductase family protein
  misc_feature (90)..(325): Homolog of NCBI NO: 21399879 NR Description: aldo_ket_red, Aldo/keto reductase family
  misc_feature (90)..(362): Homolog of NCBI NO: 30262030 NR Description: oxidoreductase, aldo/keto reductase family
  misc_feature (59)..(381): Homolog of NCBI NO: 40741502 NR Description: hypothetical protein AN8658.2 [Aspergillus
  misc_feature (52)..(380): Homolog of NCBI NO: 13475981 NR Description: hypothetical protein [Mesorhizobium loti]
  misc_feature (55)..(381): Homolog of NCBI NO: 23123814 NR Description: hypothetical protein [Nostoc punctiforme]
  misc_feature (72)..(381): Homolog of NCBI NO: 11762116 NR Description: At2g27680 [Arabidopsis thaliana]
  misc_feature (44)..(381): Homolog of NCBI NO: 18401495 NR Description: expressed protein
MSSTAARVVHPAAAAPPPPRPRRLAPARCAAGSATDTATAGPTRVTTVSNRGDSLAICRVLNGMWQTSGGWGRIDRDAAVDAMLAHADAGLSTFDMADHYGPAEDLYGMFINRIRRERPPEFLEEVKGLTKWVPPPVKMTRSYVEDNINRSRKRMDVTALDMLQFHWWEYSNPGYLDALKHITDLKEEGKIKTVALTNFDTDRLQIILENGIPVVSNQVQHSIVDMRPQQRMAELCQLTGVRLITYGTVMGGLLSEKFLDTNVSIPFAGPPLNTPSLQKYKRMVDAWGGWSLFQTLLQTLKKVSLKHGVTISTVAVKYILNQTSVAGSMVGVRLGLSEHIKDTNAIFSLELDEEDMNIITEVSKRGRNLIDIIGDCGDEYRA

SEQ ID NO: 17937 - DNA, 476 bp, Zea mays subsp. mays
  misc_feature (1)..(476): Ceres Seq. ID no. 1681819
  misc_feature: MA Experiment ID: 20000477 Result: Up-regulated in Transcription
  misc_feature: MA Experiment 20000477 PARAMETER Experiment Name: Zm_5mM_SA_P Parameter: Age (day) Value: 10
  misc_feature: MA Experiment 20000477 PARAMETER Experiment Name: Zm_5mM_SA_P Parameter: Organism Value: Zea mays
  misc_feature: MA Experiment 20000477 PARAMETER Experiment Name: Zm_5mM_SA_P Parameter: Plant Line Value: 35A19
  misc_feature: MA Experiment 20000477 PARAMETER Experiment Name: Zm_5mM_SA_P Parameter: Timepoint (hr) Value: 48
  misc_feature: MA Experiment 20000477 PARAMETER Experiment Name: Zm_5mM_SA_P Parameter: Tissue Value: Aerial
  misc_feature: MA Experiment 20000477 PARAMETER Experiment Name: Zm_5mM_SA_P Parameter: Treatment Value: 5mM SA vs. No Treatment
  misc_feature: MA Experiment ID: 20000478 Result: Up-regulated in Transcription
  misc_feature: MA Experiment 20000478 PARAMETER Experiment Name: Zm_5mM_SA_P Parameter: Age (day) Value: 11
  misc_feature: MA Experiment 20000478 PARAMETER Experiment Name: Zm_5mM_SA_P Parameter: Organism Value: Zea mays
  misc_feature: MA Experiment 20000478 PARAMETER Experiment Name: Zm_5mM_SA_P Parameter: Plant Line Value: 35A19
  misc_feature: MA Experiment 20000478 PARAMETER Experiment Name: Zm_5mM_SA_P Parameter: Timepoint (hr) Value: 72
  misc_feature: MA Experiment 20000478 PARAMETER Experiment Name: Zm_5mM_SA_P Parameter: Tissue Value: Aerial
  misc_feature: MA Experiment 20000478 PARAMETER Experiment Name: Zm_5mM_SA_P Parameter: Treatment Value: 5mM SA vs. No Treatment
  misc_feature: MA Experiment ID: 20000479 Result: Up-regulated in Transcription
  misc_feature: MA Experiment 20000479 PARAMETER Experiment Name: Zm_Drought_P Parameter: Age (day) Value: 10
  misc_feature: MA Experiment 20000479 PARAMETER Experiment Name: Zm_Drought_P Parameter: Organism Value: Zea mays
  misc_feature: MA Experiment 20000479 PARAMETER Experiment Name: Zm_Drought_P Parameter: Plant Line Value: 35A19
  misc_feature: MA Experiment 20000479 PARAMETER Experiment Name: Zm_Drought_P Parameter: Timepoint (hr) Value: 48
  misc_feature: MA Experiment 20000479 PARAMETER Experiment Name: Zm_Drought_P Parameter: Tissue Value: Aerial
  misc_feature: MA Experiment 20000479 PARAMETER Experiment Name: Zm_Drought_P Parameter: Treatment Value: Drought vs. No Drought
acataccggcacgggctcaaggctctggctcgcgcacccctggtccctgttccgcaccgcaccgcacacctagacgcacctccagctgcagcgcgccatacttgaccgcatcagcatggcatccacggggacgacatcggcggtgccggaggtgaccctgcggtcgggcaacgggaagccgatgccgatggtgggcatgggcacggcgtcgttccccgtggtgcacgaggccgtcagggacgccgtgctggcggccatcggggtggggttccgccacttcgacacggccttcctgtacggcaccgagaagccgctcggcgacgccgtggccgaggcgctgcggcgcggcctcctgcggtcccgggaggagctcttcgtcacgtccaagctgtggtgctcgcagacccacgcggacctcgtgctgccgtccctgcgggaaactctcaagaacctgcagatggagtacgtggacctgt

SEQ ID NO: 17938 - protein, 120 aa, Zea mays subsp. mays
  peptide (1)..(120): Ceres Seq. ID no. 1681820
  misc_feature (7)..(119): Homolog of NCBI NO: 6478204 NR Description: NADPH-dependent codeinone reductase [Papaver
  misc_feature (18)..(119): Homolog of NCBI NO: 27357979 NR Description: Putative NADPH-dependent oxidoreductase
  misc_feature (10)..(119): Homolog of NCBI NO: 2792295 NR Description: unknown [Fragaria x ananassa]
  misc_feature (10)..(119): Homolog of NCBI NO: 6478216 NR Description: putative NADPH-dependent oxidoreductase [Papaver
  misc_feature (1)..(119): Homolog of NCBI NO: 38344822 NR Description: OSJNBa0064H22.3 [Oryza sativa (japonica
  misc_feature (8)..(119): Homolog of NCBI NO: 40781599 NR Description: reductase 1 [Hydrangea macrophylla]
  misc_feature (10)..(119): Homolog of NCBI NO: 40781598 NR Description: reductase 2 [Hydrangea macrophylla]
  misc_feature (2)..(119): Homolog of NCBI NO: 37530540 NR Description: putative NADPH-dependent oxidoreductase
  misc_feature (8)..(119): Homolog of NCBI NO: 38344824 NR Description: OSJNBa0064H22.5 [Oryza sativa (japonica
  misc_feature (10)..(119): Homolog of NCBI NO: 38344823 NR Description: OSJNBa0064H22.4 [Oryza sativa (japonica
MASTGTTSAVPEVTLRSGNGKPMPMVGMGTASFPVVHEAVRDAVLAAIGVGFRHFDTAFLYGTEKPLGDAVAEALRRGLLRSREELFVTSKLWCSQTHADLVLPSLRETLKNLQMEYVDL

SEQ ID NO: 17939 - protein, 98 aa, Zea mays subsp. mays
  peptide (1)..(98): Ceres Seq. ID no. 1681821
  misc_feature (1)..(97): Homolog of NCBI NO: 6478204 NR Description: NADPH-dependent codeinone reductase [Papaver
  misc_feature (1)..(97): Homolog of NCBI NO: 27357979 NR Description: Putative NADPH-dependent oxidoreductase
  misc_feature (1)..(97): Homolog of NCBI NO: 2792295 NR Description: unknown [Fragaria x ananassa]
  misc_feature (1)..(97): Homolog of NCBI NO: 6478216 NR Description: putative NADPH-dependent oxidoreductase [Papaver
  misc_feature (1)..(97): Homolog of NCBI NO: 38344822 NR Description: OSJNBa0064H22.3 [Oryza sativa (japonica
  misc_feature (1)..(97): Homolog of NCBI NO: 40781599 NR Description: reductase 1 [Hydrangea macrophylla]
  misc_feature (1)..(97): Homolog of NCBI NO: 40781598 NR Description: reductase 2 [Hydrangea macrophylla]
  misc_feature (1)..(97): Homolog of NCBI NO: 37530540 NR Description: putative NADPH-dependent oxidoreductase
  misc_feature (1)..(97): Homolog of NCBI NO: 38344824 NR Description: OSJNBa0064H22.5 [Oryza sativa (japonica
  misc_feature (1)..(97): Homolog of NCBI NO: 38344823 NR Description: OSJNBa0064H22.4 [Oryza sativa (japonica
MPMVGMGTASFPVVHEAVRDAVLAAIGVGFRHFDTAFLYGTEKPLGDAVAEALRRGLLRSREELFVTSKLWCSQTHADLVLPSLRETLKNLQMEYVDL

SEQ ID NO: 17940 - protein, 96 aa, Zea mays subsp. mays
  peptide (1)..(96): Ceres Seq. ID no. 1681822
  misc_feature (1)..(95): Homolog of NCBI NO: 6478204 NR Description: NADPH-dependent codeinone reductase [Papaver
  misc_feature (1)..(95): Homolog of NCBI NO: 27357979 NR Description: Putative NADPH-dependent oxidoreductase
  misc_feature (1)..(95): Homolog of NCBI NO: 2792295 NR Description: unknown [Fragaria x ananassa]
  misc_feature (1)..(95): Homolog of NCBI NO: 6478216 NR Description: putative NADPH-dependent oxidoreductase [Papaver
  misc_feature (1)..(95): Homolog of NCBI NO: 38344822 NR Description: OSJNBa0064H22.3 [Oryza sativa (japonica
  misc_feature (1)..(95): Homolog of NCBI NO: 40781599 NR Description: reductase 1 [Hydrangea macrophylla]
  misc_feature (1)..(95): Homolog of NCBI NO: 40781598 NR Description: reductase 2 [Hydrangea macrophylla]
  misc_feature (1)..(95): Homolog of NCBI NO: 37530540 NR Description: putative NADPH-dependent oxidoreductase
  misc_feature (1)..(95): Homolog of NCBI NO: 38344824 NR Description: OSJNBa0064H22.5 [Oryza sativa (japonica
  misc_feature (1)..(95): Homolog of NCBI NO: 38344823 NR Description: OSJNBa0064H22.4 [Oryza sativa (japonica
MVGMGTASFPVVHEAVRDAVLAAIGVGFRHFDTAFLYGTEKPLGDAVAEALRRGLLRSREELFVTSKLWCSQTHADLVLPSLRETLKNLQMEYVDL

SEQ ID NO: 17941 - DNA, 1103 bp, Zea mays subsp. mays
  misc_feature (1)..(1103): Ceres Seq. ID no. 12362920
  misc_feature: MA Experiment ID: 108504 Result: Up-regulated in Transcription
  misc_feature: MA Experiment 108504 PARAMETER Experiment Name: Zm_Drought_P Parameter: Age (day) Value: 8
  misc_feature: MA Experiment 108504 PARAMETER Experiment Name: Zm_Drought_P Parameter: Organism Value: Zea mays
  misc_feature: MA Experiment 108504 PARAMETER Experiment Name: Zm_Drought_P Parameter: Plant Line Value: 35A19
  misc_feature: MA Experiment 108504 PARAMETER Experiment Name: Zm_Drought_P Parameter: Timepoint (hr) Value: 12
  misc_feature: MA Experiment 108504 PARAMETER Experiment Name: Zm_Drought_P Parameter: Tissue Value: Aerial
  misc_feature: MA Experiment 108504 PARAMETER Experiment Name: Zm_Drought_P Parameter: Treatment Value: Drought vs. No Drought
  misc_feature: MA Experiment ID: 108540 Result: Up-regulated in Transcription
  misc_feature: MA Experiment 108540 PARAMETER Experiment Name: Zm_20percent_PEG_P Parameter: Age (day) Value: 8
  misc_feature: MA Experiment 108540 PARAMETER Experiment Name: Zm_20percent_PEG_P Parameter: Organism Value: Zea mays
  misc_feature: MA Experiment 108540 PARAMETER Experiment Name: Zm_20percent_PEG_P Parameter: Plant Line Value: 35A19
  misc_feature: MA Experiment 108540 PARAMETER Experiment Name: Zm_20percent_PEG_P Parameter: Timepoint (hr) Value: 6
  misc_feature: MA Experiment 108540 PARAMETER Experiment Name: Zm_20percent_PEG_P Parameter: Tissue Value: Aerial
  misc_feature: MA Experiment 108540 PARAMETER Experiment Name: Zm_20percent_PEG_P Parameter: Treatment Value: 20percent PEG vs. No Treatment
  misc_feature: MA Experiment ID: 108542 Result: Up-regulated in Transcription
  misc_feature: MA Experiment 108542 PARAMETER Experiment Name: Zm_150mM_NaCl_P Parameter: Age (day) Value: 8
  misc_feature: MA Experiment 108542 PARAMETER Experiment Name: Zm_150mM_NaCl_P Parameter: Organism Value: Zea mays
  misc_feature: MA Experiment 108542 PARAMETER Experiment Name: Zm_150mM_NaCl_P Parameter: Plant Line Value: 35A19
  misc_feature: MA Experiment 108542 PARAMETER Experiment Name: Zm_150mM_NaCl_P Parameter: Timepoint (hr) Value: 6
  misc_feature: MA Experiment 108542 PARAMETER Experiment Name: Zm_150mM_NaCl_P Parameter: Tissue Value: Aerial
  misc_feature: MA Experiment 108542 PARAMETER Experiment Name: Zm_150mM_NaCl_P Parameter: Treatment Value: 150mM NaCl vs. No Treatment
  misc_feature: MA Experiment ID: 108543 Result: Down-regulated in Transcription
  misc_feature: MA Experiment ID: 108544 Result: Up-regulated in Transcription
  misc_feature: MA Experiment ID: 108556 Result: Up-regulated in Transcription
  misc_feature: MA Experiment 108556 PARAMETER Experiment Name: Zm_Drought_P Parameter: Age (day) Value: 9
  misc_feature: MA Experiment 108556 PARAMETER Experiment Name: Zm_Drought_P Parameter: Organism Value: Zea mays
  misc_feature: MA Experiment 108556 PARAMETER Experiment Name: Zm_Drought_P Parameter: Plant Line Value: 35A19
  misc_feature: MA Experiment 108556 PARAMETER Experiment Name: Zm_Drought_P Parameter: Timepoint (hr) Value: 24
  misc_feature: MA Experiment 108556 PARAMETER Experiment Name: Zm_Drought_P Parameter: Tissue Value: Aerial
  misc_feature: MA Experiment 108556 PARAMETER Experiment Name: Zm_Drought_P Parameter: Treatment Value: Drought vs. No Drought
  misc_feature: MA Experiment ID: 108597 Result: Up-regulated in Transcription
  misc_feature: MA Experiment 108597 PARAMETER Experiment Name: Zm_100uM_ABA_P Parameter: Age (day) Value: 9
  misc_feature: MA Experiment 108597 PARAMETER Experiment Name: Zm_100uM_ABA_P Parameter: Organism Value: Zea mays
  misc_feature: MA Experiment 108597 PARAMETER Experiment Name: Zm_100uM_ABA_P Parameter: Plant Line Value: 35A19
  misc_feature: MA Experiment 108597 PARAMETER Experiment Name: Zm_100uM_ABA_P Parameter: Timepoint (hr) Value: 24
  misc_feature: MA Experiment 108597 PARAMETER Experiment Name: Zm_100uM_ABA_P Parameter: Tissue Value: Aerial
  misc_feature: MA Experiment 108597 PARAMETER Experiment Name: Zm_100uM_ABA_P Parameter: Treatment Value: 100uM ABA vs. No Treatment
  misc_feature: MA Experiment ID: 108689 Result: Up-regulated in Transcription
  misc_feature: MA Experiment 108689 PARAMETER Experiment Name: Zm_Drought_Roots_P Parameter: Age (day) Value: 9
  misc_feature: MA Experiment 108689 PARAMETER Experiment Name: Zm_Drought_Roots_P Parameter: Organism Value: Zea mays
  misc_feature: MA Experiment 108689 PARAMETER Experiment Name: Zm_Drought_Roots_P Parameter: Plant Line Value: 35A19
  misc_feature: MA Experiment 108689 PARAMETER Experiment Name: Zm_Drought_Roots_P Parameter: Timepoint (hr) Value: 24
  misc_feature: MA Experiment 108689 PARAMETER Experiment Name: Zm_Drought_Roots_P Parameter: Tissue Value: Roots
  misc_feature: MA Experiment 108689 PARAMETER Experiment Name: Zm_Drought_Roots_P Parameter: Treatment Value: Drought vs. No Drought
  misc_feature: MA Experiment ID: 20000477 Result: Up-regulated in Transcription
  misc_feature: MA Experiment 20000477 PARAMETER Experiment Name: Zm_5mM_SA_P Parameter: Age (day) Value: 10
  misc_feature: MA Experiment 20000477 PARAMETER Experiment Name: Zm_5mM_SA_P Parameter: Organism Value: Zea mays
  misc_feature: MA Experiment 20000477 PARAMETER Experiment Name: Zm_5mM_SA_P Parameter: Plant Line Value: 35A19
  misc_feature: MA Experiment 20000477 PARAMETER Experiment Name: Zm_5mM_SA_P Parameter: Timepoint (hr) Value: 48
  misc_feature: MA Experiment 20000477 PARAMETER Experiment Name: Zm_5mM_SA_P Parameter: Tissue Value: Aerial
  misc_feature: MA Experiment 20000477 PARAMETER Experiment Name: Zm_5mM_SA_P Parameter: Treatment Value: 5mM SA vs. No Treatment
  misc_feature: MA Experiment ID: 20000478 Result: Up-regulated in Transcription
  misc_feature: MA Experiment 20000478 PARAMETER Experiment Name: Zm_5mM_SA_P Parameter: Age (day) Value: 11
  misc_feature: MA Experiment 20000478 PARAMETER Experiment Name: Zm_5mM_SA_P Parameter: Organism Value: Zea mays
  misc_feature: MA Experiment 20000478 PARAMETER Experiment Name: Zm_5mM_SA_P Parameter: Plant Line Value: 35A19
  misc_feature: MA Experiment 20000478 PARAMETER Experiment Name: Zm_5mM_SA_P Parameter: Timepoint (hr) Value: 72
  misc_feature: MA Experiment 20000478 PARAMETER Experiment Name: Zm_5mM_SA_P Parameter: Tissue Value: Aerial
  misc_feature: MA Experiment 20000478 PARAMETER Experiment Name: Zm_5mM_SA_P Parameter: Treatment Value: 5mM SA vs. No Treatment
  misc_feature: MA Experiment ID: 20000479 Result: Up-regulated in Transcription
  misc_feature: MA Experiment 20000479 PARAMETER Experiment Name: Zm_Drought_P Parameter: Age (day) Value: 10
  misc_feature: MA Experiment 20000479 PARAMETER Experiment Name: Zm_Drought_P Parameter: Organism Value: Zea mays
  misc_feature: MA Experiment 20000479 PARAMETER Experiment Name: Zm_Drought_P Parameter: Plant Line Value: 35A19
  misc_feature: MA Experiment 20000479 PARAMETER Experiment Name: Zm_Drought_P Parameter: Timepoint (hr) Value: 48
  misc_feature: MA Experiment 20000479 PARAMETER Experiment Name: Zm_Drought_P Parameter: Tissue Value: Aerial
  misc_feature: MA Experiment 20000479 PARAMETER Experiment Name: Zm_Drought_P Parameter: Treatment Value: Drought vs. No Drought
  misc_feature: MA Experiment ID: 20000480 Result: Up-regulated in Transcription
  misc_feature: MA Experiment 20000480 PARAMETER Experiment Name: Zm_Drought_P Parameter: Age (day) Value: 11
  misc_feature: MA Experiment 20000480 PARAMETER Experiment Name: Zm_Drought_P Parameter: Organism Value: Zea mays
  misc_feature: MA Experiment 20000480 PARAMETER Experiment Name: Zm_Drought_P Parameter: Plant Line Value: 35A19
  misc_feature: MA Experiment 20000480 PARAMETER Experiment Name: Zm_Drought_P Parameter: Timepoint (hr) Value: 72
  misc_feature: MA Experiment 20000480 PARAMETER Experiment Name: Zm_Drought_P Parameter: Tissue Value: Aerial
  misc_feature: MA Experiment 20000480 PARAMETER Experiment Name: Zm_Drought_P Parameter: Treatment Value: Drought vs. No Drought
gcacgagaccattacctagaacatcctaatcgaaaaagaccagaccaccccacttaccaaccagagcgacaagcccgaccgcccgcttccttgcaaacgaaacaaaacaaaacaatggcgacagcgagtgagatcgcggcggtgggcgtaataggcgcggggcagatgggctcgggcatcgcccagctcgccgccggcggcggctgtgccgtacttctcctcgacgccgaccccactgccctctcccgtgccgtcgtctccatctccgcctccctacggcgcctcgccgccaagggccagctctcccaggccgcgtgcgaggactcaataaagcggataaggtgcgtctccgccgtgcaggatctcagggacgcggatcttgtgatcgaggccgtcgtggagaacgaagacgtcaagaagaagctattcgtggagctggataaggtcacgaagccctcggccatcctcgcctccaacacgagctccatctccgtaacccgcctggcttcagctaccaaacgcccctctcaggtgataggcatgcatttcttcaaccctcctccggtaatgaaactgatcgaggttatccgaggagccgatacgtcagatgaggtgtttgctgctgtcagatctttctccgaaaggctcgggaagtccgttatatgctcgcaagattacccaggattcatcgtgaaccgcatcctcatgccgatgatcaacgaggccttctgggctctgtacaccggagtggcaaccaaagaggacatcgacgcagggatgaagctgggcacgaaccacccgatgggcccgctgcagctcgccgacttcatcggcctggacgtctgcctctccgtacttcgggtactccacagcggtctgggagataacaagtacagcccctgccctctcctcgtccagtacgtcgatgctggccggcttgggaagaagcgtggagtaggcgtgtattcgtatgggcacaggccttcgtccgtcaggccaaagtcgtctctgtagacgtgagagcaaactgttgggcgaataaaaccaggtgcgtgttgcaattgcacgtcagagaaaaagggagcacagcctagttcagaggt

SEQ ID NO: 17942 - protein, 337 aa, Zea mays subsp. mays
  peptide (1)..(337): Ceres Seq. ID no. 12362921
  misc_feature (42)..(226): Pfam Name: 3-hydroxyacyl-CoA dehydrogenase, NAD binding domain Pfam Description: 3-hydroxyacyl-CoA dehydrogenase, NAD binding
  misc_feature (42)..(332): Homolog of NCBI NO: 27376490 NR Description: 3-hydroxybutyryl-CoA dehydrogenase
  misc_feature (43)..(332): Homolog of NCBI NO: 13473014 NR Description: 3-hydroxybutyryl-CoA dehydrogenase [Mesorhizobium
  misc_feature (42)..(332): Homolog of NCBI NO: 22961911 NR Description: hypothetical protein [Rhodopseudomonas palustris]
  misc_feature (45)..(332): Homolog of NCBI NO: 22967143 NR Description: hypothetical protein [Rhodospirillum rubrum]
  misc_feature (45)..(332): Homolog of NCBI NO: 23502817 NR Description: 3-hydroxybutyryl-CoA dehydrogenase [Brucella suis
  misc_feature (45)..(332): Homolog of NCBI NO: 23013719 NR Description: hypothetical protein [Magnetospirillum
  misc_feature (45)..(332): Homolog of NCBI NO: 17986383 NR Description: 3-HYDROXYBUTYRYL-COA DEHYDROGENASE [Brucella
  misc_feature (45)..(324): Homolog of NCBI NO: 23053816 NR Description: hypothetical protein [Geobacter metallireducens]
  misc_feature (43)..(334): Homolog of NCBI NO: 15232545 NR Description: putative 3-hydroxybutyryl-CoA dehydrogenase
  misc_feature (38)..(337): Homolog of NCBI NO: 34908888 NR Description: putative 3-hydroxybutyryl-CoA dehydrogenase
ARDHYLEHPNRKRPDHPTYQPERQARPPASLQTKQNKTMATASEIAAVGVIGAGQMGSGIAQLAAGGGCAVLLLDADPTALSRAVVSISASLRRLAAKGQLSQAACEDSIKRIRCVSAVQDLRDADLVIEAVVENEDVKKKLFVELDKVTKPSAILASNTSSISVTRLASATKRPSQVIGMHFFNPPPVMKLIEVIRGADTSDEVFAAVRSFSERLGKSVICSQDYPGFIVNRILMPMINEAFWALYTGVATKEDIDAGMKLGTNHPMGPLQLADFIGLDVCLSVLRVLHSGLGDNKYSPCPLLVQYVDAGRLGKKRGVGVYSYGHRPSSVRPKSSL

SEQ ID NO: 17943 - protein, 299 aa, Zea mays subsp. mays
  peptide (1)..(299): Ceres Seq. ID no. 12362922
  misc_feature (4)..(188): Pfam Name: 3-hydroxyacyl-CoA dehydrogenase, NAD binding domain Pfam Description: 3-hydroxyacyl-CoA dehydrogenase, NAD binding
  misc_feature (4)..(294): Homolog of NCBI NO: 27376490 NR Description: 3-hydroxybutyryl-CoA dehydrogenase
  misc_feature (5)..(294): Homolog of NCBI NO: 13473014 NR Description: 3-hydroxybutyryl-CoA dehydrogenase [Mesorhizobium
  misc_feature (4)..(294): Homolog of NCBI NO: 22961911 NR Description: hypothetical protein [Rhodopseudomonas palustris]
  misc_feature (7)..(294): Homolog of NCBI NO: 22967143 NR Description: hypothetical protein [Rhodospirillum rubrum]
  misc_feature (7)..(294): Homolog of NCBI NO: 23502817 NR Description: 3-hydroxybutyryl-CoA dehydrogenase [Brucella suis
  misc_feature (7)..(294): Homolog of NCBI NO: 23013719 NR Description: hypothetical protein [Magnetospirillum
  misc_feature (7)..(294): Homolog of NCBI NO: 17986383 NR Description: 3-HYDROXYBUTYRYL-COA DEHYDROGENASE [Brucella
  misc_feature (7)..(286): Homolog of NCBI NO: 23053816 NR Description: hypothetical protein [Geobacter metallireducens]
  misc_feature (5)..(296): Homolog of NCBI NO: 15232545 NR Description: putative 3-hydroxybutyryl-CoA dehydrogenase
  misc_feature (1)..(299): Homolog of NCBI NO: 34908888 NR Description: putative 3-hydroxybutyryl-CoA dehydrogenase
MATASEIAAVGVIGAGQMGSGIAQLAAGGGCAVLLLDADPTALSRAVVSISASLRRLAAKGQLSQAACEDSIKRIRCVSAVQDLRDADLVIEAVVENEDVKKKLFVELDKVTKPSAILASNTSSISVTRLASATKRPSQVIGMHFFNPPPVMKLIEVIRGADTSDEVFAAVRSFSERLGKSVICSQDYPGFIVNRILMPMINEAFWALYTGVATKEDIDAGMKLGTNHPMGPLQLADFIGLDVCLSVLRVLHSGLGDNKYSPCPLLVQYVDAGRLGKKRGVGVYSYGHRPSSVRPKSSL

SEQ ID NO: 17944 - protein, 282 aa, Zea mays subsp. mays
  peptide (1)..(282): Ceres Seq. ID no. 12362923
  misc_feature (1)..(171): Pfam Name: 3-hydroxyacyl-CoA dehydrogenase, NAD binding domain Pfam Description: 3-hydroxyacyl-CoA dehydrogenase, NAD binding
  misc_feature (1)..(277): Homolog of NCBI NO: 17986383 NR Description: 3-HYDROXYBUTYRYL-COA DEHYDROGENASE [Brucella
  misc_feature (1)..(269): Homolog of NCBI NO: 23053816 NR Description: hypothetical protein [Geobacter metallireducens]
  misc_feature (1)..(277): Homolog of NCBI NO: 27376490 NR Description: 3-hydroxybutyryl-CoA dehydrogenase
  misc_feature (1)..(277): Homolog of NCBI NO: 22961911 NR Description: hypothetical protein [Rhodopseudomonas palustris]
  misc_feature (1)..(277): Homolog of NCBI NO: 23502817 NR Description: 3-hydroxybutyryl-CoA dehydrogenase [Brucella suis
  misc_feature (1)..(277): Homolog of NCBI NO: 23013719 NR Description: hypothetical protein [Magnetospirillum
  misc_feature (1)..(277): Homolog of NCBI NO: 22967143 NR Description: hypothetical protein [Rhodospirillum rubrum]
  misc_feature (1)..(277): Homolog of NCBI NO: 13473014 NR Description: 3-hydroxybutyryl-CoA dehydrogenase [Mesorhizobium
  misc_feature (1)..(279): Homolog of NCBI NO: 15232545 NR Description: putative 3-hydroxybutyryl-CoA dehydrogenase
  misc_feature (1)..(282): Homolog of NCBI NO: 34908888 NR Description: putative 3-hydroxybutyryl-CoA dehydrogenase
MGSGIAQLAAGGGCAVLLLDADPTALSRAVVSISASLRRLAAKGQLSQAACEDSIKRIRCVSAVQDLRDADLVIEAVVENEDVKKKLFVELDKVTKPSAILASNTSSISVTRLASATKRPSQVIGMHFFNPPPVMKLIEVIRGADTSDEVFAAVRSFSERLGKSVICSQDYPGFIVNRILMPMINEAFWALYTGVATKEDIDAGMKLGTNHPMGPLQLADFIGLDVCLSVLRVLHSGLGDNKYSPCPLLVQYVDAGRLGKKRGVGVYSYGHRPSSVRPKSSL

SEQ ID NO: 17945 - DNA, 562 bp, Zea mays subsp. mays
  misc_feature (1)..(562): Ceres Seq. ID no. 12337588
  misc_feature: MA Experiment ID: 108504 Result: Up-regulated in Transcription
  misc_feature: MA Experiment 108504 PARAMETER Experiment Name: Zm_Drought_P Parameter: Age (day) Value: 8
  misc_feature: MA Experiment 108504 PARAMETER Experiment Name: Zm_Drought_P Parameter: Organism Value: Zea mays
  misc_feature: MA Experiment 108504 PARAMETER Experiment Name: Zm_Drought_P Parameter: Plant Line Value: 35A19
  misc_feature: MA Experiment 108504 PARAMETER Experiment Name: Zm_Drought_P Parameter: Timepoint (hr) Value: 12
  misc_feature: MA Experiment 108504 PARAMETER Experiment Name: Zm_Drought_P Parameter: Tissue Value: Aerial
  misc_feature: MA Experiment 108504 PARAMETER Experiment Name: Zm_Drought_P Parameter: Treatment Value: Drought vs. No Drought
  misc_feature: MA Experiment ID: 108523 Result: Up-regulated in Transcription
  misc_feature: MA Experiment 108523 PARAMETER Experiment Name: Zm_42deg_Heat_P Parameter: Age (day) Value: 8
  misc_feature: MA Experiment 108523 PARAMETER Experiment Name: Zm_42deg_Heat_P Parameter: Organism Value: Zea mays
  misc_feature: MA Experiment 108523 PARAMETER Experiment Name: Zm_42deg_Heat_P Parameter: Plant Line Value: 35A19
  misc_feature: MA Experiment 108523 PARAMETER Experiment Name: Zm_42deg_Heat_P Parameter: Temperature (deg C) Value: 42 vs. 22
  misc_feature: MA Experiment 108523 PARAMETER Experiment Name: Zm_42deg_Heat_P Parameter: Timepoint (hr) Value: 6
  misc_feature: MA Experiment 108523 PARAMETER Experiment Name: Zm_42deg_Heat_P Parameter: Tissue Value: Aerial
  misc_feature: MA Experiment ID: 108527 Result: Up-regulated in Transcription
  misc_feature: MA Experiment 108527 PARAMETER Experiment Name: Zm_5mM_NO_P Parameter: Age (day) Value: 8
  misc_feature: MA Experiment 108527 PARAMETER Experiment Name: Zm_5mM_NO_P Parameter: Organism Value: Zea mays
  misc_feature: MA Experiment 108527 PARAMETER Experiment Name: Zm_5mM_NO_P Parameter: Plant Line Value: 35A19
  misc_feature: MA Experiment 108527 PARAMETER Experiment Name: Zm_5mM_NO_P Parameter: Timepoint (hr) Value: 6
  misc_feature: MA Experiment 108527 PARAMETER Experiment Name: Zm_5mM_NO_P Parameter: Tissue Value: Aerial
  misc_feature: MA Experiment 108527 PARAMETER Experiment Name: Zm_5mM_NO_P Parameter: Treatment Value: 5mM NO vs. No Treatment
  misc_feature: MA Experiment ID: 108533 Result: Up-regulated in Transcription
  misc_feature: MA Experiment 108533 PARAMETER Experiment Name: Zm_4deg_Cold_P Parameter: Age (hr) Value: 8
  misc_feature: MA Experiment 108533 PARAMETER Experiment Name: Zm_4deg_Cold_P Parameter: Organism Value: Zea mays
  misc_feature: MA Experiment 108533 PARAMETER Experiment Name: Zm_4deg_Cold_P Parameter: Plant Line Value: 35A19
  misc_feature: MA Experiment 108533 PARAMETER Experiment Name: Zm_4deg_Cold_P Parameter: Temperature (deg C) Value: 4 vs. 22
  misc_feature: MA Experiment 108533 PARAMETER Experiment Name: Zm_4deg_Cold_P Parameter: Timepoint (hr) Value: 1
  misc_feature: MA Experiment 108533 PARAMETER Experiment Name: Zm_4deg_Cold_P Parameter: Tissue Value: Aerial
  misc_feature: MA Experiment ID: 108534 Result: Up-regulated in Transcription
  misc_feature: MA Experiment 108534 PARAMETER Experiment Name: Zm_4deg_Cold_P Parameter: Age (hr) Value: 8
  misc_feature: MA Experiment 108534 PARAMETER Experiment Name: Zm_4deg_Cold_P Parameter: Organism Value: Zea mays
  misc_feature: MA Experiment 108534 PARAMETER Experiment Name: Zm_4deg_Cold_P Parameter: Plant Line Value: 35A19
  misc_feature: MA Experiment 108534 PARAMETER Experiment Name: Zm_4deg_Cold_P Parameter: Temperature (deg C) Value: 4 vs. 22
  misc_feature: MA Experiment 108534 PARAMETER Experiment Name: Zm_4deg_Cold_P Parameter: Timepoint (hr) Value: 6
  misc_feature: MA Experiment 108534 PARAMETER Experiment Name: Zm_4deg_Cold_P Parameter: Tissue Value: Aerial
  misc_feature: MA Experiment ID: 108536 Result: Up-regulated in Transcription
  misc_feature: MA Experiment 108536 PARAMETER Experiment Name: Zm_Meristem_P Parameter: Age (day) Value: 8
  misc_feature: MA Experiment 108536 PARAMETER Experiment Name: Zm_Meristem_P Parameter: Organism Value: Zea mays
  misc_feature: MA Experiment 108536 PARAMETER Experiment Name: Zm_Meristem_P Parameter: Plant Line Value: 35A19
  misc_feature: MA Experiment 108536 PARAMETER Experiment Name: Zm_Meristem_P Parameter: Tissue Value: Shoot Meristem vs. Above Shoot Meristem
  misc_feature: MA Experiment ID: 108540 Result: Up-regulated in Transcription
  misc_feature: MA Experiment 108540 PARAMETER Experiment Name: Zm_20percent_PEG_P Parameter: Age (day) Value: 8
  misc_feature: MA Experiment 108540 PARAMETER Experiment Name: Zm_20percent_PEG_P Parameter: Organism Value: Zea mays
  misc_feature: MA Experiment 108540 PARAMETER Experiment Name: Zm_20percent_PEG_P Parameter: Plant Line Value: 35A19
  misc_feature: MA Experiment 108540 PARAMETER Experiment Name: Zm_20percent_PEG_P Parameter: Timepoint (hr) Value: 6
  misc_feature: MA Experiment 108540 PARAMETER Experiment Name: Zm_20percent_PEG_P Parameter: Tissue Value: Aerial
  misc_feature: MA Experiment 108540 PARAMETER Experiment Name: Zm_20percent_PEG_P Parameter: Treatment Value: 20percent PEG vs. No Treatment
  misc_feature: MA Experiment ID: 108556 Result: Up-regulated in Transcription
  misc_feature: MA Experiment 108556 PARAMETER Experiment Name: Zm_Drought_P Parameter: Age (day) Value: 9
  misc_feature: MA Experiment 108556 PARAMETER Experiment Name: Zm_Drought_P Parameter: Organism Value: Zea mays
  misc_feature: MA Experiment 108556 PARAMETER Experiment Name: Zm_Drought_P Parameter: Plant Line Value: 35A19
  misc_feature: MA Experiment 108556 PARAMETER Experiment Name: Zm_Drought_P Parameter: Timepoint (hr) Value: 24
  misc_feature: MA Experiment 108556 PARAMETER Experiment Name: Zm_Drought_P Parameter: Tissue Value: Aerial
  misc_feature: MA Experiment 108556 PARAMETER Experiment Name: Zm_Drought_P Parameter: Treatment Value: Drought vs. No Drought
  misc_feature: MA Experiment ID: 108689 Result: Up-regulated in Transcription
  misc_feature: MA Experiment 108689 PARAMETER Experiment Name: Zm_Drought_Roots_P Parameter: Age (day) Value: 9
  misc_feature: MA Experiment 108689 PARAMETER Experiment Name: Zm_Drought_Roots_P Parameter: Organism Value: Zea mays
  misc_feature: MA Experiment 108689 PARAMETER Experiment Name: Zm_Drought_Roots_P Parameter: Plant Line Value: 35A19
  misc_feature: MA Experiment 108689 PARAMETER Experiment Name: Zm_Drought_Roots_P Parameter: Timepoint (hr) Value: 24
  misc_feature: MA Experiment 108689 PARAMETER Experiment Name: Zm_Drought_Roots_P Parameter: Tissue Value: Roots
  misc_feature: MA Experiment 108689 PARAMETER Experiment Name: Zm_Drought_Roots_P Parameter: Treatment Value: Drought vs. No Drought
  misc_feature: MA Experiment ID: 20000630 Result: Up-regulated in Transcription
  misc_feature: MA Experiment 20000630 PARAMETER Experiment Name: Zm_Herbicide-Treatments_P Parameter: Timepoint (hr) Value: 4
  misc_feature: MA Experiment 20000630 PARAMETER Experiment Name: Zm_Herbicide-Treatments_P Parameter: Tissue Value: Aerial
  misc_feature: MA Experiment 20000630 PARAMETER Experiment Name: Zm_Herbicide-Treatments_P Parameter: Treatment Value: Roundup vs. No Treatment
cacaaagcacaaacaacgccactcctgcacggctccgacgccggggccggggccgcctacgtctgggtcggcaacgccgaaacgcagtgccccgggcagtgcgcgtggccgttccaccagccgctgtacgggccccaggcgccggcgctcgtgccgccgagcggcgacgtcggcatggatggcatggtggtcaacatcgccagcatggtcgccggcgcggtcaccaacccgttccgcgacgggttctaccagggcgacaaggacgcgccgctagaggccgccaccgcctgcacgggggtctacggcagcggcgcctaccccggtttcgcaggcaacctggcggtggacggcacgacgggggcgagctacaatgccaatggtgccaacgggaggaagtacctgcttcccgctctattcgaccctgcaacctttacgtgttcgactttggtttaacgcccaaggaaacagtcctgtcaactgtgtagtaacgctgtgtatatagtatgagagtttgataaggagtgtactgtggttagtgttgatatctgcatcataatacgat

SEQ ID NO: 17946 - protein, 160 aa, Zea mays subsp. mays
  peptide (1)..(160): Ceres Seq. ID no. 12337589
QSTNNATPARLRRRGRGRLRLGRQRRNAVPRAVRVAVPPAAVRAPGAGARAAERRRRHGWHGGQHRQHGRRRGHQPVPRRVLPGRQGRAARGRHRLHGGLRQRRLPRFRRQPGGGRHDGGELQCQWCQREEVPASRSIRPCNLYVFDFGLTPKETVLSTV

SEQ ID NO: 17947 - protein, 150 aa, Zea mays subsp. mays
  peptide (1)..(150): Ceres Seq. ID no. 12337590
  misc_feature (10)..(150): Pfam Name: Phosphate-induced protein 1 conserved region Pfam Description: Phosphate-induced protein 1 conserved region
  misc_feature (12)..(146): Homolog of NCBI NO: 34901824 NR Description: putative phi-1(phosphate-induced protein 1)
  misc_feature (10)..(146): Homolog of NCBI NO: 37533672 NR Description: putative phosphate-induced protein
  misc_feature (10)..(150): Homolog of NCBI NO: 15242420 NR Description: putative protein
  misc_feature (10)..(150): Homolog of NCBI NO: 31074969 NR Description: erg-1 [Solanum tuberosum]
  misc_feature (14)..(150): Homolog of NCBI NO: 15237656 NR Description: phi-1-like protein
  misc_feature (19)..(149): Homolog of NCBI NO: 13194680 NR Description: phosphate-induced protein 1-like protein
  misc_feature (15)..(150): Homolog of NCBI NO: 21593043 NR Description: putative phi-1-like phosphate-induced protein
  misc_feature (15)..(150): Homolog of NCBI NO: 15236667 NR Description: putative phi-1-like phosphate-induced protein
  misc_feature (10)..(149): Homolog of NCBI NO: 15219504 NR Description: phosphate-induced (phi-1) protein, putative
  misc_feature (10)..(150): Homolog of NCBI NO: 3759184 NR Description: phi-1 [Nicotiana tabacum]
HKAQTTPLLHGSDAGAGAAYVWVGNAETQCPGQCAWPFHQPLYGPQAPALVPPSGDVGMDGMVVNIASMVAGAVTNPFRDGFYQGDKDAPLEAATACTGVYGSGAYPGFAGNLAVDGTTGASYNANGANGRKYLLPALFDPATFTCSTLV

SEQ ID NO: 17948 - protein, 92 aa, Zea mays subsp. mays
  peptide (1)..(92): Ceres Seq. ID no. 12337591
  misc_feature (1)..(92): Pfam Name: Phosphate-induced protein 1 conserved region Pfam Description: Phosphate-induced protein 1 conserved region
  misc_feature (1)..(88): Homolog of NCBI NO: 34901824 NR Description: putative phi-1(phosphate-induced protein 1)
  misc_feature (1)..(88): Homolog of NCBI NO: 37533672 NR Description: putative phosphate-induced protein
  misc_feature (1)..(92): Homolog of NCBI NO: 15242420 NR Description: putative protein
  misc_feature (1)..(92): Homolog of NCBI NO: 31074969 NR Description: erg-1 [Solanum tuberosum]
  misc_feature (1)..(92): Homolog of NCBI NO: 15237656 NR Description: phi-1-like protein
  misc_feature (1)..(91): Homolog of NCBI NO: 13194680 NR Description: phosphate-induced protein 1-like protein
  misc_feature (1)..(92): Homolog of NCBI NO: 21593043 NR Description: putative phi-1-like phosphate-induced protein
  misc_feature (1)..(92): Homolog of NCBI NO: 15236667 NR Description: putative phi-1-like phosphate-induced protein
  misc_feature (1)..(91): Homolog of NCBI NO: 15219504 NR Description: phosphate-induced (phi-1) protein, putative
  misc_feature (1)..(92): Homolog of NCBI NO: 3759184 NR Description: phi-1 [Nicotiana tabacum]
MDGMVVNIASMVAGAVTNPFRDGFYQGDKDAPLEAATACTGVYGSGAYPGFAGNLAVDGTTGASYNANGANGRKYLLPALFDPATFTCSTLV

SEQ ID NO: 17949 - DNA, 980 bp, Zea mays subsp. mays
  misc_feature (1)..(980): Ceres Seq. ID no. 12377101
  misc_feature: MA Experiment ID: 108522 Result: Up-regulated in Transcription
  misc_feature: MA Experiment 108522 PARAMETER Experiment Name: Zm_42deg_Heat_P Parameter: Age (day) Value: 8
  misc_feature: MA Experiment 108522 PARAMETER Experiment Name: Zm_42deg_Heat_P Parameter: Organism Value: Zea mays
  misc_feature: MA Experiment 108522 PARAMETER Experiment Name: Zm_42deg_Heat_P Parameter: Plant Line Value: 35A19
  misc_feature: MA Experiment 108522 PARAMETER Experiment Name: Zm_42deg_Heat_P Parameter: Temperature (deg C) Value: 42 vs. 22
  misc_feature: MA Experiment 108522 PARAMETER Experiment Name: Zm_42deg_Heat_P Parameter: Timepoint (hr) Value: 1
  misc_feature: MA Experiment 108522 PARAMETER Experiment Name: Zm_42deg_Heat_P Parameter: Tissue Value: Aerial
  misc_feature: MA Experiment ID: 108527 Result: Down-regulated in Transcription
  misc_feature: MA Experiment 108527 PARAMETER Experiment Name: Zm_5mM_NO_P Parameter: Age (day) Value: 8
  misc_feature: MA Experiment 108527 PARAMETER Experiment Name: Zm_5mM_NO_P Parameter: Organism Value: Zea mays
  misc_feature: MA Experiment 108527 PARAMETER Experiment Name: Zm_5mM_NO_P Parameter: Plant Line Value: 35A19
  misc_feature: MA Experiment 108527 PARAMETER Experiment Name: Zm_5mM_NO_P Parameter: Timepoint (hr) Value: 6
  misc_feature: MA Experiment 108527 PARAMETER Experiment Name: Zm_5mM_NO_P Parameter: Tissue Value: Aerial
  misc_feature: MA Experiment 108527 PARAMETER Experiment Name: Zm_5mM_NO_P Parameter: Treatment Value: 5mM NO vs. No Treatment
  misc_feature: MA Experiment ID: 108543 Result: Up-regulated in Transcription
cctagagatatttaacgcgcctattgatgagctccctaaggaaattgggcatctgaggtctcttcagacactgatattagtccgtactggactagacgagctgccactggctgtttgctcgcttacacggttgatgtgcctgatagccctagggttcgaaaggttgccagctgacagaatggggaacctaacgtccctggaggagctacaactacatagggtagttggccggagtgctacccaagacctagtggcagagtttggcaagctgacgaggttgagggtggtcagcatcaccttttcagagcagctagaggagagcttgcaagaagcattggtgcaatctctgtccaatctgcggcgactccaggaactagagcttttgtgtaaaatgccagagcggggaggcgatatgtggggagactgggagccaccaaggcagctccggcgcctgattattgaaggcatcgacttctcacggcagcctcgatggatcaaccgctcctgcctgccacgcctctgctccttatctctgatggtgcacgctcttgaagcacaggacctagataatctagcgaggttgccagagctccagtacctcacgctagatggtctcagctggcctccaaggtatactgttggcccagacgacttcaggaatctgaggttctgcgaagtgggcacaacgttcgagtttcgtaagggcgccatgccaaggcttgaagagctgcactttggagtttatgcagggtacagtagttgggaacagtatggtgtgccgttcgagcagttcccaacgaaggatgtgatcgaaggtcttgacttggacctggataacgtccttttacttcagcaagtgatggtcgaagttgactgcgcaggtgctactgccgcacaagtggaggaggtggaggccgtggtcatgcgtgccgtggaaaatcatgccaaccgtccaaccataaaaatggatcgagcatatg

SEQ ID NO: 17950 - protein, 326 aa, Zea mays subsp. mays
  peptide (1)..(326): Ceres Seq. ID no. 12377102
  misc_feature (34)..(323): Homolog of NCBI NO: 22208465 NR Description: putative stripe rust resistance protein Yr10
  misc_feature (8)..(324): Homolog of NCBI NO: 40253771 NR Description: putative RGH1A [Oryza sativa (japonica
  misc_feature (9)..(249): Homolog of NCBI NO: 22208504 NR Description: putative stripe rust resistance protein Yr10
  misc_feature (9)..(249): Homolog of NCBI NO: 22208468 NR Description: putative stripe rust resistance protein Yr10/Mla1
  misc_feature (11)..(325): Homolog of NCBI NO: 37573036 NR Description: putative MLA1 [Oryza sativa (japonica
  misc_feature (1)..(324): Homolog of NCBI NO: 40253763 NR Description: putative RGH1A [Oryza sativa (japonica
  misc_feature (1)..(307): Homolog of NCBI NO: 22208466 NR Description: putative Mla1 [Sorghum bicolor]
  misc_feature (8)..(325): Homolog of NCBI NO: 40253772 NR Description: putative RGH1A [Oryza sativa (japonica
  misc_feature (10)..(299): Homolog of NCBI NO: 34904708 NR Description: P0446G09.19 [Oryza sativa (japonica
  misc_feature (10)..(322): Homolog of NCBI NO: 34394780 NR Description: putative CC-NBS-LRR resistance protein MLA13
LEIFNAPIDELPKEIGHLRSLQTLILVRTGLDELPLAVCSLTRLMCLIALGFERLPADRMGNLTSLEELQLHRVVGRSATQDLVAEFGKLTRLRVVSITFSEQLEESLQEALVQSLSNLRRLQELELLCKMPERGGDMWGDWEPPRQLRRLIIEGIDFSRQPRWINRSCLPRLCSLSLMVHALEAQDLDNLARLPELQYLTLDGLSWPPRYTVGPDDFRNLRFCEVGTTFEFRKGAMPRLEELHFGVYAGYSSWEQYGVPFEQFPTKDVIEGLDLDLDNVLLLQQVMVEVDCAGATAAQVEEVEAVVMRAVENHANRPTIKMDRAY

SEQ ID NO: 17951 - protein, 282 aa, Zea mays subsp. mays
  peptide (1)..(282): Ceres Seq. ID no. 12377103
  misc_feature (1)..(279): Homolog of NCBI NO: 22208465 NR Description: putative stripe rust resistance protein Yr10
  misc_feature (1)..(280): Homolog of NCBI NO: 40253771 NR Description: putative RGH1A [Oryza sativa (japonica
  misc_feature (1)..(205): Homolog of NCBI NO: 22208504 NR Description: putative stripe rust resistance protein Yr10
  misc_feature (1)..(205): Homolog of NCBI NO: 22208468 NR Description: putative stripe rust resistance protein Yr10/Mla1
  misc_feature (1)..(281): Homolog of NCBI NO: 37573036 NR Description: putative MLA1 [Oryza sativa (japonica
  misc_feature (1)..(280): Homolog of NCBI NO: 40253763 NR Description: putative RGH1A [Oryza sativa (japonica
  misc_feature (1)..(263): Homolog of NCBI NO: 22208466 NR Description: putative Mla1 [Sorghum bicolor]
  misc_feature (1)..(281): Homolog of NCBI NO: 40253772 NR Description: putative RGH1A [Oryza sativa (japonica
  misc_feature (1)..(255): Homolog of NCBI NO: 34904708 NR Description: P0446G09.19 [Oryza sativa (japonica
  misc_feature (1)..(278): Homolog of NCBI NO: 34394780 NR Description: putative CC-NBS-LRR resistance protein MLA13
MCLIALGFERLPADRMGNLTSLEELQLHRVVGRSATQDLVAEFGKLTRLRVVSITFSEQLEESLQEALVQSLSNLRRLQELELLCKMPERGGDMWGDWEPPRQLRRLIIEGIDFSRQPRWINRSCLPRLCSLSLMVHALEAQDLDNLARLPELQYLTLDGLSWPPRYTVGPDDFRNLRFCEVGTTFEFRKGAMPRLEELHFGVYAGYSSWEQYGVPFEQFPTKDVIEGLDLDLDNVLLLQQVMVEVDCAGATAAQVEEVEAVVMRAVENHANRPTIKMDRAY

SEQ ID NO: 17952 - protein, 267 aa, Zea mays subsp. mays
  peptide (1)..(267): Ceres Seq. ID no. 12377104
  misc_feature (1)..(264): Homolog of NCBI NO: 22208465 NR Description: putative stripe rust resistance protein Yr10
  misc_feature (1)..(265): Homolog of NCBI NO: 40253771 NR Description: putative RGH1A [Oryza sativa (japonica
  misc_feature (1)..(190): Homolog of NCBI NO: 22208504 NR Description: putative stripe rust resistance protein Yr10
  misc_feature (1)..(190): Homolog of NCBI NO: 22208468 NR Description: putative stripe rust resistance protein Yr10/Mla1
  misc_feature (1)..(266): Homolog of NCBI NO: 37573036 NR Description: putative MLA1 [Oryza sativa (japonica
  misc_feature (1)..(265): Homolog of NCBI NO: 40253763 NR Description: putative RGH1A [Oryza sativa (japonica
  misc_feature (1)..(248): Homolog of NCBI NO: 22208466 NR Description: putative Mla1 [Sorghum bicolor]
  misc_feature (1)..(266): Homolog of NCBI NO: 40253772 NR Description: putative RGH1A [Oryza sativa (japonica
  misc_feature (1)..(240): Homolog of NCBI NO: 34904708 NR Description: P0446G09.19 [Oryza sativa (japonica
  misc_feature (1)..(263): Homolog of NCBI NO: 34394780 NR Description: putative CC-NBS-LRR resistance protein MLA13
MGNLTSLEELQLHRVVGRSATQDLVAEFGKLTRLRVVSITFSEQLEESLQEALVQSLSNLRRLQELELLCKMPERGGDMWGDWEPPRQLRRLIIEGIDFSRQPRWINRSCLPRLCSLSLMVHALEAQDLDNLARLPELQYLTLDGLSWPPRYTVGPDDFRNLRFCEVGTTFEFRKGAMPRLEELHFGVYAGYSSWEQYGVPFEQFPTKDVIEGLDLDLDNVLLLQQVMVEVDCAGATAAQVEEVEAVVMRAVENHANRPTIKMDRAY

SEQ ID NO: 17953 - DNA, 1214 bp, Zea mays subsp. mays
  misc_feature (1)..(1214): Ceres Seq. ID no. 12416435
  misc_feature: MA Experiment ID: 108515 Result: Up-regulated in Transcription
  misc_feature: MA Experiment 108515 PARAMETER Experiment Name: Zm_2mM_SA_P Parameter: Age (day) Value: 8
  misc_feature: MA Experiment 108515 PARAMETER Experiment Name: Zm_2mM_SA_P Parameter: Organism Value: Zea mays
  misc_feature: MA Experiment 108515 PARAMETER Experiment Name: Zm_2mM_SA_P Parameter: Plant Line Value: 35A19
  misc_feature: MA Experiment 108515 PARAMETER Experiment Name: Zm_2mM_SA_P Parameter: Timepoint (hr) Value: 12
  misc_feature: MA Experiment 108515 PARAMETER Experiment Name: Zm_2mM_SA_P Parameter: Tissue Value: Aerial
  misc_feature: MA Experiment 108515 PARAMETER Experiment Name: Zm_2mM_SA_P Parameter: Treatment Value: 2mM SA vs. No Treatment
  misc_feature: MA Experiment ID: 108527 Result: Up-regulated in Transcription
  misc_feature: MA Experiment 108527 PARAMETER Experiment Name: Zm_5mM_NO_P Parameter: Age (day) Value: 8
  misc_feature: MA Experiment 108527 PARAMETER Experiment Name: Zm_5mM_NO_P Parameter: Organism Value: Zea mays
  misc_feature: MA Experiment 108527 PARAMETER Experiment Name: Zm_5mM_NO_P Parameter: Plant Line Value: 35A19
  misc_feature: MA Experiment 108527 PARAMETER Experiment Name: Zm_5mM_NO_P Parameter: Timepoint (hr) Value: 6
  misc_feature: MA Experiment 108527 PARAMETER Experiment Name: Zm_5mM_NO_P Parameter: Tissue Value: Aerial
  misc_feature: MA Experiment 108527 PARAMETER Experiment Name: Zm_5mM_NO_P Parameter: Treatment Value: 5mM NO vs. No Treatment
  misc_feature: MA Experiment ID: 108528 Result: Down-regulated in Transcription
  misc_feature: MA Experiment 108528 PARAMETER Experiment Name: Zm_Imbibed_Seeds_P Parameter: Age (day) Value: 5 vs. 2
  misc_feature: MA Experiment 108528 PARAMETER Experiment Name: Zm_Imbibed_Seeds_P Parameter: Organism Value: Zea mays
  misc_feature: MA Experiment 108528 PARAMETER Experiment Name: Zm_Imbibed_Seeds_P Parameter: Plant Line Value: 35A19
  misc_feature: MA Experiment 108528 PARAMETER Experiment Name: Zm_Imbibed_Seeds_P Parameter: Tissue Value: Aerial vs. Embryo
  misc_feature: MA Experiment ID: 108529 Result: Up-regulated in Transcription
  misc_feature: MA Experiment 108529 PARAMETER Experiment Name: Zm_Imbibed_Seeds_P Parameter: Age (day) Value: 5 vs. 2
  misc_feature: MA Experiment 108529 PARAMETER Experiment Name: Zm_Imbibed_Seeds_P Parameter: Organism Value: Zea mays
  misc_feature: MA Experiment 108529 PARAMETER Experiment Name: Zm_Imbibed_Seeds_P Parameter: Plant Line Value: 35A19
  misc_feature: MA Experiment 108529 PARAMETER Experiment Name: Zm_Imbibed_Seeds_P Parameter: Tissue Value: Roots vs. Embryo
  misc_feature: MA Experiment ID: 108530 Result: Down-regulated in Transcription
  misc_feature: MA Experiment 108530 PARAMETER Experiment Name: Zm_Imbibed_Seeds_P Parameter: Age (day) Value: 6 vs. 2
  misc_feature: MA Experiment 108530 PARAMETER Experiment Name: Zm_Imbibed_Seeds_P Parameter: Organism Value: Zea mays
  misc_feature: MA Experiment 108530 PARAMETER Experiment Name: Zm_Imbibed_Seeds_P Parameter: Plant Line Value: 35A19
  misc_feature: MA Experiment 108530 PARAMETER Experiment Name: Zm_Imbibed_Seeds_P Parameter: Tissue Value: Aerial vs. Embryo
  misc_feature: MA Experiment ID: 108535 Result: Down-regulated in Transcription
  misc_feature: MA Experiment 108535 PARAMETER Experiment Name: Zm_Meristem_P Parameter: Age (day) Value: 8
  misc_feature: MA Experiment 108535 PARAMETER Experiment Name: Zm_Meristem_P Parameter: Organism Value: Zea mays
  misc_feature: MA Experiment 108535 PARAMETER Experiment Name: Zm_Meristem_P Parameter: Plant Line Value: 35A19
  misc_feature: MA Experiment 108535 PARAMETER Experiment Name: Zm_Meristem_P Parameter: Tissue Value: Root Meristem vs. Above Root Meristem
  misc_feature: MA Experiment ID: 108543 Result: Up-regulated in Transcription
  misc_feature: MA Experiment ID: 108545 Result: Down-regulated in Transcription
  misc_feature: MA Experiment 108545 PARAMETER Experiment Name: Zm_Imbibed_Seeds_P Parameter: Age (day) Value: 3 vs. 2
  misc_feature: MA Experiment 108545 PARAMETER Experiment Name: Zm_Imbibed_Seeds_P Parameter: Organism Value: Zea mays
  misc_feature: MA Experiment 108545 PARAMETER Experiment Name: Zm_Imbibed_Seeds_P Parameter: Plant Line Value: 35A19
  misc_feature: MA Experiment 108545 PARAMETER Experiment Name: Zm_Imbibed_Seeds_P Parameter: Tissue Value: Aerial vs. Embryo
  misc_feature: MA Experiment ID: 108546 Result: Up-regulated in Transcription
  misc_feature: MA Experiment 108546 PARAMETER Experiment Name: Zm_Imbibed_Seeds_P Parameter: Age (day) Value: 3 vs. 2
  misc_feature: MA Experiment 108546 PARAMETER Experiment Name: Zm_Imbibed_Seeds_P Parameter: Organism Value: Zea mays
  misc_feature: MA Experiment 108546 PARAMETER Experiment Name: Zm_Imbibed_Seeds_P Parameter: Plant Line Value: 35A19
  misc_feature: MA Experiment 108546 PARAMETER Experiment Name: Zm_Imbibed_Seeds_P Parameter: Tissue Value: Roots vs. Embryo
  misc_feature: MA Experiment ID: 108547 Result: Down-regulated in Transcription
  misc_feature: MA Experiment 108547 PARAMETER Experiment Name: Zm_Imbibed_Seeds_P Parameter: Age (day) Value: 4 vs. 2
  misc_feature: MA Experiment 108547 PARAMETER Experiment Name: Zm_Imbibed_Seeds_P Parameter: Organism Value: Zea mays
  misc_feature: MA Experiment 108547 PARAMETER Experiment Name: Zm_Imbibed_Seeds_P Parameter: Plant Line Value: 35A19
  misc_feature: MA Experiment 108547 PARAMETER Experiment Name: Zm_Imbibed_Seeds_P Parameter: Tissue Value: Aerial vs. Embryo
  misc_feature: MA Experiment ID: 20000477 Result: Up-regulated in Transcription
  misc_feature: MA Experiment 20000477 PARAMETER Experiment Name: Zm_5mM_SA_P Parameter: Age (day) Value: 10
  misc_feature: MA Experiment 20000477 PARAMETER Experiment Name: Zm_5mM_SA_P Parameter: Organism Value: Zea mays
  misc_feature: MA Experiment 20000477 PARAMETER Experiment Name: Zm_5mM_SA_P Parameter: Plant Line Value: 35A19
  misc_feature: MA Experiment 20000477 PARAMETER Experiment Name: Zm_5mM_SA_P Parameter: Timepoint (hr) Value: 48
  misc_feature: MA Experiment 20000477 PARAMETER Experiment Name: Zm_5mM_SA_P Parameter: Tissue Value: Aerial
  misc_feature: MA Experiment 20000477 PARAMETER Experiment Name: Zm_5mM_SA_P Parameter: Treatment Value: 5mM SA vs. No Treatment
  misc_feature: MA Experiment ID: 20000478 Result: Up-regulated in Transcription
  misc_feature: MA Experiment 20000478 PARAMETER Experiment Name: Zm_5mM_SA_P Parameter: Age (day) Value: 11
  misc_feature: MA Experiment 20000478 PARAMETER Experiment Name: Zm_5mM_SA_P Parameter: Organism Value: Zea mays
  misc_feature: MA Experiment 20000478 PARAMETER Experiment Name: Zm_5mM_SA_P Parameter: Plant Line Value: 35A19
  misc_feature: MA Experiment 20000478 PARAMETER Experiment Name: Zm_5mM_SA_P Parameter: Timepoint (hr) Value: 72
  misc_feature: MA Experiment 20000478 PARAMETER Experiment Name: Zm_5mM_SA_P Parameter: Tissue Value: Aerial
  misc_feature: MA Experiment 20000478 PARAMETER Experiment Name: Zm_5mM_SA_P Parameter: Treatment Value: 5mM SA vs. No Treatment
  misc_feature: MA Experiment ID: 20000479 Result: Up-regulated in Transcription
  misc_feature: MA Experiment 20000479 PARAMETER Experiment Name: Zm_Drought_P Parameter: Age (day) Value: 10
  misc_feature: MA Experiment 20000479 PARAMETER Experiment Name: Zm_Drought_P Parameter: Organism Value: Zea mays
  misc_feature: MA Experiment 20000479 PARAMETER Experiment Name: Zm_Drought_P Parameter: Plant Line Value: 35A19
  misc_feature: MA Experiment 20000479 PARAMETER Experiment Name: Zm_Drought_P Parameter: Timepoint (hr) Value: 48
  misc_feature: MA Experiment 20000479 PARAMETER Experiment Name: Zm_Drought_P Parameter: Tissue Value: Aerial
  misc_feature: MA Experiment 20000479 PARAMETER Experiment Name: Zm_Drought_P Parameter: Treatment Value: Drought vs. No Drought
  misc_feature: MA Experiment ID: 20000480 Result: Up-regulated in Transcription
  misc_feature: MA Experiment 20000480 PARAMETER Experiment Name: Zm_Drought_P Parameter: Age (day) Value: 11
  misc_feature: MA Experiment 20000480 PARAMETER Experiment Name: Zm_Drought_P Parameter: Organism Value: Zea mays
  misc_feature: MA Experiment 20000480 PARAMETER Experiment Name: Zm_Drought_P Parameter: Plant Line Value: 35A19
  misc_feature: MA Experiment 20000480 PARAMETER Experiment Name: Zm_Drought_P Parameter: Timepoint (hr) Value: 72
  misc_feature: MA Experiment 20000480 PARAMETER Experiment Name: Zm_Drought_P Parameter: Tissue Value: Aerial
  misc_feature: MA Experiment 20000480 PARAMETER Experiment Name: Zm_Drought_P Parameter: Treatment Value: Drought vs. No Drought
  misc_feature: MA Experiment ID: 20000535 Result: Down-regulated in Transcription
  misc_feature: MA Experiment 20000535 PARAMETER Experiment Name: Zm_Hybrid_Seed_Dev_P Parameter: DAP Value: 30 vs. 12
  misc_feature: MA Experiment 20000535 PARAMETER Experiment Name: Zm_Hybrid_Seed_Dev_P Parameter: Organism Value: Zea mays
  misc_feature: MA Experiment 20000535 PARAMETER Experiment Name: Zm_Hybrid_Seed_Dev_P Parameter: Plant Line Value: 35A19
  misc_feature: MA Experiment 20000535 PARAMETER Experiment Name: Zm_Hybrid_Seed_Dev_P Parameter: Tissue Value: Embryo vs. Unfert Floret
gcacgagaccattacctagaacatcctaatcgaaaaaaaaactccccagtcaaggcgcatatccattccatggatctcgcgcccctgctccttctctcccagctgctgctgcttccggtggtggcggttgtctccggcgagaccgccgcgcacccgggctacacacacgctgaggaggcatgcagcggtgtgctagaggcagaggcggagaaagcaacggtgctggtgcctgcgcccagagcggcgcgaagagttcgacggggggcggatcgtggacatcagccactactaccgcgaggacatgccggagtgggagtcatcagagggctccggcgagttcctgcagctggcgcgttccatgcgcaacggctccgacatcgctaacttctcggagctccggctcactgcgcactccggcacccacgtcgacgcgccgggacacgtcttcgagcactactacgacaccggcttcgacgtcgacaccctcgacctcgctgtcctcaacggaccagcgctgttggttgacgttcccagagataagaacatcacagctgatgttatggcatccctaaacatgcctaaaggtgttcgacgtgtactctttcggaccctaaatacagacaggatggtgcacaatggttggttgataatacagacatcaaactagttggagttgactacttgtcagtgggcgcatttgatgaatgcattccagctcatctagtatttcttgaaaaaagggaggtcatacttgtcgaagccttgaatctggagcatgttagccctggaatatacatcttgcattgcttgccactaagattgcggggtgctgaaggttctcctgcaagatgcatcctcatcaagtgacatggttataaccatcccaaaaagcattgtacaatcaatcttgaaacctacctattcagtcttttcgaagtgcttatagaagtatggttttcatgcgtgtgtttatagggatggtgtgaggacccaataatatggagctgggctagtactgatccaatcgacactaatatgagctgaagatactacataaaacatgaacaatatggagttttatatactggaccccagtccaggttttaaatccacccctgcaaggggtgaatttatgtttgtgtttgggagtgtatatttctatattgcagtttgaaaaaaactatgtatgtaataaaataagaatacatcaattc

SEQ ID NO: 17954 - protein, 130 aa, Zea mays subsp. mays
  peptide (1)..(130): Ceres Seq. ID no. 12416436
MQRCARGRGGESNGAGACAQSGAKSSTGGGSWTSATTTARTCRSGSHQRAPASSCSWRVPCATAPTSLTSRSSGSLRTPAPTSTRRDTSSSTTTTPASTSTPSTSLSSTDQRCWLTFPEIRTSQLMLWHP

SEQ ID NO: 17955 - protein, 127 aa, Zea mays subsp. mays
  peptide (1)..(127): Ceres Seq. ID no. 12416437
ARDHYLEHPNRKKNSPVKAHIHSMDLAPLLLLSQLLLLPVVAVVSGETAAHPGYTHAEEACSGVLEAEAEKATVLVPAPRAARRVRRGADRGHQPLLPRGHAGVGVIRGLRRVPAAGAFHAQRLRHR

SEQ ID NO: 17956 - protein, 121 aa, Zea mays subsp. mays
  peptide (1)..(121): Ceres Seq. ID no. 12416438
  misc_feature (1)..(108): Pfam Name: Putative cyclase Pfam Description: Putative cyclase
  misc_feature (25)..(106): Homolog of NCBI NO: 23056289 NR Description: hypothetical protein [Geobacter metallireducens]
  misc_feature (1)..(106): Homolog of NCBI NO: 16330650 NR Description: hypothetical protein [Synechocystis sp. PCC 6803]
  misc_feature (1)..(83): Homolog of NCBI NO: 7486023 NR Description: hypothetical protein F23E12.220 - Arabidopsis
  misc_feature (1)..(111): Homolog of NCBI NO: 7486287 NR Description: hypothetical protein F28A23.60 - Arabidopsis
  misc_feature (1)..(108): Homolog of NCBI NO: 18418393 NR Description: putative protein
  misc_feature (1)..(108): Homolog of NCBI NO: 15219416 NR Description: hypothetical protein; protein id: At1g44542.1
  misc_feature (1)..(108): Homolog of NCBI NO: 18418598 NR Description: putative protein
  misc_feature (1)..(110): Homolog of NCBI NO: 35215089 NR Description: hypothetical protein [Oryza sativa (japonica
MPEWESSEGSGEFLQLARSMRNGSDIANFSELRLTAHSGTHVDAPGHVFEHYYDTGFDVDTLDLAVLNGPALLVDVPRDKNITADVMASLNMPKGVRRVLFRTLNTDRMVHNGWLIIQTSN

SEQ ID NO: 17957 - DNA, 1032 bp, Zea mays subsp. mays
  misc_feature (1)..(1032): Ceres Seq. ID no. 12359028
  misc_feature: MA Experiment ID: 108522 Result: Down-regulated in Transcription
  misc_feature: MA Experiment 108522 PARAMETER Experiment Name: Zm_42deg_Heat_P Parameter: Age (day) Value: 8
  misc_feature: MA Experiment 108522 PARAMETER Experiment Name: Zm_42deg_Heat_P Parameter: Organism Value: Zea mays
  misc_feature: MA Experiment 108522 PARAMETER Experiment Name: Zm_42deg_Heat_P Parameter: Plant Line Value: 35A19
  misc_feature: MA Experiment 108522 PARAMETER Experiment Name: Zm_42deg_Heat_P Parameter: Temperature (deg C) Value: 42 vs. 22
  misc_feature: MA Experiment 108522 PARAMETER Experiment Name: Zm_42deg_Heat_P Parameter: Timepoint (hr) Value: 1
  misc_feature: MA Experiment 108522 PARAMETER Experiment Name: Zm_42deg_Heat_P Parameter: Tissue Value: Aerial
  misc_feature: MA Experiment ID: 108523 Result: Down-regulated in Transcription
  misc_feature: MA Experiment 108523 PARAMETER Experiment Name: Zm_42deg_Heat_P Parameter: Age (day) Value: 8
  misc_feature: MA Experiment 108523 PARAMETER Experiment Name: Zm_42deg_Heat_P Parameter: Organism Value: Zea mays
  misc_feature: MA Experiment 108523 PARAMETER Experiment Name: Zm_42deg_Heat_P Parameter: Plant Line Value: 35A19
  misc_feature: MA Experiment 108523 PARAMETER Experiment Name: Zm_42deg_Heat_P Parameter: Temperature (deg C) Value: 42 vs. 22
  misc_feature: MA Experiment 108523 PARAMETER Experiment Name: Zm_42deg_Heat_P Parameter: Timepoint (hr) Value: 6
  misc_feature: MA Experiment 108523 PARAMETER Experiment Name: Zm_42deg_Heat_P Parameter: Tissue Value: Aerial
  misc_feature: MA Experiment ID: 20000480 Result: Down-regulated in Transcription
  misc_feature: MA Experiment 20000480 PARAMETER Experiment Name: Zm_Drought_P Parameter: Age (day) Value: 11
  misc_feature: MA Experiment 20000480 PARAMETER Experiment Name: Zm_Drought_P Parameter: Organism Value: Zea mays
  misc_feature: MA Experiment 20000480 PARAMETER Experiment Name: Zm_Drought_P Parameter: Plant Line Value: 35A19
  misc_feature: MA Experiment 20000480 PARAMETER Experiment Name: Zm_Drought_P Parameter: Timepoint (hr) Value: 72
  misc_feature: MA Experiment 20000480 PARAMETER Experiment Name: Zm_Drought_P Parameter: Tissue Value: Aerial
  misc_feature: MA Experiment 20000480 PARAMETER Experiment Name: Zm_Drought_P Parameter: Treatment Value: Drought vs. No Drought
ctttacacctctacatgcctcatatctctctgtctgtccaacgatccctctcctttgtcatctccgtctccatctcccaagcaccggagaggagagctagcatgcctggatgtccacggagagggagagactcgatgagatcgggaagatcaagcgagagccggatacagccgccctcgctgtcgcttccgcatccgcctccaccgtgccggccgacaaccacatcccacgccgcctcggccacggcggtgccctcaacaccttgacgccgtgcgccgcgtgcaagctcctccgccgccgctgcgcgcaggaatgccccttcgccccttacttctcgccgcatgagccccacaaattcgccgccgtccacaaggtcttcggcgctagcaacgtctccaagatgctcttggaggtggtggagggggagagggcggacacagcgagcagcctggtgtacgaagcgaacctccggttgcgggatccggtgtacggatgcatgggcgccatctccattctccagcaacaggtgaacgcgctggaggccgagctggaggcagtgagggccgagatcctcaagcacaggtaccggcaggccaccggcaaccgtctcatggacgacgtgcgtgccacggccagcttcgtcttggctcctgcgtccgctccgatgcacgttaatgacgttgtatcagtggtggaggcaggccaagaggtcaccgccaccggcggcgcgtcgggggtgtacattgcggaagccgagcagccgtcaagtactaataactatgctcccttaacccaagtgagcatcctgcatactttggttgacaataagcatggatttatttaacattttggtgggatcacagtagtagaaagtttggatgaataaactgtgtgcaagtttaattatatatacaagttttctagaaataggttatagatgtggatatgtatattgggtgactaaaaagttcatccaatattatggaatatatgtaccattattttcttgtaatagcccattgcgtgttgttg

SEQ ID NO: 17958 - protein, 244 aa, Zea mays subsp. mays
  peptide (1)..(244): Ceres Seq. ID no. 12359029
  misc_feature (54)..(154): Pfam Name: Protein of unknown function DUF260 Pfam Description: Protein of unknown function DUF260
  misc_feature (53)..(157): Homolog of NCBI NO: 34896184 NR Description: contains ESTs C98868(E3203),C98869(E3203)~similar
  misc_feature (53)..(212): Homolog of NCBI NO: 15242624 NR Description: putative protein
  misc_feature (53)..(155): Homolog of NCBI NO: 21592574 NR Description: unknown [Arabidopsis thaliana]
  misc_feature (53)..(155): Homolog of NCBI NO: 18402268 NR Description: expressed protein
  misc_feature (53)..(190): Homolog of NCBI NO: 15221679 NR Description: hypothetical protein; protein id: At1g31320.1
  misc_feature (6)..(163): Homolog of NCBI NO: 25408064 NR Description: hypothetical protein At2g30340 [imported] -
  misc_feature (1)..(163): Homolog of NCBI NO: 30684548 NR Description: lateral organ boundaries (LOB) domain protein 13
  misc_feature (1)..(177): Homolog of NCBI NO: 21618113 NR Description: LOB DOMAIN 13 [Arabidopsis thaliana]
  misc_feature (1)..(177): Homolog of NCBI NO: 18405401 NR Description: expressed protein
  misc_feature (6)..(227): Homolog of NCBI NO: 34907878 NR Description: P0031D02.27 [Oryza sativa (japonica
MSTERERLDEIGKIKREPDTAALAVASASASTVPADNHIPRRLGHGGALNTLTPCAACKLLRRRCAQECPFAPYFSPHEPHKFAAVHKVFGASNVSKMLLEVVEGERADTASSLVYEANLRLRDPVYGCMGAISILQQQVNALEAELEAVRAEILKHRYRQATGNRLMDDVRATASFVLAPASAPMHVNDVVSVVEAGQEVTATGGASGVYIAEAEQPSSTNNYAPLTQVSILHTLVDNKHGFI

SEQ ID NO: 17959 - protein, 147 aa, Zea mays subsp. mays
  peptide (1)..(147): Ceres Seq. ID no. 12359030
  misc_feature (1)..(57): Pfam Name: Protein of unknown function DUF260 Pfam Description: Protein of unknown function DUF260
  misc_feature (1)..(60): Homolog of NCBI NO: 34896184 NR Description: contains ESTs C98868(E3203),C98869(E3203)~similar
  misc_feature (1)..(115): Homolog of NCBI NO: 15242624 NR Description: putative protein
  misc_feature (1)..(58): Homolog of NCBI NO: 21592574 NR Description: unknown [Arabidopsis thaliana]
  misc_feature (1)..(58): Homolog of NCBI NO: 18402268 NR Description: expressed protein
  misc_feature (1)..(93): Homolog of NCBI NO: 15221679 NR Description: hypothetical protein; protein id: At1g31320.1
  misc_feature (1)..(66): Homolog of NCBI NO: 25408064 NR Description: hypothetical protein At2g30340 [imported] -
  misc_feature (1)..(66): Homolog of NCBI NO: 30684548 NR Description: lateral organ boundaries (LOB) domain protein 13
  misc_feature (1)..(80): Homolog of NCBI NO: 21618113 NR Description: LOB DOMAIN 13 [Arabidopsis thaliana]
  misc_feature (1)..(80): Homolog of NCBI NO: 18405401 NR Description: expressed protein
  misc_feature (1)..(130): Homolog of NCBI NO: 34907878 NR Description: P0031D02.27 [Oryza sativa (japonica
MLLEVVEGERADTASSLVYEANLRLRDPVYGCMGAISILQQQVNALEAELEAVRAEILKHRYRQATGNRLMDDVRATASFVLAPASAPMHVNDVVSVVEAGQEVTATGGASGVYIAEAEQPSSTNNYAPLTQVSILHTLVDNKHGFI

SEQ ID NO: 17960 - DNA, 902 bp, Zea mays subsp. mays; identical to SEQ ID NO: 13266
  misc_feature (1)..(902): Ceres Seq. ID no. 12377811
  misc_feature: MA Experiment ID: 108522 Result: Down-regulated in Transcription
  misc_feature: MA Experiment 108522 PARAMETER Experiment Name: Zm_42deg_Heat_P Parameter: Age (day) Value: 8
  misc_feature: MA Experiment 108522 PARAMETER Experiment Name: Zm_42deg_Heat_P Parameter: Organism Value: Zea mays
  misc_feature: MA Experiment 108522 PARAMETER Experiment Name: Zm_42deg_Heat_P Parameter: Plant Line Value: 35A19
  misc_feature: MA Experiment 108522 PARAMETER Experiment Name: Zm_42deg_Heat_P Parameter: Temperature (deg C) Value: 42 vs. 22
  misc_feature: MA Experiment 108522 PARAMETER Experiment Name: Zm_42deg_Heat_P Parameter: Timepoint (hr) Value: 1
  misc_feature: MA Experiment 108522 PARAMETER Experiment Name: Zm_42deg_Heat_P Parameter: Tissue Value: Aerial
  misc_feature: MA Experiment ID: 108527 Result: Down-regulated in Transcription
  misc_feature: MA Experiment 108527 PARAMETER Experiment Name: Zm_5mM_NO_P Parameter: Age (day) Value: 8
  misc_feature: MA Experiment 108527 PARAMETER Experiment Name: Zm_5mM_NO_P Parameter: Organism Value: Zea mays
  misc_feature: MA Experiment 108527 PARAMETER Experiment Name: Zm_5mM_NO_P Parameter: Plant Line Value: 35A19
  misc_feature: MA Experiment 108527 PARAMETER Experiment Name: Zm_5mM_NO_P Parameter: Timepoint (hr) Value: 6
  misc_feature: MA Experiment 108527 PARAMETER Experiment Name: Zm_5mM_NO_P Parameter: Tissue Value: Aerial
  misc_feature: MA Experiment 108527 PARAMETER Experiment Name: Zm_5mM_NO_P Parameter: Treatment Value: 5mM NO vs. No Treatment
  misc_feature: MA Experiment ID: 108530 Result: Down-regulated in Transcription
  misc_feature: MA Experiment 108530 PARAMETER Experiment Name: Zm_Imbibed_Seeds_P Parameter: Age (day) Value: 6 vs. 2
  misc_feature: MA Experiment 108530 PARAMETER Experiment Name: Zm_Imbibed_Seeds_P Parameter: Organism Value: Zea mays
  misc_feature: MA Experiment 108530 PARAMETER Experiment Name: Zm_Imbibed_Seeds_P Parameter: Plant Line Value: 35A19
  misc_feature: MA Experiment 108530 PARAMETER Experiment Name: Zm_Imbibed_Seeds_P Parameter: Tissue Value: Aerial vs. Embryo
  misc_feature: MA Experiment ID: 108535 Result: Down-regulated in Transcription
  misc_feature: MA Experiment 108535 PARAMETER Experiment Name: Zm_Meristem_P Parameter: Age (day) Value: 8
  misc_feature: MA Experiment 108535 PARAMETER Experiment Name: Zm_Meristem_P Parameter: Organism Value: Zea mays
  misc_feature: MA Experiment 108535 PARAMETER Experiment Name: Zm_Meristem_P Parameter: Plant Line Value: 35A19
  misc_feature: MA Experiment 108535 PARAMETER Experiment Name: Zm_Meristem_P Parameter: Tissue Value: Root Meristem vs. Above Root Meristem
  misc_feature: MA Experiment ID: 108544 Result: Up-regulated in Transcription
  misc_feature: MA Experiment ID: 108545 Result: Down-regulated in Transcription
  misc_feature: MA Experiment 108545 PARAMETER Experiment Name: Zm_Imbibed_Seeds_P Parameter: Age (day) Value: 3 vs. 2
  misc_feature: MA Experiment 108545 PARAMETER Experiment Name: Zm_Imbibed_Seeds_P Parameter: Organism Value: Zea mays
  misc_feature: MA Experiment 108545 PARAMETER Experiment Name: Zm_Imbibed_Seeds_P Parameter: Plant Line Value: 35A19
  misc_feature: MA Experiment 108545 PARAMETER Experiment Name: Zm_Imbibed_Seeds_P Parameter: Tissue Value: Aerial vs. Embryo
  misc_feature: MA Experiment ID: 108556 Result: Down-regulated in Transcription
  misc_feature: MA Experiment 108556 PARAMETER Experiment Name: Zm_Drought_P Parameter: Age (day) Value: 9
  misc_feature: MA Experiment 108556 PARAMETER Experiment Name: Zm_Drought_P Parameter: Organism Value: Zea mays
  misc_feature: MA Experiment 108556 PARAMETER Experiment Name: Zm_Drought_P Parameter: Plant Line Value: 35A19
  misc_feature: MA Experiment 108556 PARAMETER Experiment Name: Zm_Drought_P Parameter: Timepoint (hr) Value: 24
  misc_feature: MA Experiment 108556 PARAMETER Experiment Name: Zm_Drought_P Parameter: Tissue Value: Aerial
  misc_feature: MA Experiment 108556 PARAMETER Experiment Name: Zm_Drought_P Parameter: Treatment Value: Drought vs. No Drought
  misc_feature: MA Experiment ID: 108559 Result: Down-regulated in Transcription
  misc_feature: MA Experiment 108559 PARAMETER Experiment Name: Zm_5mM_NO_P Parameter: Age (day) Value: 8
  misc_feature: MA Experiment 108559 PARAMETER Experiment Name: Zm_5mM_NO_P Parameter: Organism Value: Zea mays
  misc_feature: MA Experiment 108559 PARAMETER Experiment Name: Zm_5mM_NO_P Parameter: Plant Line Value: 35A19
  misc_feature: MA Experiment 108559 PARAMETER Experiment Name: Zm_5mM_NO_P Parameter: Timepoint (hr) Value: 12
  misc_feature: MA Experiment 108559 PARAMETER Experiment Name: Zm_5mM_NO_P Parameter: Tissue Value: Aerial
  misc_feature: MA Experiment 108559 PARAMETER Experiment Name: Zm_5mM_NO_P Parameter: Treatment Value: 5mM NO vs. No Treatment
  misc_feature: MA Experiment ID: 108687 Result: Down-regulated in Transcription
  misc_feature: MA Experiment 108687 PARAMETER Experiment Name: Zm_Embryos-Flowers__P Parameter: Tissue Value: Embryo vs. Aerial+
  misc_feature: MA Experiment ID: 20000108 Result: Down-regulated in Transcription
  misc_feature: MA Experiment 20000108 PARAMETER Experiment Name: Zm_Root-Tips_P Parameter: Age (day) Value: 12
  misc_feature: MA Experiment 20000108 PARAMETER Experiment Name: Zm_Root-Tips_P Parameter: Organism Value: Zea mays
  misc_feature: MA Experiment 20000108 PARAMETER Experiment Name: Zm_Root-Tips_P Parameter: Tissue Value: Root tips vs. Root mid region    35
  misc_feature: MA Experiment 20000108 PARAMETER Experiment Name: Zm_Root-Tips_P Parameter: Tissue Value: Root tips vs. Root mid region   Sequence Listing-Misc Features (4)
  misc_feature: MA Experiment ID: 20000479 Result: Down-regulated in Transcription
  misc_feature: MA Experiment 20000479 PARAMETER Experiment Name: Zm_Drought_P Parameter: Age (day) Value: 10
  misc_feature: MA Experiment 20000479 PARAMETER Experiment Name: Zm_Drought_P Parameter: Organism Value: Zea mays
  misc_feature: MA Experiment 20000479 PARAMETER Experiment Name: Zm_Drought_P Parameter: Plant Line Value: 35A19
  misc_feature: MA Experiment 20000479 PARAMETER Experiment Name: Zm_Drought_P Parameter: Timepoint (hr) Value: 48
  misc_feature: MA Experiment 20000479 PARAMETER Experiment Name: Zm_Drought_P Parameter: Tissue Value: Aerial
  misc_feature: MA Experiment 20000479 PARAMETER Experiment Name: Zm_Drought_P Parameter: Treatment Value: Drought vs. No Drought
  misc_feature: MA Experiment ID: 20000480 Result: Down-regulated in Transcription
  misc_feature: MA Experiment 20000480 PARAMETER Experiment Name: Zm_Drought_P Parameter: Age (day) Value: 11
  misc_feature: MA Experiment 20000480 PARAMETER Experiment Name: Zm_Drought_P Parameter: Organism Value: Zea mays
  misc_feature: MA Experiment 20000480 PARAMETER Experiment Name: Zm_Drought_P Parameter: Plant Line Value: 35A19
  misc_feature: MA Experiment 20000480 PARAMETER Experiment Name: Zm_Drought_P Parameter: Timepoint (hr) Value: 72
  misc_feature: MA Experiment 20000480 PARAMETER Experiment Name: Zm_Drought_P Parameter: Tissue Value: Aerial
  misc_feature: MA Experiment 20000480 PARAMETER Experiment Name: Zm_Drought_P Parameter: Treatment Value: Drought vs. No Drought
  misc_feature: MA Experiment ID: 20000492 Result: Down-regulated in Transcription
  misc_feature: MA Experiment 20000492 PARAMETER Experiment Name: Zm_Hybrid_Seed_Dev_P Parameter: DAP Value: 12
  misc_feature: MA Experiment 20000492 PARAMETER Experiment Name: Zm_Hybrid_Seed_Dev_P Parameter: Organism Value: Zea mays
  misc_feature: MA Experiment 20000492 PARAMETER Experiment Name: Zm_Hybrid_Seed_Dev_P Parameter: Plant Line Value: 35A19
  misc_feature: MA Experiment 20000492 PARAMETER Experiment Name: Zm_Hybrid_Seed_Dev_P Parameter: Tissue Value: Fert Kernel vs. Unfert Floret
  misc_feature: MA Experiment ID: 20000535 Result: Down-regulated in Transcription
  misc_feature: MA Experiment 20000535 PARAMETER Experiment Name: Zm_Hybrid_Seed_Dev_P Parameter: DAP Value: 30 vs. 12
  misc_feature: MA Experiment 20000535 PARAMETER Experiment Name: Zm_Hybrid_Seed_Dev_P Parameter: Organism Value: Zea mays
  misc_feature: MA Experiment 20000535 PARAMETER Experiment Name: Zm_Hybrid_Seed_Dev_P Parameter: Plant Line Value: 35A19
  misc_feature: MA Experiment 20000535 PARAMETER Experiment Name: Zm_Hybrid_Seed_Dev_P Parameter: Tissue Value: Embryo vs. Unfert Floret

SEQ ID NO: 17961 - protein, 223 aa, Zea mays subsp. mays; identical to SEQ ID NO: 13267
  peptide (1)..(223): Ceres Seq. ID no. 12377812
  misc_feature (1)..(223): Homolog of NCBI NO: 38346025 NR Description: OSJNBb0071D01.2 [Oryza sativa (japonica
  misc_feature (9)..(220): Homolog of NCBI NO: 15222928 NR Description: unknown protein; protein id: At1g76020.1
  misc_feature (8)..(220): Homolog of NCBI NO: 22329686 NR Description: unknown protein; protein id: At1g20225.1, by cDNA: gi_17065543 [Arabidopsis thaliana] Unknown protein [Arabidopsis thaliana]
  misc_feature (8)..(219): Homolog of NCBI NO: 25518088 NR Description: T20H2.2 protein - Arabidopsis thaliana Contains similarity to pigpen protein from Mus musculus and contains protein of unknown function DUF78 PF|01918 domain.
  misc_feature (9)..(197): Homolog of NCBI NO: 8778813 NR Description: T4O12.23 [Arabidopsis thaliana]
  misc_feature (190)..(190): Xaa is any aa, unknown or other
  misc_feature (209)..(209): Xaa is any aa, unknown or other

SEQ ID NO: 17962 - protein, 152 aa, Zea mays subsp. mays; identical to SEQ ID NO: 13268
  peptide (1)..(152): Ceres Seq. ID no. 12377813
  misc_feature (1)..(152): Homolog of NCBI NO: 38346025 NR Description: OSJNBb0071D01.2 [Oryza sativa (japonica
  misc_feature (1)..(149): Homolog of NCBI NO: 15222928 NR Description: unknown protein; protein id: At1g76020.1
  misc_feature (1)..(149): Homolog of NCBI NO: 22329686 NR Description: unknown protein; protein id: At1g20225.1, by cDNA: gi_17065543 [Arabidopsis thaliana] Unknown protein [Arabidopsis thaliana]
  misc_feature (1)..(148): Homolog of NCBI NO: 25518088 NR Description: T20H2.2 protein - Arabidopsis thaliana Contains similarity to pigpen protein from Mus musculus and contains protein of unknown function DUF78 PF|01918 domain.
  misc_feature (1)..(126): Homolog of NCBI NO: 8778813 NR Description: T4O12.23 [Arabidopsis thaliana]
  misc_feature (119)..(119): Xaa is any aa, unknown or other
  misc_feature (138)..(138): Xaa is any aa, unknown or other

SEQ ID NO: 17963 - DNA, 483 bp, Zea mays subsp. mays
  misc_feature (1)..(483): Ceres Seq. ID no. 1682030
  misc_feature: MA Experiment ID: 108515 Result: Up-regulated in Transcription
  misc_feature: MA Experiment 108515 PARAMETER Experiment Name: Zm_2mM_SA_P Parameter: Age (day) Value: 8
  misc_feature: MA Experiment 108515 PARAMETER Experiment Name: Zm_2mM_SA_P Parameter: Organism Value: Zea mays
  misc_feature: MA Experiment 108515 PARAMETER Experiment Name: Zm_2mM_SA_P Parameter: Plant Line Value: 35A19
  misc_feature: MA Experiment 108515 PARAMETER Experiment Name: Zm_2mM_SA_P Parameter: Timepoint (hr) Value: 12
  misc_feature: MA Experiment 108515 PARAMETER Experiment Name: Zm_2mM_SA_P Parameter: Tissue Value: Aerial
  misc_feature: MA Experiment 108515 PARAMETER Experiment Name: Zm_2mM_SA_P Parameter: Treatment Value: 2mM SA vs. No Treatment
  misc_feature: MA Experiment ID: 108522 Result: Down-regulated in Transcription
  misc_feature: MA Experiment 108522 PARAMETER Experiment Name: Zm_42deg_Heat_P Parameter: Age (day) Value: 8
  misc_feature: MA Experiment 108522 PARAMETER Experiment Name: Zm_42deg_Heat_P Parameter: Organism Value: Zea mays
  misc_feature: MA Experiment 108522 PARAMETER Experiment Name: Zm_42deg_Heat_P Parameter: Plant Line Value: 35A19
  misc_feature: MA Experiment 108522 PARAMETER Experiment Name: Zm_42deg_Heat_P Parameter: Temperature (deg C) Value: 42 vs. 22
  misc_feature: MA Experiment 108522 PARAMETER Experiment Name: Zm_42deg_Heat_P Parameter: Timepoint (hr) Value: 1
  misc_feature: MA Experiment 108522 PARAMETER Experiment Name: Zm_42deg_Heat_P Parameter: Tissue Value: Aerial
  misc_feature: MA Experiment ID: 108529 Result: Up-regulated in Transcription
  misc_feature: MA Experiment 108529 PARAMETER Experiment Name: Zm_Imbibed_Seeds_P Parameter: Age (day) Value: 5 vs. 2
  misc_feature: MA Experiment 108529 PARAMETER Experiment Name: Zm_Imbibed_Seeds_P Parameter: Organism Value: Zea mays
  misc_feature: MA Experiment 108529 PARAMETER Experiment Name: Zm_Imbibed_Seeds_P Parameter: Plant Line Value: 35A19
  misc_feature: MA Experiment 108529 PARAMETER Experiment Name: Zm_Imbibed_Seeds_P Parameter: Tissue Value: Roots vs. Embryo
  misc_feature: MA Experiment ID: 108535 Result: Down-regulated in Transcription
  misc_feature: MA Experiment 108535 PARAMETER Experiment Name: Zm_Meristem_P Parameter: Age (day) Value: 8
  misc_feature: MA Experiment 108535 PARAMETER Experiment Name: Zm_Meristem_P Parameter: Organism Value: Zea mays
  misc_feature: MA Experiment 108535 PARAMETER Experiment Name: Zm_Meristem_P Parameter: Plant Line Value: 35A19
  misc_feature: MA Experiment 108535 PARAMETER Experiment Name: Zm_Meristem_P Parameter: Tissue Value: Root Meristem vs. Above Root Meristem
  misc_feature: MA Experiment ID: 108543 Result: Up-regulated in Transcription
  misc_feature: MA Experiment ID: 108546 Result: Up-regulated in Transcription
  misc_feature: MA Experiment 108546 PARAMETER Experiment Name: Zm_Imbibed_Seeds_P Parameter: Age (day) Value: 3 vs. 2
  misc_feature: MA Experiment 108546 PARAMETER Experiment Name: Zm_Imbibed_Seeds_P Parameter: Organism Value: Zea mays
  misc_feature: MA Experiment 108546 PARAMETER Experiment Name: Zm_Imbibed_Seeds_P Parameter: Plant Line Value: 35A19
  misc_feature: MA Experiment 108546 PARAMETER Experiment Name: Zm_Imbibed_Seeds_P Parameter: Tissue Value: Roots vs. Embryo
  misc_feature: MA Experiment ID: 20000477 Result: Down-regulated in Transcription
  misc_feature: MA Experiment 20000477 PARAMETER Experiment Name: Zm_5mM_SA_P Parameter: Age (day) Value: 10
  misc_feature: MA Experiment 20000477 PARAMETER Experiment Name: Zm_5mM_SA_P Parameter: Organism Value: Zea mays
  misc_feature: MA Experiment 20000477 PARAMETER Experiment Name: Zm_5mM_SA_P Parameter: Plant Line Value: 35A19
  misc_feature: MA Experiment 20000477 PARAMETER Experiment Name: Zm_5mM_SA_P Parameter: Timepoint (hr) Value: 48
  misc_feature: MA Experiment 20000477 PARAMETER Experiment Name: Zm_5mM_SA_P Parameter: Tissue Value: Aerial
  misc_feature: MA Experiment 20000477 PARAMETER Experiment Name: Zm_5mM_SA_P Parameter: Treatment Value: 5mM SA vs. No Treatment
  misc_feature: MA Experiment ID: 20000492 Result: Down-regulated in Transcription
  misc_feature: MA Experiment 20000492 PARAMETER Experiment Name: Zm_Hybrid_Seed_Dev_P Parameter: DAP Value: 12
  misc_feature: MA Experiment 20000492 PARAMETER Experiment Name: Zm_Hybrid_Seed_Dev_P Parameter: Organism Value: Zea mays
  misc_feature: MA Experiment 20000492 PARAMETER Experiment Name: Zm_Hybrid_Seed_Dev_P Parameter: Plant Line Value: 35A19
  misc_feature: MA Experiment 20000492 PARAMETER Experiment Name: Zm_Hybrid_Seed_Dev_P Parameter: Tissue Value: Fert Kernel vs. Unfert Floret
  misc_feature: MA Experiment ID: 20000535 Result: Down-regulated in Transcription
  misc_feature: MA Experiment 20000535 PARAMETER Experiment Name: Zm_Hybrid_Seed_Dev_P Parameter: DAP Value: 30 vs. 12
  misc_feature: MA Experiment 20000535 PARAMETER Experiment Name: Zm_Hybrid_Seed_Dev_P Parameter: Organism Value: Zea mays
  misc_feature: MA Experiment 20000535 PARAMETER Experiment Name: Zm_Hybrid_Seed_Dev_P Parameter: Plant Line Value: 35A19
  misc_feature: MA Experiment 20000535 PARAMETER Experiment Name: Zm_Hybrid_Seed_Dev_P Parameter: Tissue Value: Embryo vs. Unfert Floret
  misc_feature: MA Experiment ID: 20000626 Result: Up-regulated in Transcription
  misc_feature: MA Experiment 20000626 PARAMETER Experiment Name: Zm_Herbicide-Treatments_P Parameter: Timepoint (hr) Value: 12
  misc_feature: MA Experiment 20000626 PARAMETER Experiment Name: Zm_Herbicide-Treatments_P Parameter: Tissue Value: Aerial
  misc_feature: MA Experiment 20000626 PARAMETER Experiment Name: Zm_Herbicide-Treatments_P Parameter: Treatment Value: Roundup vs. No Treatment
  misc_feature: MA Experiment ID: 20000627 Result: Up-regulated in Transcription
  misc_feature: MA Experiment 20000627 PARAMETER Experiment Name: Zm_Herbicide-Treatments_P Parameter: Timepoint (hr) Value: 12
  misc_feature: MA Experiment 20000627 PARAMETER Experiment Name: Zm_Herbicide-Treatments_P Parameter: Tissue Value: Aerial
  misc_feature: MA Experiment 20000627 PARAMETER Experiment Name: Zm_Herbicide-Treatments_P Parameter: Treatment Value: Finale vs. No Treatment
  misc_feature: MA Experiment ID: 20000630 Result: Up-regulated in Transcription
  misc_feature: MA Experiment 20000630 PARAMETER Experiment Name: Zm_Herbicide-Treatments_P Parameter: Timepoint (hr) Value: 4
  misc_feature: MA Experiment 20000630 PARAMETER Experiment Name: Zm_Herbicide-Treatments_P Parameter: Tissue Value: Aerial
  misc_feature: MA Experiment 20000630 PARAMETER Experiment Name: Zm_Herbicide-Treatments_P Parameter: Treatment Value: Roundup vs. No Treatment
acgacgccatggacgccgatgcccgcctcgtcatgcacgtcgtgctcagcgagtgccctgccgtcttccacggcctcgcttcgctcgtcgacgtcggcggcggccatggcacagccgcggctgccatcgccagggccttcccacacatcaagtgtaccgtcatggacctccctcacgttgtcgctgaggctcccgcgggcactggactgtgcttcctcgccggcgatatgttcgaccacatcccaccggctgacggtattctgctcaagtggattctgcatgattgggatgatgcgaagtgcattaagataatggaacggtgcaaggaagcaattggtggcaaagaaaggggagggaaagtcattataatcgacaccgtgattggatctaggccaaacgaggaagatatgatacgcagggaggctcaagtcctgtgtgatctaggtatgatgacaacgtcgaatggagctgagcgagaggagc

SEQ ID NO: 17964 - protein, 160 aa, Zea mays subsp. mays
  peptide (1)..(160): Ceres Seq. ID no. 1682031
  misc_feature (1)..(159): Pfam Name: O-methyltransferase Pfam Description: O-methyltransferase
  misc_feature (1)..(139): Homolog of NCBI NO: 4098238 NR Description: o-methyltransferase [Triticum aestivum]
  misc_feature (1)..(159): Homolog of NCBI NO: 3077640 NR Description: O-methyltransferase [Prunus dulcis]
  misc_feature (3)..(159): Homolog of NCBI NO: 37530606 NR Description: putative o-methyltransferase ZRP4
  misc_feature (1)..(159): Homolog of NCBI NO: 2282586 NR Description: methyltransferase [Prunus armeniaca]
  misc_feature (1)..(159): Homolog of NCBI NO: 1353193 NR Description: O-METHYLTRANSFERASE ZRP4 (OMT)
  misc_feature (2)..(159): Homolog of NCBI NO: 37530600 NR Description: putative o-methyltransferase ZRP4
  misc_feature (1)..(159): Homolog of NCBI NO: 27527928 NR Description: orcinol O-methyltransferase [Rosa hybrid cultivar]
  misc_feature (1)..(159): Homolog of NCBI NO: 27527926 NR Description: orcinol O-methyltransferase [Rosa hybrid cultivar]
  misc_feature (1)..(159): Homolog of NCBI NO: 20514369 NR Description: orcinol O-methyltransferase [Rosa hybrid
  misc_feature (1)..(159): Homolog of NCBI NO: 20514367 NR Description: orcinol O-methyltransferase [Rosa hybrid
DAMDADARLVMHVVLSECPAVFHGLASLVDVGGGHGTAAAAIARAFPHIKCTVMDLPHVVAEAPAGTGLCFLAGDMFDHIPPADGILLKWILHDWDDAKCIKIMERCKEAIGGKERGGKVIIIDTVIGSRPNEEDMIRREAQVLCDLGMMTTSNGAEREE

SEQ ID NO: 17965 - protein, 158 aa, Zea mays subsp. mays
  peptide (1)..(158): Ceres Seq. ID no. 1682032
  misc_feature (1)..(157): Pfam Name: O-methyltransferase Pfam Description: O-methyltransferase
  misc_feature (1)..(137): Homolog of NCBI NO: 4098238 NR Description: o-methyltransferase [Triticum aestivum]
  misc_feature (1)..(157): Homolog of NCBI NO: 3077640 NR Description: O-methyltransferase [Prunus dulcis]
  misc_feature (1)..(157): Homolog of NCBI NO: 37530606 NR Description: putative o-methyltransferase ZRP4
  misc_feature (1)..(157): Homolog of NCBI NO: 2282586 NR Description: methyltransferase [Prunus armeniaca]
  misc_feature (1)..(157): Homolog of NCBI NO: 1353193 NR Description: O-METHYLTRANSFERASE ZRP4 (OMT)
  misc_feature (1)..(157): Homolog of NCBI NO: 37530600 NR Description: putative o-methyltransferase ZRP4
  misc_feature (1)..(157): Homolog of NCBI NO: 27527928 NR Description: orcinol O-methyltransferase [Rosa hybrid cultivar]
  misc_feature (1)..(157): Homolog of NCBI NO: 27527926 NR Description: orcinol O-methyltransferase [Rosa hybrid cultivar]
  misc_feature (1)..(157): Homolog of NCBI NO: 20514369 NR Description: orcinol O-methyltransferase [Rosa hybrid
  misc_feature (1)..(157): Homolog of NCBI NO: 20514367 NR Description: orcinol O-methyltransferase [Rosa hybrid
MDADARLVMHVVLSECPAVFHGLASLVDVGGGHGTAAAAIARAFPHIKCTVMDLPHVVAEAPAGTGLCFLAGDMFDHIPPADGILLKWILHDWDDAKCIKIMERCKEAIGGKERGGKVIIIDTVIGSRPNEEDMIRREAQVLCDLGMMTTSNGAEREE

SEQ ID NO: 17966 - protein, 150 aa, Zea mays subsp. mays
  peptide (1)..(150): Ceres Seq. ID no. 1682033
  misc_feature (1)..(149): Pfam Name: O-methyltransferase Pfam Description: O-methyltransferase
  misc_feature (1)..(129): Homolog of NCBI NO: 4098238 NR Description: o-methyltransferase [Triticum aestivum]
  misc_feature (1)..(149): Homolog of NCBI NO: 3077640 NR Description: O-methyltransferase [Prunus dulcis]
  misc_feature (1)..(149): Homolog of NCBI NO: 37530606 NR Description: putative o-methyltransferase ZRP4
  misc_feature (1)..(149): Homolog of NCBI NO: 2282586 NR Description: methyltransferase [Prunus armeniaca]
  misc_feature (1)..(149): Homolog of NCBI NO: 1353193 NR Description: O-METHYLTRANSFERASE ZRP4 (OMT)
  misc_feature (1)..(149): Homolog of NCBI NO: 37530600 NR Description: putative o-methyltransferase ZRP4
  misc_feature (1)..(149): Homolog of NCBI NO: 27527928 NR Description: orcinol O-methyltransferase [Rosa hybrid cultivar]
  misc_feature (1)..(149): Homolog of NCBI NO: 27527926 NR Description: orcinol O-methyltransferase [Rosa hybrid cultivar]
  misc_feature (1)..(149): Homolog of NCBI NO: 20514369 NR Description: orcinol O-methyltransferase [Rosa hybrid
  misc_feature (1)..(149): Homolog of NCBI NO: 20514367 NR Description: orcinol O-methyltransferase [Rosa hybrid
MHVVLSECPAVFHGLASLVDVGGGHGTAAAAIARAFPHIKCTVMDLPHVVAEAPAGTGLCFLAGDMFDHIPPADGILLKWILHDWDDAKCIKIMERCKEAIGGKERGGKVIIIDTVIGSRPNEEDMIRREAQVLCDLGMMTTSNGAEREE

SEQ ID NO: 17967 - DNA, 811 bp, Zea mays subsp. mays
  misc_feature (1)..(811): Ceres Seq. ID no. 13499210
  misc_feature: MA Experiment ID: 108529 Result: Down-regulated in Transcription
  misc_feature: MA Experiment 108529 PARAMETER Experiment Name: Zm_Imbibed_Seeds_P Parameter: Age (day) Value: 5 vs. 2
  misc_feature: MA Experiment 108529 PARAMETER Experiment Name: Zm_Imbibed_Seeds_P Parameter: Organism Value: Zea mays
  misc_feature: MA Experiment 108529 PARAMETER Experiment Name: Zm_Imbibed_Seeds_P Parameter: Plant Line Value: 35A19
  misc_feature: MA Experiment 108529 PARAMETER Experiment Name: Zm_Imbibed_Seeds_P Parameter: Tissue Value: Roots vs. Embryo
  misc_feature: MA Experiment ID: 108535 Result: Up-regulated in Transcription
  misc_feature: MA Experiment 108535 PARAMETER Experiment Name: Zm_Meristem_P Parameter: Age (day) Value: 8
  misc_feature: MA Experiment 108535 PARAMETER Experiment Name: Zm_Meristem_P Parameter: Organism Value: Zea mays
  misc_feature: MA Experiment 108535 PARAMETER Experiment Name: Zm_Meristem_P Parameter: Plant Line Value: 35A19
  misc_feature: MA Experiment 108535 PARAMETER Experiment Name: Zm_Meristem_P Parameter: Tissue Value: Root Meristem vs. Above Root Meristem
  misc_feature: MA Experiment ID: 108544 Result: Down-regulated in Transcription
  misc_feature: MA Experiment ID: 108546 Result: Down-regulated in Transcription
  misc_feature: MA Experiment 108546 PARAMETER Experiment Name: Zm_Imbibed_Seeds_P Parameter: Age (day) Value: 3 vs. 2
  misc_feature: MA Experiment 108546 PARAMETER Experiment Name: Zm_Imbibed_Seeds_P Parameter: Organism Value: Zea mays
  misc_feature: MA Experiment 108546 PARAMETER Experiment Name: Zm_Imbibed_Seeds_P Parameter: Plant Line Value: 35A19
  misc_feature: MA Experiment 108546 PARAMETER Experiment Name: Zm_Imbibed_Seeds_P Parameter: Tissue Value: Roots vs. Embryo
atatgcctaataaaaggcataaacctggcctcaccccaccgcgagccgaaccggagcgtcaagcaaacatccgtcgatcccgattccgaccactgcgctcgcgccatcgcgccatccacccggcattgtgcgcccgagccgggctcgttggatggcgtccggaggcgccgcccgcggtcgccttgctgaggagcgcaaggcgtggcgcaagagccatcccctcggctttgtggccaagccggcgatgctgccggatggttctgtcaatctcatgctctggaactgcgtcgtccccggcaaggaaggcactgattgggaaggtggatatttcccggtcactctccatttcactgaaaattacccaagtaaccccccaacctgcaagttcccacgaaggtttttccatgtcaatgtctatgattctggggatgtatgcctgtcaatacttggtgatgcatgggcgccttctatcacagtgcggcaaattctaataggcatccaggagctgctggagaacccaaacccagcctctcccgcacaggattttgcttacgatgtttttgcagagaatatgccagaatacaagagacgcgtccgtgagcaagccaagaggtatccgtcgctcgtgtagccgtggacctctgcaacacaattgctgctaaccaagtagtcactcactttggtgtagtggaacttgttcatgacgtgcttaactatggtgtctagttagccgtacgcttgttggaactgctaaagtgcagcttattggaactgctaaaatgcccttgactacgtcttattattatggttt

SEQ ID NO: 17968 - protein, 162 aa, Zea mays subsp. mays
  peptide (1)..(162): Ceres Seq. ID no. 13499211
MPNKRHKPGLTPPRAEPERQANIRRSRFRPLRSRHRAIHPALCARAGLVGWRPEAPPAVALLRSARRGARAIPSALWPSRRCCRMVLSISCSGTASSPARKALIGKVDISRSLSISLKITQVTPQPASSHEGFSMSMSMILGMYACQYLVMHGRLLSQCGKF

SEQ ID NO: 17969 - protein, 159 aa, Zea mays subsp. mays
  peptide (1)..(159): Ceres Seq. ID no. 13499212
  misc_feature (5)..(157): Homolog of NCBI NO: 20150955 NR Description: Chain A, Structural Basis For E2-Mediated Sumo Revealed By A Complex Between Ubiquitin Conjugating Enzyme Ubc9
  misc_feature (5)..(157): Homolog of NCBI NO: 3212324 NR Description: Human Ubc9
  misc_feature (5)..(157): Homolog of NCBI NO: 2194010 NR Description: Chain A, Human Ubiquitin-Conjugating Enzyme Ubc9
  misc_feature (5)..(158): Homolog of NCBI NO: 30584109 NR Description: Homo sapiens ubiquitin-conjugating enzyme E2I
  misc_feature (5)..(156): Homolog of NCBI NO: 7621708 NR Description: putative E2 enzyme Ubc9 [Dictyostelium discoideum]
  misc_feature (1)..(159): Homolog of NCBI NO: 15230881 NR Description: ubiquitin-conjugating enzyme, putative
  misc_feature (3)..(159): Homolog of NCBI NO: 20975734 NR Description: putative ubiquitin-conjugating enzyme [Populus
  misc_feature (3)..(159): Homolog of NCBI NO: 25446690 NR Description: Putative ubiquitin-conjugating enzyme
  misc_feature (3)..(159): Homolog of NCBI NO: 37536440 NR Description: putative ubiquitin-conjugating enzyme
  misc_feature (1)..(157): Homolog of NCBI NO: 38345867 NR Description: OSJNBa0064M23.9 [Oryza sativa (japonica
MASGGAARGRLAEERKAWRKSHPLGFVAKPAMLPDGSVNLMLWNCVVPGKEGTDWEGGYFPVTLHFTENYPSNPPTCKFPRRFFHVNVYDSGDVCLSILGDAWAPSITVRQILIGIQELLENPNPASPAQDFAYDVFAENMPEYKRRVREQAKRYPSLV

SEQ ID NO: 17970 - protein, 128 aa, Zea mays subsp. mays
  peptide (1)..(128): Ceres Seq. ID no. 13499213
  misc_feature (1)..(126): Homolog of NCBI NO: 4507785 NR Description: ubiquitin-conjugating enzyme E2I (UBC9 homolog,
  misc_feature (1)..(126): Homolog of NCBI NO: 20150955 NR Description: Chain A, Structural Basis For E2-Mediated Sumo Revealed By A Complex Between Ubiquitin Conjugating Enzyme Ubc9
  misc_feature (1)..(126): Homolog of NCBI NO: 2194010 NR Description: Chain A, Human Ubiquitin-Conjugating Enzyme Ubc9
  misc_feature (1)..(127): Homolog of NCBI NO: 30584109 NR Description: Homo sapiens ubiquitin-conjugating enzyme E2I
  misc_feature (1)..(125): Homolog of NCBI NO: 7621708 NR Description: putative E2 enzyme Ubc9 [Dictyostelium discoideum]
  misc_feature (1)..(128): Homolog of NCBI NO: 15230881 NR Description: ubiquitin-conjugating enzyme, putative
  misc_feature (1)..(128): Homolog of NCBI NO: 20975734 NR Description: putative ubiquitin-conjugating enzyme [Populus
  misc_feature (1)..(128): Homolog of NCBI NO: 25446690 NR Description: Putative ubiquitin-conjugating enzyme
  misc_feature (1)..(128): Homolog of NCBI NO: 37536440 NR Description: putative ubiquitin-conjugating enzyme
  misc_feature (1)..(126): Homolog of NCBI NO: 38345867 NR Description: OSJNBa0064M23.9 [Oryza sativa (japonica
MLPDGSVNLMLWNCVVPGKEGTDWEGGYFPVTLHFTENYPSNPPTCKFPRRFFHVNVYDSGDVCLSILGDAWAPSITVRQILIGIQELLENPNPASPAQDFAYDVFAENMPEYKRRVREQAKRYPSLV

SEQ ID NO: 17971 - DNA, 1048 bp, Zea mays subsp. mays
  misc_feature (1)..(1048): Ceres Seq. ID no. 12364326
  misc_feature: MA Experiment ID: 108544 Result: Down-regulated in Transcription
  misc_feature: MA Experiment ID: 108689 Result: Down-regulated in Transcription
  misc_feature: MA Experiment 108689 PARAMETER Experiment Name: Zm_Drought_Roots_P Parameter: Age (day) Value: 9
  misc_feature: MA Experiment 108689 PARAMETER Experiment Name: Zm_Drought_Roots_P Parameter: Organism Value: Zea mays
  misc_feature: MA Experiment 108689 PARAMETER Experiment Name: Zm_Drought_Roots_P Parameter: Plant Line Value: 35A19
  misc_feature: MA Experiment 108689 PARAMETER Experiment Name: Zm_Drought_Roots_P Parameter: Timepoint (hr) Value: 24
  misc_feature: MA Experiment 108689 PARAMETER Experiment Name: Zm_Drought_Roots_P Parameter: Tissue Value: Roots
  misc_feature: MA Experiment 108689 PARAMETER Experiment Name: Zm_Drought_Roots_P Parameter: Treatment Value: Drought vs. No Drought
gcacgagaccattacctagaacatcctaatcgaaaagctctaaactcttcctaccccgctacccgctctctcgttggacgtgacttcggaagttgccggagatgtcgtcgatggccacgaagctcttcaacaccgccgaggtggagtcgtcggacgcgcaagccctagtcgcggacatgcggaaggctatcggcaccatgaagtccctcgccgtagacttcgagagggacggaaagtccgataaggtgaagaagcttgaggagacggttctggagttggtggcttcgtacgaggactgcgcggccatggcccaggcaattaaggcagtacctggagtgtatcagtcatctgatcagccaacggatttcaaaacattgatcggggtggaggctagcaagattagggaagcgtcatcggcatcacaacagaaccacccactctttcggcagttcagggagtctgtctggaatgttcaccatgctggtcagcctatgcctggtgaggaacaggaggacattgtcatgactagcactcagatgagcatcttaaatgtcacatgcccattaactggaaagcctgtgattgaattgatgaatccagttcgctgtgtggattgcaagcatatctatgaaaaggaccctgtaatgcaatatataaggaccaaaaaaccaccgcagtgccctattgcaggctgtcctagggtcctagaaagagggaaggttatctgtgatcccttcctccttattgagatcgaagagctgcgttcatcagagaccgccgctccgaatgccacaaacatagatgactggaccgatctaaatgacgaagacgaggagtgaggaaggcccggtaaaaggataccggcagctgttattgtttaggaggatagggtttagtatgttcttcaggatacactgtcttgttggattctgtaggaggatgggttctagtatgttcaggaatcaggatgcgctcgtcttgttgggttttgcttctgatgacttcgatatgttccatggcaaatgcgactttaaagtttgggagactc

SEQ ID NO: 17972 - protein, 245 aa, Zea mays subsp. mays
  peptide (1)..(245): Ceres Seq. ID no. 12364327
  misc_feature (4)..(243): Homolog of NCBI NO: 30683483 NR Description: expressed protein [Arabidopsis thaliana]
  misc_feature (4)..(243): Homolog of NCBI NO: 11994504 NR Description: emb|CAB09999.1~gene_id:F4B12.6~similar to unknown
MSSMATKLFNTAEVESSDAQALVADMRKAIGTMKSLAVDFERDGKSDKVKKLEETVLELVASYEDCAAMAQAIKAVPGVYQSSDQPTDFKTLIGVEASKIREASSASQQNHPLFRQFRESVWNVHHAGQPMPGEEQEDIVMTSTQMSILNVTCPLTGKPVIELMNPVRCVDCKHIYEKDPVMQYIRTKKPPQCPIAGCPRVLERGKVICDPFLLIEIEELRSSETAAPNATNIDDWTDLNDEDEE

SEQ ID NO: 17973 - protein, 242 aa, Zea mays subsp. mays
  peptide (1)..(242): Ceres Seq. ID no. 12364328
  misc_feature (1)..(240): Homolog of NCBI NO: 30683483 NR Description: expressed protein [Arabidopsis thaliana]
  misc_feature (1)..(240): Homolog of NCBI NO: 11994504 NR Description: emb|CAB09999.1~gene_id:F4B12.6~similar to unknown
MATKLFNTAEVESSDAQALVADMRKAIGTMKSLAVDFERDGKSDKVKKLEETVLELVASYEDCAAMAQAIKAVPGVYQSSDQPTDFKTLIGVEASKIREASSASQQNHPLFRQFRESVWNVHHAGQPMPGEEQEDIVMTSTQMSILNVTCPLTGKPVIELMNPVRCVDCKHIYEKDPVMQYIRTKKPPQCPIAGCPRVLERGKVICDPFLLIEIEELRSSETAAPNATNIDDWTDLNDEDEE

SEQ ID NO: 17974 - protein, 220 aa, Zea mays subsp. mays
  peptide (1)..(220): Ceres Seq. ID no. 12364329
  misc_feature (1)..(218): Homolog of NCBI NO: 30683483 NR Description: expressed protein [Arabidopsis thaliana]
  misc_feature (1)..(218): Homolog of NCBI NO: 11994504 NR Description: emb|CAB09999.1~gene_id:F4B12.6~similar to unknown
MRKAIGTMKSLAVDFERDGKSDKVKKLEETVLELVASYEDCAAMAQAIKAVPGVYQSSDQPTDFKTLIGVEASKIREASSASQQNHPLFRQFRESVWNVHHAGQPMPGEEQEDIVMTSTQMSILNVTCPLTGKPVIELMNPVRCVDCKHIYEKDPVMQYIRTKKPPQCPIAGCPRVLERGKVICDPFLLIEIEELRSSETAAPNATNIDDWTDLNDEDEE

SEQ ID NO: 17975 - DNA, 778 bp, Zea mays subsp. mays
  misc_feature (1)..(778): Ceres Seq. ID no. 12379700
  misc_feature: MA Experiment ID: 108529 Result: Down-regulated in Transcription
  misc_feature: MA Experiment 108529 PARAMETER Experiment Name: Zm_Imbibed_Seeds_P Parameter: Age (day) Value: 5 vs. 2
  misc_feature: MA Experiment 108529 PARAMETER Experiment Name: Zm_Imbibed_Seeds_P Parameter: Organism Value: Zea mays
  misc_feature: MA Experiment 108529 PARAMETER Experiment Name: Zm_Imbibed_Seeds_P Parameter: Plant Line Value: 35A19
  misc_feature: MA Experiment 108529 PARAMETER Experiment Name: Zm_Imbibed_Seeds_P Parameter: Tissue Value: Roots vs. Embryo
  misc_feature: MA Experiment ID: 108535 Result: Up-regulated in Transcription
  misc_feature: MA Experiment 108535 PARAMETER Experiment Name: Zm_Meristem_P Parameter: Age (day) Value: 8
  misc_feature: MA Experiment 108535 PARAMETER Experiment Name: Zm_Meristem_P Parameter: Organism Value: Zea mays
  misc_feature: MA Experiment 108535 PARAMETER Experiment Name: Zm_Meristem_P Parameter: Plant Line Value: 35A19
  misc_feature: MA Experiment 108535 PARAMETER Experiment Name: Zm_Meristem_P Parameter: Tissue Value: Root Meristem vs. Above Root Meristem
  misc_feature: MA Experiment ID: 108544 Result: Down-regulated in Transcription
  misc_feature: MA Experiment ID: 108546 Result: Down-regulated in Transcription
  misc_feature: MA Experiment 108546 PARAMETER Experiment Name: Zm_Imbibed_Seeds_P Parameter: Age (day) Value: 3 vs. 2
  misc_feature: MA Experiment 108546 PARAMETER Experiment Name: Zm_Imbibed_Seeds_P Parameter: Organism Value: Zea mays
  misc_feature: MA Experiment 108546 PARAMETER Experiment Name: Zm_Imbibed_Seeds_P Parameter: Plant Line Value: 35A19
  misc_feature: MA Experiment 108546 PARAMETER Experiment Name: Zm_Imbibed_Seeds_P Parameter: Tissue Value: Roots vs. Embryo
accgcgagccgaaccggagcgtcaagcaaacatccgtcgatcccgattccgaccactgcgctcgcgccatcgcgccatccacccggcattgtgcgcccgagccgggctcgttggatggcgtccggaggcgccgcccgcggtcgccttgctgaggagcgcaaggcgtggcgcaagagccatcccctcggctttgtggccaagccggcgatgctgccggatggttctgtcaatctcatgctctgggactgcgtcgtccccggcaaggaaggcactgattgggaaggtggatatttcccggtcactctccatttcactgaaaattacccaagtaaccccccaacctgcaagttcccacgaaggtttttccatgtcaatgtctatgattctggggatgtatgcctgtcaatacttggtgatgcatgggcgccttctatcacagtgcggcaaattctaataggcatccaggagctgctggagaacccaaacccagcctctcccgcacaggattttgcttacgatgtttttgcagagaatatgccagaatacaagagacgcgtccgtgagcaagccaagaggtatccgtcgctcgtgtagccgtggacctctgcaacacaattgctgctaaccaagtagtcactcactttggtgtagtggaacttgttcatgacgtgcttaactatggtgtctagttagccgtacgcttgttggaactgctaaagtgcagcttattggaactgctaaaatgcccttgactacgtcttattattatggtttatct

SEQ ID NO: 17976 - protein, 197 aa, Zea mays subsp. mays
  peptide (1)..(197): Ceres Seq. ID no. 12379701
  misc_feature (43)..(195): Homolog of NCBI NO: 20150955 NR Description: Chain A, Structural Basis For E2-Mediated Sumo Revealed By A Complex Between Ubiquitin Conjugating Enzyme Ubc9
  misc_feature (43)..(195): Homolog of NCBI NO: 4507785 NR Description: ubiquitin-conjugating enzyme E2I (UBC9 homolog,
  misc_feature (43)..(195): Homolog of NCBI NO: 3212324 NR Description: Human Ubc9
  misc_feature (43)..(195): Homolog of NCBI NO: 2194010 NR Description: Chain A, Human Ubiquitin-Conjugating Enzyme Ubc9
  misc_feature (43)..(196): Homolog of NCBI NO: 30584109 NR Description: Homo sapiens ubiquitin-conjugating enzyme E2I
  misc_feature (39)..(197): Homolog of NCBI NO: 15230881 NR Description: E2 ubiquitin-conjugating-like enzyme, Ahus5
  misc_feature (41)..(197): Homolog of NCBI NO: 20975734 NR Description: putative ubiquitin-conjugating enzyme [Populus
  misc_feature (41)..(197): Homolog of NCBI NO: 25446690 NR Description: Putative ubiquitin-conjugating enzyme
  misc_feature (41)..(197): Homolog of NCBI NO: 37536440 NR Description: putative ubiquitin-conjugating enzyme
  misc_feature (39)..(195): Homolog of NCBI NO: 38345867 NR Description: OSJNBa0064M23.9 [Oryza sativa (japonica
TASRTGASSKHPSIPIPTTALAPSRHPPGIVRPSRARWMASGGAARGRLAEERKAWRKSHPLGFVAKPAMLPDGSVNLMLWDCVVPGKEGTDWEGGYFPVTLHFTENYPSNPPTCKFPRRFFHVNVYDSGDVCLSILGDAWAPSITVRQILIGIQELLENPNPASPAQDFAYDVFAENMPEYKRRVREQAKRYPSLV

SEQ ID NO: 17977 - protein, 159 aa, Zea mays subsp. mays
  peptide (1)..(159): Ceres Seq. ID no. 12379702
  misc_feature (5)..(157): Homolog of NCBI NO: 3212324 NR Description: Human Ubc9
  misc_feature (5)..(157): Homolog of NCBI NO: 4507785 NR Description: ubiquitin-conjugating enzyme E2I (UBC9 homolog,
  misc_feature (5)..(157): Homolog of NCBI NO: 20150955 NR Description: Chain A, Structural Basis For E2-Mediated Sumo Revealed By A Complex Between Ubiquitin Conjugating Enzyme Ubc9
  misc_feature (5)..(157): Homolog of NCBI NO: 2194010 NR Description: Chain A, Human Ubiquitin-Conjugating Enzyme Ubc9
  misc_feature (5)..(158): Homolog of NCBI NO: 30584109 NR Description: Homo sapiens ubiquitin-conjugating enzyme E2I
  misc_feature (1)..(159): Homolog of NCBI NO: 15230881 NR Description: E2 ubiquitin-conjugating-like enzyme, Ahus5
  misc_feature (3)..(159): Homolog of NCBI NO: 20975734 NR Description: putative ubiquitin-conjugating enzyme [Populus
  misc_feature (3)..(159): Homolog of NCBI NO: 25446690 NR Description: Putative ubiquitin-conjugating enzyme
  misc_feature (3)..(159): Homolog of NCBI NO: 37536440 NR Description: putative ubiquitin-conjugating enzyme
  misc_feature (1)..(157): Homolog of NCBI NO: 38345867 NR Description: OSJNBa0064M23.9 [Oryza sativa (japonica
MASGGAARGRLAEERKAWRKSHPLGFVAKPAMLPDGSVNLMLWDCVVPGKEGTDWEGGYFPVTLHFTENYPSNPPTCKFPRRFFHVNVYDSGDVCLSILGDAWAPSITVRQILIGIQELLENPNPASPAQDFAYDVFAENMPEYKRRVREQAKRYPSLV

SEQ ID NO: 17978 - protein, 150 aa, Zea mays subsp. mays
  peptide (1)..(150): Ceres Seq. ID no. 12379703
PRAEPERQANIRRSRFRPLRSRHRAIHPALCARAGLVGWRPEAPPAVALLRSARRGARAIPSALWPSRRCCRMVLSISCSGTASSPARKALIGKVDISRSLSISLKITQVTPQPASSHEGFSMSMSMILGMYACQYLVMHGRLLSQCGKF

SEQ ID NO: 17979 - DNA, 1436 bp, Zea mays subsp. mays
  misc_feature (1)..(1436): Ceres Seq. ID no. 12382811
  misc_feature: MA Experiment ID: 108504 Result: Down-regulated in Transcription
  misc_feature: MA Experiment 108504 PARAMETER Experiment Name: Zm_Drought_P Parameter: Age (day) Value: 8
  misc_feature: MA Experiment 108504 PARAMETER Experiment Name: Zm_Drought_P Parameter: Organism Value: Zea mays
  misc_feature: MA Experiment 108504 PARAMETER Experiment Name: Zm_Drought_P Parameter: Plant Line Value: 35A19
  misc_feature: MA Experiment 108504 PARAMETER Experiment Name: Zm_Drought_P Parameter: Timepoint (hr) Value: 12
  misc_feature: MA Experiment 108504 PARAMETER Experiment Name: Zm_Drought_P Parameter: Tissue Value: Aerial
  misc_feature: MA Experiment 108504 PARAMETER Experiment Name: Zm_Drought_P Parameter: Treatment Value: Drought vs. No Drought
  misc_feature: MA Experiment ID: 108535 Result: Up-regulated in Transcription
  misc_feature: MA Experiment 108535 PARAMETER Experiment Name: Zm_Meristem_P Parameter: Age (day) Value: 8
  misc_feature: MA Experiment 108535 PARAMETER Experiment Name: Zm_Meristem_P Parameter: Organism Value: Zea mays
  misc_feature: MA Experiment 108535 PARAMETER Experiment Name: Zm_Meristem_P Parameter: Plant Line Value: 35A19
  misc_feature: MA Experiment 108535 PARAMETER Experiment Name: Zm_Meristem_P Parameter: Tissue Value: Root Meristem vs. Above Root Meristem
  misc_feature: MA Experiment ID: 108545 Result: Up-regulated in Transcription
  misc_feature: MA Experiment 108545 PARAMETER Experiment Name: Zm_Imbibed_Seeds_P Parameter: Age (day) Value: 3 vs. 2
  misc_feature: MA Experiment 108545 PARAMETER Experiment Name: Zm_Imbibed_Seeds_P Parameter: Organism Value: Zea mays
  misc_feature: MA Experiment 108545 PARAMETER Experiment Name: Zm_Imbibed_Seeds_P Parameter: Plant Line Value: 35A19
  misc_feature: MA Experiment 108545 PARAMETER Experiment Name: Zm_Imbibed_Seeds_P Parameter: Tissue Value: Aerial vs. Embryo
  misc_feature: MA Experiment ID: 108546 Result: Down-regulated in Transcription
  misc_feature: MA Experiment 108546 PARAMETER Experiment Name: Zm_Imbibed_Seeds_P Parameter: Age (day) Value: 3 vs. 2
  misc_feature: MA Experiment 108546 PARAMETER Experiment Name: Zm_Imbibed_Seeds_P Parameter: Organism Value: Zea mays
  misc_feature: MA Experiment 108546 PARAMETER Experiment Name: Zm_Imbibed_Seeds_P Parameter: Plant Line Value: 35A19
  misc_feature: MA Experiment 108546 PARAMETER Experiment Name: Zm_Imbibed_Seeds_P Parameter: Tissue Value: Roots vs. Embryo
  misc_feature: MA Experiment ID: 108556 Result: Down-regulated in Transcription
  misc_feature: MA Experiment 108556 PARAMETER Experiment Name: Zm_Drought_P Parameter: Age (day) Value: 9
  misc_feature: MA Experiment 108556 PARAMETER Experiment Name: Zm_Drought_P Parameter: Organism Value: Zea mays
  misc_feature: MA Experiment 108556 PARAMETER Experiment Name: Zm_Drought_P Parameter: Plant Line Value: 35A19
  misc_feature: MA Experiment 108556 PARAMETER Experiment Name: Zm_Drought_P Parameter: Timepoint (hr) Value: 24
  misc_feature: MA Experiment 108556 PARAMETER Experiment Name: Zm_Drought_P Parameter: Tissue Value: Aerial
  misc_feature: MA Experiment 108556 PARAMETER Experiment Name: Zm_Drought_P Parameter: Treatment Value: Drought vs. No Drought
  misc_feature: MA Experiment ID: 108597 Result: Down-regulated in Transcription
  misc_feature: MA Experiment 108597 PARAMETER Experiment Name: Zm_100uM_ABA_P Parameter: Age (day) Value: 9
  misc_feature: MA Experiment 108597 PARAMETER Experiment Name: Zm_100uM_ABA_P Parameter: Organism Value: Zea mays
  misc_feature: MA Experiment 108597 PARAMETER Experiment Name: Zm_100uM_ABA_P Parameter: Plant Line Value: 35A19
  misc_feature: MA Experiment 108597 PARAMETER Experiment Name: Zm_100uM_ABA_P Parameter: Timepoint (hr) Value: 24
  misc_feature: MA Experiment 108597 PARAMETER Experiment Name: Zm_100uM_ABA_P Parameter: Tissue Value: Aerial
  misc_feature: MA Experiment 108597 PARAMETER Experiment Name: Zm_100uM_ABA_P Parameter: Treatment Value: 100uM ABA vs. No Treatment
  misc_feature: MA Experiment ID: 108687 Result: Down-regulated in Transcription
  misc_feature: MA Experiment 108687 PARAMETER Experiment Name: Zm_Embryos-Flowers__P Parameter: Tissue Value: Embryo vs. Aerial+
  misc_feature: MA Experiment ID: 108689 Result: Down-regulated in Transcription
  misc_feature: MA Experiment 108689 PARAMETER Experiment Name: Zm_Drought_Roots_P Parameter: Age (day) Value: 9
  misc_feature: MA Experiment 108689 PARAMETER Experiment Name: Zm_Drought_Roots_P Parameter: Organism Value: Zea mays
  misc_feature: MA Experiment 108689 PARAMETER Experiment Name: Zm_Drought_Roots_P Parameter: Plant Line Value: 35A19
  misc_feature: MA Experiment 108689 PARAMETER Experiment Name: Zm_Drought_Roots_P Parameter: Timepoint (hr) Value: 24
  misc_feature: MA Experiment 108689 PARAMETER Experiment Name: Zm_Drought_Roots_P Parameter: Tissue Value: Roots
  misc_feature: MA Experiment 108689 PARAMETER Experiment Name: Zm_Drought_Roots_P Parameter: Treatment Value: Drought vs. No Drought
  misc_feature: MA Experiment ID: 20000477 Result: Down-regulated in Transcription
  misc_feature: MA Experiment 20000477 PARAMETER Experiment Name: Zm_5mM_SA_P Parameter: Age (day) Value: 10
  misc_feature: MA Experiment 20000477 PARAMETER Experiment Name: Zm_5mM_SA_P Parameter: Organism Value: Zea mays
  misc_feature: MA Experiment 20000477 PARAMETER Experiment Name: Zm_5mM_SA_P Parameter: Plant Line Value: 35A19
  misc_feature: MA Experiment 20000477 PARAMETER Experiment Name: Zm_5mM_SA_P Parameter: Timepoint (hr) Value: 48
  misc_feature: MA Experiment 20000477 PARAMETER Experiment Name: Zm_5mM_SA_P Parameter: Tissue Value: Aerial
  misc_feature: MA Experiment 20000477 PARAMETER Experiment Name: Zm_5mM_SA_P Parameter: Treatment Value: 5mM SA vs. No Treatment
  misc_feature: MA Experiment ID: 20000478 Result: Down-regulated in Transcription
  misc_feature: MA Experiment 20000478 PARAMETER Experiment Name: Zm_5mM_SA_P Parameter: Age (day) Value: 11
  misc_feature: MA Experiment 20000478 PARAMETER Experiment Name: Zm_5mM_SA_P Parameter: Organism Value: Zea mays
  misc_feature: MA Experiment 20000478 PARAMETER Experiment Name: Zm_5mM_SA_P Parameter: Plant Line Value: 35A19
  misc_feature: MA Experiment 20000478 PARAMETER Experiment Name: Zm_5mM_SA_P Parameter: Timepoint (hr) Value: 72
  misc_feature: MA Experiment 20000478 PARAMETER Experiment Name: Zm_5mM_SA_P Parameter: Tissue Value: Aerial
  misc_feature: MA Experiment 20000478 PARAMETER Experiment Name: Zm_5mM_SA_P Parameter: Treatment Value: 5mM SA vs. No Treatment
  misc_feature: MA Experiment ID: 20000479 Result: Down-regulated in Transcription
  misc_feature: MA Experiment 20000479 PARAMETER Experiment Name: Zm_Drought_P Parameter: Age (day) Value: 10
  misc_feature: MA Experiment 20000479 PARAMETER Experiment Name: Zm_Drought_P Parameter: Organism Value: Zea mays
  misc_feature: MA Experiment 20000479 PARAMETER Experiment Name: Zm_Drought_P Parameter: Plant Line Value: 35A19
  misc_feature: MA Experiment 20000479 PARAMETER Experiment Name: Zm_Drought_P Parameter: Timepoint (hr) Value: 48
  misc_feature: MA Experiment 20000479 PARAMETER Experiment Name: Zm_Drought_P Parameter: Tissue Value: Aerial
  misc_feature: MA Experiment 20000479 PARAMETER Experiment Name: Zm_Drought_P Parameter: Treatment Value: Drought vs. No Drought
  misc_feature: MA Experiment ID: 20000480 Result: Down-regulated in Transcription
  misc_feature: MA Experiment 20000480 PARAMETER Experiment Name: Zm_Drought_P Parameter: Age (day) Value: 11
  misc_feature: MA Experiment 20000480 PARAMETER Experiment Name: Zm_Drought_P Parameter: Organism Value: Zea mays
  misc_feature: MA Experiment 20000480 PARAMETER Experiment Name: Zm_Drought_P Parameter: Plant Line Value: 35A19
  misc_feature: MA Experiment 20000480 PARAMETER Experiment Name: Zm_Drought_P Parameter: Timepoint (hr) Value: 72
  misc_feature: MA Experiment 20000480 PARAMETER Experiment Name: Zm_Drought_P Parameter: Tissue Value: Aerial
  misc_feature: MA Experiment 20000480 PARAMETER Experiment Name: Zm_Drought_P Parameter: Treatment Value: Drought vs. No Drought
  misc_feature: MA Experiment ID: 20000492 Result: Up-regulated in Transcription
  misc_feature: MA Experiment 20000492 PARAMETER Experiment Name: Zm_Hybrid_Seed_Dev_P Parameter: DAP Value: 12
  misc_feature: MA Experiment 20000492 PARAMETER Experiment Name: Zm_Hybrid_Seed_Dev_P Parameter: Organism Value: Zea mays
  misc_feature: MA Experiment 20000492 PARAMETER Experiment Name: Zm_Hybrid_Seed_Dev_P Parameter: Plant Line Value: 35A19
  misc_feature: MA Experiment 20000492 PARAMETER Experiment Name: Zm_Hybrid_Seed_Dev_P Parameter: Tissue Value: Fert Kernel vs. Unfert Floret
  misc_feature: MA Experiment ID: 20000535 Result: Up-regulated in Transcription
  misc_feature: MA Experiment 20000535 PARAMETER Experiment Name: Zm_Hybrid_Seed_Dev_P Parameter: DAP Value: 30 vs. 12
  misc_feature: MA Experiment 20000535 PARAMETER Experiment Name: Zm_Hybrid_Seed_Dev_P Parameter: Organism Value: Zea mays
  misc_feature: MA Experiment 20000535 PARAMETER Experiment Name: Zm_Hybrid_Seed_Dev_P Parameter: Plant Line Value: 35A19
  misc_feature: MA Experiment 20000535 PARAMETER Experiment Name: Zm_Hybrid_Seed_Dev_P Parameter: Tissue Value: Embryo vs. Unfert Floret
  misc_feature: MA Experiment ID: 20000632 Result: Down-regulated in Transcription
  misc_feature: MA Experiment 20000632 PARAMETER Experiment Name: Zm_Herbicide-Treatments_P Parameter: Timepoint (hr) Value: 4
  misc_feature: MA Experiment 20000632 PARAMETER Experiment Name: Zm_Herbicide-Treatments_P Parameter: Tissue Value: Aerial
  misc_feature: MA Experiment 20000632 PARAMETER Experiment Name: Zm_Herbicide-Treatments_P Parameter: Treatment Value: Glean vs. No Treatment
acgccaagcgcgcaattaaccctcactaaagggaacaaaagctggagctccaccgcggtggcggccgctctagaactagtggatcccccgggctgcaggaattcgcacgagaccattacctagaacatcctaatcgaaaaaccgggctgaggaggccatcggacgcacaaggacagcagagtgcaggaccggagcggagcgaccgagagtgtgtgggagagagatggcgtccagcgcctcgtctaccctgccgctgccaacgctctcgctcgccgtgatcctgctcgcgctgtgcgcccgcggcggcgaggccaggccgccaccgccgctccacggcgtgcgcccgctcgccttcgacgaggggtacacccagatcttcggcagcgccaacctcgcgctcctccgcgacggtaggcgcgtccgcctcacgctcgacgagtccaccggagccgggttcgcgtcgcaggacgtcttcctccacggtttcttcagcgccgccatcaagctgcccgccgactacgcggcgggcgtcgtcgtcgcgttctacctgtcgaacggcgacgtgtacgagaagacgcacgacgagctggacttcgagttcctgggcaacgtgcggggccgcgagtggcgggtgcagaccaacgtgtacggcaacggcagcaccgacgccggccgggaggagcgctacgacctcccattcgaccccaccgacgacttccaccactactccatcctctggaccagcgaccgcatcactttctacgtcgacgagaccccgatccaggaggtggtgcggacggcggccatgggcgcggcgttcccgtccaagcccatgtccctgtacgccacgatctgggacggctccgcgtgggccacgctgggcggccggtaccgcgtcaactacaagtacgcgccgttcgtggccgagttcgccgacctcgccatccagggcttcgccgtcgaccccgccgccgaccacgccgtggcgtcgtgcggcgcgggcctgggcctgggcctgggcccgggcccgctcgccgtgtccgcggagcagcgctcggccatggcggcgttccggcgcgcccacacctcctactcctactgccacgaccggcggcggtaccccgtcgcgctgtcggagtgcggggccggcgcggggctcctccccggccgcatgtttggccccgacgggatgaagcagcaccggcgccacctggggcgcggcgcgcggccaccgcggcggcgcccaggacgacgacgtcatgtgatcgccggtccctggcccctcgccacgtcgcggcggcggggcggggatggttgcacgctgtggattggattggattggattgggttgggggggttgggcggggattgtccgggatggaaaagctcgcctcattgtaccattcgcgccatggaagtaggtcgtgtttattgcc

SEQ ID NO: 17980 - protein, 404 aa, Zea mays subsp. mays
  peptide (1)..(404): Ceres Seq. ID no. 12382812
  misc_feature (44)..(229): Pfam Name: Glycosyl hydrolases family 16 Pfam Description: Glycosyl hydrolases family 16
  misc_feature (43)..(306): Homolog of NCBI NO: 15226364 NR Description: xyloglucan endotransglycosylase (EXGT-A3)
  misc_feature (43)..(306): Homolog of NCBI NO: 5533313 NR Description: endoxyloglucan transferase [Arabidopsis thaliana]
  misc_feature (18)..(336): Homolog of NCBI NO: 2129774 NR Description: xyloglucan endo-1,4-beta-D-glucanase (EC 3.2.1.-)
  misc_feature (14)..(161): Homolog of NCBI NO: 37530588 NR Description: putative xyloglucan endo-transglycosylase
  misc_feature (42)..(343): Homolog of NCBI NO: 13560781 NR Description: endoxyloglucan transferase [Daucus carota]
  misc_feature (43)..(306): Homolog of NCBI NO: 21553969 NR Description: putative xyloglucan-specific glucanase
  misc_feature (179)..(341): Homolog of NCBI NO: 37530588 NR Description: putative xyloglucan endo-transglycosylase
  misc_feature (43)..(335): Homolog of NCBI NO: 6681351 NR Description: ETAG-A3 [Lycopersicon esculentum]
  misc_feature (18)..(336): Homolog of NCBI NO: 15222593 NR Description: xyloglucan endotransglycosylase (XTR4), putative
  misc_feature (42)..(306): Homolog of NCBI NO: 15223878 NR Description: xyloglucan endotransglycosylase (XTR2)
MASSASSTLPLPTLSLAVILLALCARGGEARPPPPLHGVRPLAFDEGYTQIFGSANLALLRDGRRVRLTLDESTGAGFASQDVFLHGFFSAAIKLPADYAAGVVVAFYLSNGDVYEKTHDELDFEFLGNVRGREWRVQTNVYGNGSTDAGREERYDLPFDPTDDFHHYSILWTSDRITFYVDETPIQEVVRTAAMGAAFPSKPMSLYATIWDGSAWATLGGRYRVNYKYAPFVAEFADLAIQGFAVDPAADHAVASCGAGLGLGLGPGPLAVSAEQRSAMAAFRRAHTSYSYCHDRRRYPVALSECGAGAGLLPGRMFGPDGMKQHRRHLGRGARPPRRRPGRRRHVIAGPWPLATSRRRGGDGCTLWIGLDWIGLGGLGGDCPGWKSSPHCTIRAMEVGRVYC

SEQ ID NO: 17981 - protein, 210 aa, Zea mays subsp. mays
  peptide (1)..(210): Ceres Seq. ID no. 12382813
  misc_feature (1)..(142): Homolog of NCBI NO: 21618261 NR Description: endoxyloglucan transferase, putative [Arabidopsis
  misc_feature (1)..(142): Homolog of NCBI NO: 15222593 NR Description: xyloglucan endotransglycosylase (XTR4), putative
  misc_feature (1)..(142): Homolog of NCBI NO: 2129774 NR Description: xyloglucan endo-1,4-beta-D-glucanase (EC 3.2.1.-)
  misc_feature (1)..(141): Homolog of NCBI NO: 6681351 NR Description: ETAG-A3 [Lycopersicon esculentum]
  misc_feature (1)..(147): Homolog of NCBI NO: 37530588 NR Description: putative xyloglucan endo-transglycosylase
  misc_feature (1)..(149): Homolog of NCBI NO: 13560781 NR Description: endoxyloglucan transferase [Daucus carota]
  misc_feature (1)..(112): Homolog of NCBI NO: 21553969 NR Description: putative xyloglucan-specific glucanase
  misc_feature (1)..(112): Homolog of NCBI NO: 15226364 NR Description: xyloglucan endotransglycosylase (EXGT-A3)
  misc_feature (1)..(112): Homolog of NCBI NO: 5533313 NR Description: endoxyloglucan transferase [Arabidopsis thaliana]
  misc_feature (1)..(112): Homolog of NCBI NO: 15223878 NR Description: xyloglucan endotransglycosylase (XTR2)
MGAAFPSKPMSLYATIWDGSAWATLGGRYRVNYKYAPFVAEFADLAIQGFAVDPAADHAVASCGAGLGLGLGPGPLAVSAEQRSAMAAFRRAHTSYSYCHDRRRYPVALSECGAGAGLLPGRMFGPDGMKQHRRHLGRGARPPRRRPGRRRHVIAGPWPLATSRRRGGDGCTLWIGLDWIGLGGLGGDCPGWKSSPHCTIRAMEVGRVYC

SEQ ID NO: 17982 - DNA, 1022 bp, Zea mays subsp. mays
  misc_feature (1)..(1022): Ceres Seq. ID no. 12416675
  misc_feature: MA Experiment ID: 108522 Result: Down-regulated in Transcription
  misc_feature: MA Experiment 108522 PARAMETER Experiment Name: Zm_42deg_Heat_P Parameter: Age (day) Value: 8
  misc_feature: MA Experiment 108522 PARAMETER Experiment Name: Zm_42deg_Heat_P Parameter: Organism Value: Zea mays
  misc_feature: MA Experiment 108522 PARAMETER Experiment Name: Zm_42deg_Heat_P Parameter: Plant Line Value: 35A19
  misc_feature: MA Experiment 108522 PARAMETER Experiment Name: Zm_42deg_Heat_P Parameter: Temperature (deg C) Value: 42 vs. 22
  misc_feature: MA Experiment 108522 PARAMETER Experiment Name: Zm_42deg_Heat_P Parameter: Timepoint (hr) Value: 1
  misc_feature: MA Experiment 108522 PARAMETER Experiment Name: Zm_42deg_Heat_P Parameter: Tissue Value: Aerial
  misc_feature: MA Experiment ID: 108523 Result: Down-regulated in Transcription
  misc_feature: MA Experiment 108523 PARAMETER Experiment Name: Zm_42deg_Heat_P Parameter: Age (day) Value: 8
  misc_feature: MA Experiment 108523 PARAMETER Experiment Name: Zm_42deg_Heat_P Parameter: Organism Value: Zea mays
  misc_feature: MA Experiment 108523 PARAMETER Experiment Name: Zm_42deg_Heat_P Parameter: Plant Line Value: 35A19
  misc_feature: MA Experiment 108523 PARAMETER Experiment Name: Zm_42deg_Heat_P Parameter: Temperature (deg C) Value: 42 vs. 22
  misc_feature: MA Experiment 108523 PARAMETER Experiment Name: Zm_42deg_Heat_P Parameter: Timepoint (hr) Value: 6
  misc_feature: MA Experiment 108523 PARAMETER Experiment Name: Zm_42deg_Heat_P Parameter: Tissue Value: Aerial
  misc_feature: MA Experiment ID: 108528 Result: Up-regulated in Transcription
  misc_feature: MA Experiment 108528 PARAMETER Experiment Name: Zm_Imbibed_Seeds_P Parameter: Age (day) Value: 5 vs. 2
  misc_feature: MA Experiment 108528 PARAMETER Experiment Name: Zm_Imbibed_Seeds_P Parameter: Organism Value: Zea mays
  misc_feature: MA Experiment 108528 PARAMETER Experiment Name: Zm_Imbibed_Seeds_P Parameter: Plant Line Value: 35A19
  misc_feature: MA Experiment 108528 PARAMETER Experiment Name: Zm_Imbibed_Seeds_P Parameter: Tissue Value: Aerial vs. Embryo
  misc_feature: MA Experiment ID: 108530 Result: Up-regulated in Transcription
  misc_feature: MA Experiment 108530 PARAMETER Experiment Name: Zm_Imbibed_Seeds_P Parameter: Age (day) Value: 6 vs. 2
  misc_feature: MA Experiment 108530 PARAMETER Experiment Name: Zm_Imbibed_Seeds_P Parameter: Organism Value: Zea mays
  misc_feature: MA Experiment 108530 PARAMETER Experiment Name: Zm_Imbibed_Seeds_P Parameter: Plant Line Value: 35A19
  misc_feature: MA Experiment 108530 PARAMETER Experiment Name: Zm_Imbibed_Seeds_P Parameter: Tissue Value: Aerial vs. Embryo
  misc_feature: MA Experiment ID: 108533 Result: Down-regulated in Transcription
  misc_feature: MA Experiment 108533 PARAMETER Experiment Name: Zm_4deg_Cold_P Parameter: Age (hr) Value: 8
  misc_feature: MA Experiment 108533 PARAMETER Experiment Name: Zm_4deg_Cold_P Parameter: Organism Value: Zea mays
  misc_feature: MA Experiment 108533 PARAMETER Experiment Name: Zm_4deg_Cold_P Parameter: Plant Line Value: 35A19
  misc_feature: MA Experiment 108533 PARAMETER Experiment Name: Zm_4deg_Cold_P Parameter: Temperature (deg C) Value: 4 vs. 22
  misc_feature: MA Experiment 108533 PARAMETER Experiment Name: Zm_4deg_Cold_P Parameter: Timepoint (hr) Value: 1
  misc_feature: MA Experiment 108533 PARAMETER Experiment Name: Zm_4deg_Cold_P Parameter: Tissue Value: Aerial
  misc_feature: MA Experiment ID: 108545 Result: Up-regulated in Transcription
  misc_feature: MA Experiment 108545 PARAMETER Experiment Name: Zm_Imbibed_Seeds_P Parameter: Age (day) Value: 3 vs. 2
  misc_feature: MA Experiment 108545 PARAMETER Experiment Name: Zm_Imbibed_Seeds_P Parameter: Organism Value: Zea mays
  misc_feature: MA Experiment 108545 PARAMETER Experiment Name: Zm_Imbibed_Seeds_P Parameter: Plant Line Value: 35A19
  misc_feature: MA Experiment 108545 PARAMETER Experiment Name: Zm_Imbibed_Seeds_P Parameter: Tissue Value: Aerial vs. Embryo
  misc_feature: MA Experiment ID: 108547 Result: Up-regulated in Transcription
  misc_feature: MA Experiment 108547 PARAMETER Experiment Name: Zm_Imbibed_Seeds_P Parameter: Age (day) Value: 4 vs. 2
  misc_feature: MA Experiment 108547 PARAMETER Experiment Name: Zm_Imbibed_Seeds_P Parameter: Organism Value: Zea mays
  misc_feature: MA Experiment 108547 PARAMETER Experiment Name: Zm_Imbibed_Seeds_P Parameter: Plant Line Value: 35A19
  misc_feature: MA Experiment 108547 PARAMETER Experiment Name: Zm_Imbibed_Seeds_P Parameter: Tissue Value: Aerial vs. Embryo
  misc_feature: MA Experiment ID: 20000478 Result: Down-regulated in Transcription
  misc_feature: MA Experiment 20000478 PARAMETER Experiment Name: Zm_5mM_SA_P Parameter: Age (day) Value: 11
  misc_feature: MA Experiment 20000478 PARAMETER Experiment Name: Zm_5mM_SA_P Parameter: Organism Value: Zea mays
  misc_feature: MA Experiment 20000478 PARAMETER Experiment Name: Zm_5mM_SA_P Parameter: Plant Line Value: 35A19
  misc_feature: MA Experiment 20000478 PARAMETER Experiment Name: Zm_5mM_SA_P Parameter: Timepoint (hr) Value: 72
  misc_feature: MA Experiment 20000478 PARAMETER Experiment Name: Zm_5mM_SA_P Parameter: Tissue Value: Aerial
  misc_feature: MA Experiment 20000478 PARAMETER Experiment Name: Zm_5mM_SA_P Parameter: Treatment Value: 5mM SA vs. No Treatment
  misc_feature: MA Experiment ID: 20000480 Result: Down-regulated in Transcription
  misc_feature: MA Experiment 20000480 PARAMETER Experiment Name: Zm_Drought_P Parameter: Age (day) Value: 11
  misc_feature: MA Experiment 20000480 PARAMETER Experiment Name: Zm_Drought_P Parameter: Organism Value: Zea mays
  misc_feature: MA Experiment 20000480 PARAMETER Experiment Name: Zm_Drought_P Parameter: Plant Line Value: 35A19
  misc_feature: MA Experiment 20000480 PARAMETER Experiment Name: Zm_Drought_P Parameter: Timepoint (hr) Value: 72
  misc_feature: MA Experiment 20000480 PARAMETER Experiment Name: Zm_Drought_P Parameter: Tissue Value: Aerial
  misc_feature: MA Experiment 20000480 PARAMETER Experiment Name: Zm_Drought_P Parameter: Treatment Value: Drought vs. No Drought
  misc_feature: MA Experiment ID: 20000492 Result: Down-regulated in Transcription
  misc_feature: MA Experiment 20000492 PARAMETER Experiment Name: Zm_Hybrid_Seed_Dev_P Parameter: DAP Value: 12
  misc_feature: MA Experiment 20000492 PARAMETER Experiment Name: Zm_Hybrid_Seed_Dev_P Parameter: Organism Value: Zea mays
  misc_feature: MA Experiment 20000492 PARAMETER Experiment Name: Zm_Hybrid_Seed_Dev_P Parameter: Plant Line Value: 35A19
  misc_feature: MA Experiment 20000492 PARAMETER Experiment Name: Zm_Hybrid_Seed_Dev_P Parameter: Tissue Value: Fert Kernel vs. Unfert Floret
  misc_feature: MA Experiment ID: 20000535 Result: Down-regulated in Transcription
  misc_feature: MA Experiment 20000535 PARAMETER Experiment Name: Zm_Hybrid_Seed_Dev_P Parameter: DAP Value: 30 vs. 12
  misc_feature: MA Experiment 20000535 PARAMETER Experiment Name: Zm_Hybrid_Seed_Dev_P Parameter: Organism Value: Zea mays
  misc_feature: MA Experiment 20000535 PARAMETER Experiment Name: Zm_Hybrid_Seed_Dev_P Parameter: Plant Line Value: 35A19
  misc_feature: MA Experiment 20000535 PARAMETER Experiment Name: Zm_Hybrid_Seed_Dev_P Parameter: Tissue Value: Embryo vs. Unfert Floret
agagaaaagtaataagaccgtgctgcgcctgcgctgcgcagctccagcaccacagcaccagagctcgatcgacctccctctccaatgccgtctttcatcgacggccccactttccgggcgctgctccggccgtccaccaacgggcgccggaccaagatctcggacagcggcggcggcggcgggggcatcttcaagatgttcaagctcatgcccatgctctcgtccgggtgcaagatggtggcgctgctgggcaagcacaacaaccgggcgctgctggccgaccacgcgacgacggtgacgctgttcgggccgcgccggggccgcgtgagcctggccatccacgaggacacgcgcgcgccgccgctgttcctcatcgagctgcccatgctgacgagcgcgctgcaccgggagatctcgtccggggcgctcaagctggcgctggagagcgacacccgcagcgcgcgccgccgcctcgtggaggagtacgtctgggccgtctactgcaacggccgcaaggccggatactccatccgcaggaaggaggcctccgacgacgagcgccacgtgctgcgcctcctgcgcggcgtgtccatgggcgccggcgtgctcccggccgcccccgagaaggagggcggcgtgcccgcggggcccgacggggagctcacgtacgtgcgcgcccgcgtcgagcgcgtcgtcggatccaaggactcggaggccttctacatgatcaaccccgaggagggcgggaacggcgccgataataacgggggcggtggaggcgccggcggcgcgccggagctgagcattttcctagtaaggatgaaatgaataaaccgtcatattattactgctacagcataaatatataaatataatagggtgctatattgttttttacacacacccttgtgccttgtttgcacacagcagatgtgttctatgaaactgtccatagatcgagtttgtaatctaactgatgtatatctccatgttagataattgattttgtgaatcgtgctgag

SEQ ID NO: 17983 - protein, 252 aa, Zea mays subsp. mays
  peptide (1)..(252): Ceres Seq. ID no. 12416676
  misc_feature (102)..(252): Pfam Name: HlyD family secretion protein Pfam Description: HlyD family secretion protein
RKVIRPCCACAAQLQHHSTRARSTSLSNAVFHRRPHFPGAAPAVHQRAPDQDLGQRRRRRGHLQDVQAHAHALVRVQDGGAAGQAQQPGAAGRPRDDGDAVRAAPGPREPGHPRGHARAAAVPHRAAHADERAAPGDLVRGAQAGAGERHPQRAPPPRGGVRLGRLLQRPQGRILHPQEGGLRRRAPRAAPPARRVHGRRRAPGRPREGGRRARGARRGAHVRARPRRARRRIQGLGGLLHDQPRGGRERRR

SEQ ID NO: 17984 - protein, 247 aa, Zea mays subsp. mays
  peptide (1)..(247): Ceres Seq. ID no. 12416677
  misc_feature (68)..(225): Pfam Name: Protein of unknown function, DUF617 Pfam Description: Protein of unknown function, DUF617
  misc_feature (72)..(246): Homolog of NCBI NO: 11994755 NR Description: gb|AAB84348.1~gene_id:T5M7.9~similar to unknown
  misc_feature (1)..(246): Homolog of NCBI NO: 15240220 NR Description: putative protein; protein id: At5g06990.1
  misc_feature (16)..(122): Homolog of NCBI NO: 15237221 NR Description: putative protein; protein id: At5g23100.1
  misc_feature (123)..(246): Homolog of NCBI NO: 15237221 NR Description: putative protein; protein id: At5g23100.1
  misc_feature (1)..(225): Homolog of NCBI NO: 15227126 NR Description: hypothetical protein; protein id: At2g21990.1
  misc_feature (1)..(225): Homolog of NCBI NO: 21618123 NR Description: unknown [Arabidopsis thaliana]
  misc_feature (1)..(246): Homolog of NCBI NO: 15235158 NR Description: putative protein
  misc_feature (53)..(122): Homolog of NCBI NO: 34911646 NR Description: P0039G05.26 [Oryza sativa (japonica
  misc_feature (121)..(246): Homolog of NCBI NO: 34911646 NR Description: P0039G05.26 [Oryza sativa (japonica
  misc_feature (2)..(225): Homolog of NCBI NO: 15239035 NR Description: putative protein; protein id: At5g42680.1
MPSFIDGPTFRALLRPSTNGRRTKISDSGGGGGGIFKMFKLMPMLSSGCKMVALLGKHNNRALLADHATTVTLFGPRRGRVSLAIHEDTRAPPLFLIELPMLTSALHREISSGALKLALESDTRSARRRLVEEYVWAVYCNGRKAGYSIRRKEASDDERHVLRLLRGVSMGAGVLPAAPEKEGGVPAGPDGELTYVRARVERVVGSKDSEAFYMINPEEGGNGADNNGGGGGAGGAPELSIFLVRMK

SEQ ID NO: 17985 - protein, 210 aa, Zea mays subsp. mays
  peptide (1)..(210): Ceres Seq. ID no. 12416678
  misc_feature (31)..(188): Pfam Name: Protein of unknown function, DUF617 Pfam Description: Protein of unknown function, DUF617
  misc_feature (35)..(209): Homolog of NCBI NO: 11994755 NR Description: gb|AAB84348.1~gene_id:T5M7.9~similar to unknown
  misc_feature (1)..(209): Homolog of NCBI NO: 15240220 NR Description: putative protein; protein id: At5g06990.1
  misc_feature (1)..(85): Homolog of NCBI NO: 15237221 NR Description: putative protein; protein id: At5g23100.1
  misc_feature (86)..(209): Homolog of NCBI NO: 15237221 NR Description: putative protein; protein id: At5g23100.1
  misc_feature (1)..(188): Homolog of NCBI NO: 15227126 NR Description: hypothetical protein; protein id: At2g21990.1
  misc_feature (1)..(188): Homolog of NCBI NO: 21618123 NR Description: unknown [Arabidopsis thaliana]
  misc_feature (1)..(209): Homolog of NCBI NO: 15235158 NR Description: putative protein
  misc_feature (16)..(85): Homolog of NCBI NO: 34911646 NR Description: P0039G05.26 [Oryza sativa (japonica
  misc_feature (84)..(209): Homolog of NCBI NO: 34911646 NR Description: P0039G05.26 [Oryza sativa (japonica
  misc_feature (1)..(188): Homolog of NCBI NO: 15239035 NR Description: putative protein; protein id: At5g42680.1
MFKLMPMLSSGCKMVALLGKHNNRALLADHATTVTLFGPRRGRVSLAIHEDTRAPPLFLIELPMLTSALHREISSGALKLALESDTRSARRRLVEEYVWAVYCNGRKAGYSIRRKEASDDERHVLRLLRGVSMGAGVLPAAPEKEGGVPAGPDGELTYVRARVERVVGSKDSEAFYMINPEEGGNGADNNGGGGGAGGAPELSIFLVRMK

SEQ ID NO: 17986 - DNA, 947 bp, Zea mays subsp. mays
  misc_feature (1)..(947): Ceres Seq. ID no. 12374953
  misc_feature: MA Experiment ID: 108522 Result: Up-regulated in Transcription
  misc_feature: MA Experiment 108522 PARAMETER Experiment Name: Zm_42deg_Heat_P Parameter: Age (day) Value: 8
  misc_feature: MA Experiment 108522 PARAMETER Experiment Name: Zm_42deg_Heat_P Parameter: Organism Value: Zea mays
  misc_feature: MA Experiment 108522 PARAMETER Experiment Name: Zm_42deg_Heat_P Parameter: Plant Line Value: 35A19
  misc_feature: MA Experiment 108522 PARAMETER Experiment Name: Zm_42deg_Heat_P Parameter: Temperature (deg C) Value: 42 vs. 22
  misc_feature: MA Experiment 108522 PARAMETER Experiment Name: Zm_42deg_Heat_P Parameter: Timepoint (hr) Value: 1
  misc_feature: MA Experiment 108522 PARAMETER Experiment Name: Zm_42deg_Heat_P Parameter: Tissue Value: Aerial
aagttcggcagttccctccctccctcctcgtcacctaatccgccccgtcgccccggaagcttcaagaaggtggacggtcggagggacgggctacatggggggctgcttctggtagcttcggtcgcccgccgcgccgccgccaggatggattcaggattgtaatttcaggagatggtgaccatgggagggaattggagctaattgacgatggcaagaatgaagaaacgcctctgtcagttcttcaggtaaatgctatgagaaagttggggtcggtggaagaggtgcctgtcccgctcttcccgtccaagggtcttcggttgaagcaaaagattaaggactggttggaagggttccagaggctcccttatgtatctccatatgagaatttcagccacatcaatccgggtagtgatgtttcagagaagcgggcagtcggggtgctccatgagctgcttagtctgtttgtgacatgctctgctgagaggcgacggttacgctgcctccggcagcacctagggctgccacagaagtttcatcttgtgttcgagcggcaccctcatgtgttctacttattgttaaaggagaagacatgctttgttgtcctcaaagaggcctacatagctggagaagacactgcaattgaggcgcaccccatgttggaagtgttcaagaagtatgttgagttgatggagcagtcacgggaaatcataagacgtcgacggagcgggaagcctattgaactagagtccaaggcatgcggggatagctgagaagaaggatggggatacatgtgcaaatatgacctctataacaagaatgtggatatgtactcttggtaggagctagtttatttctcattatttgtagagaaatatttctcattatttgtagagaaatacatcaagtgctgaaacaggttggtgactatgatatttaatctgcattct

SEQ ID NO: 17987 - protein, 171 aa, Zea mays subsp. mays
  peptide (1)..(171): Ceres Seq. ID no. 12374954
  misc_feature (1)..(153): Pfam Name: Plant specific of unknown function (DUF860) Pfam Description: Plant specific of unknown function (DUF860)
  misc_feature (1)..(156): Homolog of NCBI NO: 15224649 NR Description: hypothetical protein
  misc_feature (1)..(166): Homolog of NCBI NO: 34894384 NR Description: unnamed protein product [Oryza sativa (japonica
  misc_feature (1)..(170): Homolog of NCBI NO: 3413424 NR Description: hypothetical protein [Arabidopsis thaliana]
  misc_feature (1)..(170): Homolog of NCBI NO: 15217597 NR Description: hypothetical protein; protein id: At1g71850.1
  misc_feature (15)..(148): Homolog of NCBI NO: 15233788 NR Description: putative protein; protein id: At4g24320.1
  misc_feature (15)..(145): Homolog of NCBI NO: 21536812 NR Description: unknown [Arabidopsis thaliana]
  misc_feature (15)..(145): Homolog of NCBI NO: 18410975 NR Description: putative protein
  misc_feature (15)..(145): Homolog of NCBI NO: 11282335 NR Description: hypothetical protein F14P22.110 - Arabidopsis
  misc_feature (1)..(147): Homolog of NCBI NO: 15238875 NR Description: putative protein; protein id: At5g48040.1
  misc_feature (1)..(157): Homolog of NCBI NO: 15225035 NR Description: hypothetical protein; protein id: At2g39120.1
MRKLGSVEEVPVPLFPSKGLRLKQKIKDWLEGFQRLPYVSPYENFSHINPGSDVSEKRAVGVLHELLSLFVTCSAERRRLRCLRQHLGLPQKFHLVFERHPHVFYLLLKEKTCFVVLKEAYIAGEDTAIEAHPMLEVFKKYVELMEQSREIIRRRRSGKPIELESKACGDS

SEQ ID NO: 17988 - DNA, 617 bp, Zea mays subsp. mays
  misc_feature (1)..(617): Ceres Seq. ID no. 12362776
  misc_feature: MA Experiment ID: 108527 Result: Down-regulated in Transcription
  misc_feature: MA Experiment 108527 PARAMETER Experiment Name: Zm_5mM_NO_P Parameter: Age (day) Value: 8
  misc_feature: MA Experiment 108527 PARAMETER Experiment Name: Zm_5mM_NO_P Parameter: Organism Value: Zea mays
  misc_feature: MA Experiment 108527 PARAMETER Experiment Name: Zm_5mM_NO_P Parameter: Plant Line Value: 35A19
  misc_feature: MA Experiment 108527 PARAMETER Experiment Name: Zm_5mM_NO_P Parameter: Timepoint (hr) Value: 6
  misc_feature: MA Experiment 108527 PARAMETER Experiment Name: Zm_5mM_NO_P Parameter: Tissue Value: Aerial
  misc_feature: MA Experiment 108527 PARAMETER Experiment Name: Zm_5mM_NO_P Parameter: Treatment Value: 5mM NO vs. No Treatment
  misc_feature: MA Experiment ID: 108528 Result: Up-regulated in Transcription
  misc_feature: MA Experiment 108528 PARAMETER Experiment Name: Zm_Imbibed_Seeds_P Parameter: Age (day) Value: 5 vs. 2
  misc_feature: MA Experiment 108528 PARAMETER Experiment Name: Zm_Imbibed_Seeds_P Parameter: Organism Value: Zea mays
  misc_feature: MA Experiment 108528 PARAMETER Experiment Name: Zm_Imbibed_Seeds_P Parameter: Plant Line Value: 35A19
  misc_feature: MA Experiment 108528 PARAMETER Experiment Name: Zm_Imbibed_Seeds_P Parameter: Tissue Value: Aerial vs. Embryo
  misc_feature: MA Experiment ID: 108529 Result: Down-regulated in Transcription
  misc_feature: MA Experiment 108529 PARAMETER Experiment Name: Zm_Imbibed_Seeds_P Parameter: Age (day) Value: 5 vs. 2
  misc_feature: MA Experiment 108529 PARAMETER Experiment Name: Zm_Imbibed_Seeds_P Parameter: Organism Value: Zea mays
  misc_feature: MA Experiment 108529 PARAMETER Experiment Name: Zm_Imbibed_Seeds_P Parameter: Plant Line Value: 35A19
  misc_feature: MA Experiment 108529 PARAMETER Experiment Name: Zm_Imbibed_Seeds_P Parameter: Tissue Value: Roots vs. Embryo
  misc_feature: MA Experiment ID: 108530 Result: Up-regulated in Transcription
  misc_feature: MA Experiment 108530 PARAMETER Experiment Name: Zm_Imbibed_Seeds_P Parameter: Age (day) Value: 6 vs. 2
  misc_feature: MA Experiment 108530 PARAMETER Experiment Name: Zm_Imbibed_Seeds_P Parameter: Organism Value: Zea mays
  misc_feature: MA Experiment 108530 PARAMETER Experiment Name: Zm_Imbibed_Seeds_P Parameter: Plant Line Value: 35A19
  misc_feature: MA Experiment 108530 PARAMETER Experiment Name: Zm_Imbibed_Seeds_P Parameter: Tissue Value: Aerial vs. Embryo
  misc_feature: MA Experiment ID: 108543 Result: Up-regulated in Transcription
  misc_feature: MA Experiment ID: 108545 Result: Up-regulated in Transcription
  misc_feature: MA Experiment 108545 PARAMETER Experiment Name: Zm_Imbibed_Seeds_P Parameter: Age (day) Value: 3 vs. 2
  misc_feature: MA Experiment 108545 PARAMETER Experiment Name: Zm_Imbibed_Seeds_P Parameter: Organism Value: Zea mays
  misc_feature: MA Experiment 108545 PARAMETER Experiment Name: Zm_Imbibed_Seeds_P Parameter: Plant Line Value: 35A19
  misc_feature: MA Experiment 108545 PARAMETER Experiment Name: Zm_Imbibed_Seeds_P Parameter: Tissue Value: Aerial vs. Embryo
  misc_feature: MA Experiment ID: 108547 Result: Up-regulated in Transcription
  misc_feature: MA Experiment 108547 PARAMETER Experiment Name: Zm_Imbibed_Seeds_P Parameter: Age (day) Value: 4 vs. 2
  misc_feature: MA Experiment 108547 PARAMETER Experiment Name: Zm_Imbibed_Seeds_P Parameter: Organism Value: Zea mays
  misc_feature: MA Experiment 108547 PARAMETER Experiment Name: Zm_Imbibed_Seeds_P Parameter: Plant Line Value: 35A19
  misc_feature: MA Experiment 108547 PARAMETER Experiment Name: Zm_Imbibed_Seeds_P Parameter: Tissue Value: Aerial vs. Embryo
  misc_feature: MA Experiment ID: 108556 Result: Down-regulated in Transcription
  misc_feature: MA Experiment 108556 PARAMETER Experiment Name: Zm_Drought_P Parameter: Age (day) Value: 9
  misc_feature: MA Experiment 108556 PARAMETER Experiment Name: Zm_Drought_P Parameter: Organism Value: Zea mays
  misc_feature: MA Experiment 108556 PARAMETER Experiment Name: Zm_Drought_P Parameter: Plant Line Value: 35A19
  misc_feature: MA Experiment 108556 PARAMETER Experiment Name: Zm_Drought_P Parameter: Timepoint (hr) Value: 24
  misc_feature: MA Experiment 108556 PARAMETER Experiment Name: Zm_Drought_P Parameter: Tissue Value: Aerial
  misc_feature: MA Experiment 108556 PARAMETER Experiment Name: Zm_Drought_P Parameter: Treatment Value: Drought vs. No Drought
  misc_feature: MA Experiment ID: 108559 Result: Down-regulated in Transcription
  misc_feature: MA Experiment 108559 PARAMETER Experiment Name: Zm_5mM_NO_P Parameter: Age (day) Value: 8
  misc_feature: MA Experiment 108559 PARAMETER Experiment Name: Zm_5mM_NO_P Parameter: Organism Value: Zea mays
  misc_feature: MA Experiment 108559 PARAMETER Experiment Name: Zm_5mM_NO_P Parameter: Plant Line Value: 35A19
  misc_feature: MA Experiment 108559 PARAMETER Experiment Name: Zm_5mM_NO_P Parameter: Timepoint (hr) Value: 12
  misc_feature: MA Experiment 108559 PARAMETER Experiment Name: Zm_5mM_NO_P Parameter: Tissue Value: Aerial
  misc_feature: MA Experiment 108559 PARAMETER Experiment Name: Zm_5mM_NO_P Parameter: Treatment Value: 5mM NO vs. No Treatment
  misc_feature: MA Experiment ID: 108687 Result: Down-regulated in Transcription
  misc_feature: MA Experiment 108687 PARAMETER Experiment Name: Zm_Embryos-Flowers__P Parameter: Tissue Value: Embryo vs. Aerial+
  misc_feature: MA Experiment ID: 108688 Result: Down-regulated in Transcription
  misc_feature: MA Experiment 108688 PARAMETER Experiment Name: Zm_Embryos-Flowers__P Parameter: Tissue Value: Immature Flowers vs. Aerial+
  misc_feature: MA Experiment ID: 20000479 Result: Down-regulated in Transcription
  misc_feature: MA Experiment 20000479 PARAMETER Experiment Name: Zm_Drought_P Parameter: Age (day) Value: 10
  misc_feature: MA Experiment 20000479 PARAMETER Experiment Name: Zm_Drought_P Parameter: Organism Value: Zea mays
  misc_feature: MA Experiment 20000479 PARAMETER Experiment Name: Zm_Drought_P Parameter: Plant Line Value: 35A19
  misc_feature: MA Experiment 20000479 PARAMETER Experiment Name: Zm_Drought_P Parameter: Timepoint (hr) Value: 48
  misc_feature: MA Experiment 20000479 PARAMETER Experiment Name: Zm_Drought_P Parameter: Tissue Value: Aerial
  misc_feature: MA Experiment 20000479 PARAMETER Experiment Name: Zm_Drought_P Parameter: Treatment Value: Drought vs. No Drought
  misc_feature: MA Experiment ID: 20000480 Result: Down-regulated in Transcription
  misc_feature: MA Experiment 20000480 PARAMETER Experiment Name: Zm_Drought_P Parameter: Age (day) Value: 11
  misc_feature: MA Experiment 20000480 PARAMETER Experiment Name: Zm_Drought_P Parameter: Organism Value: Zea mays
  misc_feature: MA Experiment 20000480 PARAMETER Experiment Name: Zm_Drought_P Parameter: Plant Line Value: 35A19
  misc_feature: MA Experiment 20000480 PARAMETER Experiment Name: Zm_Drought_P Parameter: Timepoint (hr) Value: 72
  misc_feature: MA Experiment 20000480 PARAMETER Experiment Name: Zm_Drought_P Parameter: Tissue Value: Aerial
  misc_feature: MA Experiment 20000480 PARAMETER Experiment Name: Zm_Drought_P Parameter: Treatment Value: Drought vs. No Drought
  misc_feature: MA Experiment ID: 20000535 Result: Down-regulated in Transcription
  misc_feature: MA Experiment 20000535 PARAMETER Experiment Name: Zm_Hybrid_Seed_Dev_P Parameter: DAP Value: 30 vs. 12
  misc_feature: MA Experiment 20000535 PARAMETER Experiment Name: Zm_Hybrid_Seed_Dev_P Parameter: Organism Value: Zea mays
  misc_feature: MA Experiment 20000535 PARAMETER Experiment Name: Zm_Hybrid_Seed_Dev_P Parameter: Plant Line Value: 35A19
  misc_feature: MA Experiment 20000535 PARAMETER Experiment Name: Zm_Hybrid_Seed_Dev_P Parameter: Tissue Value: Embryo vs. Unfert Floret
atacactcctgaaattgctgtcagctttggtgcagggttgattggatcattggtgtatctccgcatgcttggaaccagtatagattccctagcaggtggaactggagaaactgtcaagagtgctgctgcacaaccaaggttgcttattccagtggtacttgtgatgatgtataacagatggaatcagatattagttccggattatggtttcatgcagcttgagttaataccaatgcttgttgggttttttacctataagattgctacattcgctcaagcaatccaggattctatgcctccagtcggaaatcgtgaaggttgaaaagtgtcatgttgtatataaacgaaggtggtagccatggtccctggtcagtggtcacccagatagtaaggtctgtatagaagaatctggtctggtgtcatcaccaagtagatgagatgctcgttgaggacgccatttgaaaatctcgagtgcttaactatgttctgcacaaatattttgacgaaaggtgatgttaccacattcattccatattacacgcagatcatcagtgtataaatttacggctccgaacttttaccacaacgattaattgacaaaacaattgtatgattgc

SEQ ID NO: 17989 - protein, 106 aa, Zea mays subsp. mays
  peptide (1)..(106): Ceres Seq. ID no. 12362777
  misc_feature (1)..(98): Homolog of NCBI NO: 21593011 NR Description: unknown [Arabidopsis thaliana]
  misc_feature (1)..(98): Homolog of NCBI NO: 18402535 NR Description: expressed protein
  misc_feature (1)..(105): Homolog of NCBI NO: 34911056 NR Description: P0007F06.23 [Oryza sativa (japonica
YTPEIAVSFGAGLIGSLVYLRMLGTSIDSLAGGTGETVKSAAAQPRLLIPVVLVMMYNRWNQILVPDYGFMQLELIPMLVGFFTYKIATFAQAIQDSMPPVGNREG

SEQ ID NO: 17990 - protein, 85 aa, Zea mays subsp. mays
  peptide (1)..(85): Ceres Seq. ID no. 12362778
  misc_feature (1)..(77): Homolog of NCBI NO: 21593011 NR Description: unknown [Arabidopsis thaliana]
  misc_feature (1)..(77): Homolog of NCBI NO: 18402535 NR Description: expressed protein
  misc_feature (1)..(84): Homolog of NCBI NO: 34911056 NR Description: P0007F06.23 [Oryza sativa (japonica
MLGTSIDSLAGGTGETVKSAAAQPRLLIPVVLVMMYNRWNQILVPDYGFMQLELIPMLVGFFTYKIATFAQAIQDSMPPVGNREG

SEQ ID NO: 17991 - DNA, 994 bp, Zea mays subsp. mays
  misc_feature (1)..(994): Ceres Seq. ID no. 12416292
  misc_feature: MA Experiment ID: 108504 Result: Down-regulated in Transcription
  misc_feature: MA Experiment 108504 PARAMETER Experiment Name: Zm_Drought_P Parameter: Age (day) Value: 8
  misc_feature: MA Experiment 108504 PARAMETER Experiment Name: Zm_Drought_P Parameter: Organism Value: Zea mays
  misc_feature: MA Experiment 108504 PARAMETER Experiment Name: Zm_Drought_P Parameter: Plant Line Value: 35A19
  misc_feature: MA Experiment 108504 PARAMETER Experiment Name: Zm_Drought_P Parameter: Timepoint (hr) Value: 12
  misc_feature: MA Experiment 108504 PARAMETER Experiment Name: Zm_Drought_P Parameter: Tissue Value: Aerial
  misc_feature: MA Experiment 108504 PARAMETER Experiment Name: Zm_Drought_P Parameter: Treatment Value: Drought vs. No Drought
  misc_feature: MA Experiment ID: 108523 Result: Down-regulated in Transcription
  misc_feature: MA Experiment 108523 PARAMETER Experiment Name: Zm_42deg_Heat_P Parameter: Age (day) Value: 8
  misc_feature: MA Experiment 108523 PARAMETER Experiment Name: Zm_42deg_Heat_P Parameter: Organism Value: Zea mays
  misc_feature: MA Experiment 108523 PARAMETER Experiment Name: Zm_42deg_Heat_P Parameter: Plant Line Value: 35A19
  misc_feature: MA Experiment 108523 PARAMETER Experiment Name: Zm_42deg_Heat_P Parameter: Temperature (deg C) Value: 42 vs. 22
  misc_feature: MA Experiment 108523 PARAMETER Experiment Name: Zm_42deg_Heat_P Parameter: Timepoint (hr) Value: 6
  misc_feature: MA Experiment 108523 PARAMETER Experiment Name: Zm_42deg_Heat_P Parameter: Tissue Value: Aerial
  misc_feature: MA Experiment ID: 108527 Result: Down-regulated in Transcription
  misc_feature: MA Experiment 108527 PARAMETER Experiment Name: Zm_5mM_NO_P Parameter: Age (day) Value: 8
  misc_feature: MA Experiment 108527 PARAMETER Experiment Name: Zm_5mM_NO_P Parameter: Organism Value: Zea mays
  misc_feature: MA Experiment 108527 PARAMETER Experiment Name: Zm_5mM_NO_P Parameter: Plant Line Value: 35A19
  misc_feature: MA Experiment 108527 PARAMETER Experiment Name: Zm_5mM_NO_P Parameter: Timepoint (hr) Value: 6
  misc_feature: MA Experiment 108527 PARAMETER Experiment Name: Zm_5mM_NO_P Parameter: Tissue Value: Aerial
  misc_feature: MA Experiment 108527 PARAMETER Experiment Name: Zm_5mM_NO_P Parameter: Treatment Value: 5mM NO vs. No Treatment
  misc_feature: MA Experiment ID: 108543 Result: Down-regulated in Transcription
  misc_feature: MA Experiment ID: 108556 Result: Down-regulated in Transcription
  misc_feature: MA Experiment 108556 PARAMETER Experiment Name: Zm_Drought_P Parameter: Age (day) Value: 9
  misc_feature: MA Experiment 108556 PARAMETER Experiment Name: Zm_Drought_P Parameter: Organism Value: Zea mays
  misc_feature: MA Experiment 108556 PARAMETER Experiment Name: Zm_Drought_P Parameter: Plant Line Value: 35A19
  misc_feature: MA Experiment 108556 PARAMETER Experiment Name: Zm_Drought_P Parameter: Timepoint (hr) Value: 24
  misc_feature: MA Experiment 108556 PARAMETER Experiment Name: Zm_Drought_P Parameter: Tissue Value: Aerial
  misc_feature: MA Experiment 108556 PARAMETER Experiment Name: Zm_Drought_P Parameter: Treatment Value: Drought vs. No Drought
  misc_feature: MA Experiment ID: 108559 Result: Down-regulated in Transcription
  misc_feature: MA Experiment 108559 PARAMETER Experiment Name: Zm_5mM_NO_P Parameter: Age (day) Value: 8
  misc_feature: MA Experiment 108559 PARAMETER Experiment Name: Zm_5mM_NO_P Parameter: Organism Value: Zea mays
  misc_feature: MA Experiment 108559 PARAMETER Experiment Name: Zm_5mM_NO_P Parameter: Plant Line Value: 35A19
  misc_feature: MA Experiment 108559 PARAMETER Experiment Name: Zm_5mM_NO_P Parameter: Timepoint (hr) Value: 12
  misc_feature: MA Experiment 108559 PARAMETER Experiment Name: Zm_5mM_NO_P Parameter: Tissue Value: Aerial
  misc_feature: MA Experiment 108559 PARAMETER Experiment Name: Zm_5mM_NO_P Parameter: Treatment Value: 5mM NO vs. No Treatment
  misc_feature: MA Experiment ID: 108689 Result: Down-regulated in Transcription
  misc_feature: MA Experiment 108689 PARAMETER Experiment Name: Zm_Drought_Roots_P Parameter: Age (day) Value: 9
  misc_feature: MA Experiment 108689 PARAMETER Experiment Name: Zm_Drought_Roots_P Parameter: Organism Value: Zea mays
  misc_feature: MA Experiment 108689 PARAMETER Experiment Name: Zm_Drought_Roots_P Parameter: Plant Line Value: 35A19
  misc_feature: MA Experiment 108689 PARAMETER Experiment Name: Zm_Drought_Roots_P Parameter: Timepoint (hr) Value: 24
  misc_feature: MA Experiment 108689 PARAMETER Experiment Name: Zm_Drought_Roots_P Parameter: Tissue Value: Roots
  misc_feature: MA Experiment 108689 PARAMETER Experiment Name: Zm_Drought_Roots_P Parameter: Treatment Value: Drought vs. No Drought
  misc_feature: MA Experiment ID: 20000480 Result: Down-regulated in Transcription
  misc_feature: MA Experiment 20000480 PARAMETER Experiment Name: Zm_Drought_P Parameter: Age (day) Value: 11
  misc_feature: MA Experiment 20000480 PARAMETER Experiment Name: Zm_Drought_P Parameter: Organism Value: Zea mays
  misc_feature: MA Experiment 20000480 PARAMETER Experiment Name: Zm_Drought_P Parameter: Plant Line Value: 35A19
  misc_feature: MA Experiment 20000480 PARAMETER Experiment Name: Zm_Drought_P Parameter: Timepoint (hr) Value: 72
  misc_feature: MA Experiment 20000480 PARAMETER Experiment Name: Zm_Drought_P Parameter: Tissue Value: Aerial
  misc_feature: MA Experiment 20000480 PARAMETER Experiment Name: Zm_Drought_P Parameter: Treatment Value: Drought vs. No Drought
  misc_feature: MA Experiment ID: 20000534 Result: Down-regulated in Transcription
  misc_feature: MA Experiment 20000534 PARAMETER Experiment Name: Zm_Hybrid_Pollen_P Parameter: Age (day) Value: 8
  misc_feature: MA Experiment 20000534 PARAMETER Experiment Name: Zm_Hybrid_Pollen_P Parameter: Organism Value: Zea mays
  misc_feature: MA Experiment 20000534 PARAMETER Experiment Name: Zm_Hybrid_Pollen_P Parameter: Plant Line Value: 35A19
  misc_feature: MA Experiment 20000534 PARAMETER Experiment Name: Zm_Hybrid_Pollen_P Parameter: Tissue Value: Pollen vs. Aerial
  misc_feature: MA Experiment ID: 20000535 Result: Up-regulated in Transcription
  misc_feature: MA Experiment 20000535 PARAMETER Experiment Name: Zm_Hybrid_Seed_Dev_P Parameter: DAP Value: 30 vs. 12
  misc_feature: MA Experiment 20000535 PARAMETER Experiment Name: Zm_Hybrid_Seed_Dev_P Parameter: Organism Value: Zea mays
  misc_feature: MA Experiment 20000535 PARAMETER Experiment Name: Zm_Hybrid_Seed_Dev_P Parameter: Plant Line Value: 35A19
  misc_feature: MA Experiment 20000535 PARAMETER Experiment Name: Zm_Hybrid_Seed_Dev_P Parameter: Tissue Value: Embryo vs. Unfert Floret
  misc_feature: MA Experiment ID: 20001610 Result: Up-regulated in Transcription
  misc_feature: MA Experiment 20001610 PARAMETER Experiment Name: Zm_50ppm_KNO3_L-to-H_P Parameter: Age (day) Value: 19
  misc_feature: MA Experiment 20001610 PARAMETER Experiment Name: Zm_50ppm_KNO3_L-to-H_P Parameter: Organism Value: Zea mays
  misc_feature: MA Experiment 20001610 PARAMETER Experiment Name: Zm_50ppm_KNO3_L-to-H_P Parameter: Plant Line Value: 35A19
  misc_feature: MA Experiment 20001610 PARAMETER Experiment Name: Zm_50ppm_KNO3_L-to-H_P Parameter: Timepoint (hr) Value: 2
  misc_feature: MA Experiment 20001610 PARAMETER Experiment Name: Zm_50ppm_KNO3_L-to-H_P Parameter: Tissue Value: Roots
  misc_feature: MA Experiment 20001610 PARAMETER Experiment Name: Zm_50ppm_KNO3_L-to-H_P Parameter: Treatment Value: 50ppm KNO3 vs. 50ppm KCl
acttcggcatgcgccgggaatttgattcttctgcctaaaatagtcacgctaccttccacctccccctactactctgactctccctcgtcttcttcgctaccaagatgatggcggaggcgtggacgccggtgctgttgccggcgacggcgccctgcttctggcagcaggacacgcactcggttttgtggcggagaggagacgcgtggacggcggaggagaacaagctgttcgagaaggcactggcgcagatcgaccggaacgcgcccgacaggtgggagaaggtggcggcggtgctgccctggaagacggtcgacgacgtgaggagccagtaccacgccctcgagaaggacgtgggcgtcatcgaggccggcgggctcgtgccgttcccgcgctacagcggctcggtcccgccgccgtccgggttcgccctcgaggactggggcggcggcgaccgcgggttcaggcgcgcgcgcggctcggaggagatgcaggagcggaagaagggtgtcccctggacggaggaggagcacaagcttttcttgatggggctgaggaagtacgggagaggggactggaggaacatctcgcgcaagtacgtgacgacccggacgccgacgcaggtggccagccacgcgcagaagtacttcatccggctcagctccggcggcaaggacaagcggcggtccagcatccacgacatcaccaccgtcaacctcccaggcgacgccccgcgctcgtcgccgcccgcggccaccaccaacccctccgccggcgccctggtggtggacgtgaagcccttcgtgtgacgaggatgaagagtggcacagcctcgtcgtccagctgccagctcgcggcagctccgagcgactgcgttcatcgagaacaagacgccatgggcggcaatgcggcatccgtttcagttcagtgtacataattcggcaagtacagagcccaacaacttccacgtaaaaggtactgaataataaagcattcg

SEQ ID NO: 17992 - protein, 233 aa, Zea mays subsp. mays
  peptide (1)..(233): Ceres Seq. ID no. 12416293
  misc_feature (134)..(181): Pfam Name: Myb-like DNA-binding domain Pfam Description: Myb-like DNA-binding domain
  misc_feature (11)..(204): Homolog of NCBI NO: 15229712 NR Description: MYB-family transcription factor, putative
  misc_feature (30)..(218): Homolog of NCBI NO: 15240915 NR Description: myb family transcription factor; protein id:
  misc_feature (28)..(232): Homolog of NCBI NO: 34895714 NR Description: putative myb-related transcription activator
  misc_feature (34)..(222): Homolog of NCBI NO: 18874265 NR Description: MYB-like transcription factor DVL1 [Antirrhinum
  misc_feature (34)..(213): Homolog of NCBI NO: 18874263 NR Description: MYB-like transcription factor DIVARICATA
  misc_feature (30)..(224): Homolog of NCBI NO: 30687381 NR Description: MYB family transcription factor -related
  misc_feature (30)..(224): Homolog of NCBI NO: 7446171 NR Description: probable MYB family transcription factor
  misc_feature (31)..(208): Homolog of NCBI NO: 15237776 NR Description: I-box binding factor - like protein; protein id:
  misc_feature (30)..(231): Homolog of NCBI NO: 12005328 NR Description: unknown [Hevea brasiliensis]
  misc_feature (1)..(231): Homolog of NCBI NO: 34908386 NR Description: P0529E05.19 [Oryza sativa (japonica
MMAEAWTPVLLPATAPCFWQQDTHSVLWRRGDAWTAEENKLFEKALAQIDRNAPDRWEKVAAVLPWKTVDDVRSQYHALEKDVGVIEAGGLVPFPRYSGSVPPPSGFALEDWGGGDRGFRRARGSEEMQERKKGVPWTEEEHKLFLMGLRKYGRGDWRNISRKYVTTRTPTQVASHAQKYFIRLSSGGKDKRRSSIHDITTVNLPGDAPRSSPPAATTNPSAGALVVDVKPFV

SEQ ID NO: 17993 - protein, 232 aa, Zea mays subsp. mays
  peptide (1)..(232): Ceres Seq. ID no. 12416294
  misc_feature (133)..(180): Pfam Name: Myb-like DNA-binding domain Pfam Description: Myb-like DNA-binding domain
  misc_feature (29)..(217): Homolog of NCBI NO: 15240915 NR Description: myb family transcription factor; protein id:
  misc_feature (27)..(231): Homolog of NCBI NO: 34895714 NR Description: putative myb-related transcription activator
  misc_feature (33)..(221): Homolog of NCBI NO: 18874265 NR Description: MYB-like transcription factor DVL1 [Antirrhinum
  misc_feature (33)..(212): Homolog of NCBI NO: 18874263 NR Description: MYB-like transcription factor DIVARICATA
  misc_feature (29)..(223): Homolog of NCBI NO: 30687381 NR Description: MYB family transcription factor -related
  misc_feature (10)..(203): Homolog of NCBI NO: 15229712 NR Description: MYB-family transcription factor, putative
  misc_feature (29)..(223): Homolog of NCBI NO: 7446171 NR Description: probable MYB family transcription factor
  misc_feature (30)..(207): Homolog of NCBI NO: 15237776 NR Description: I-box binding factor - like protein; protein id:
  misc_feature (29)..(230): Homolog of NCBI NO: 12005328 NR Description: unknown [Hevea brasiliensis]
  misc_feature (1)..(230): Homolog of NCBI NO: 34908386 NR Description: P0529E05.19 [Oryza sativa (japonica
MAEAWTPVLLPATAPCFWQQDTHSVLWRRGDAWTAEENKLFEKALAQIDRNAPDRWEKVAAVLPWKTVDDVRSQYHALEKDVGVIEAGGLVPFPRYSGSVPPPSGFALEDWGGGDRGFRRARGSEEMQERKKGVPWTEEEHKLFLMGLRKYGRGDWRNISRKYVTTRTPTQVASHAQKYFIRLSSGGKDKRRSSIHDITTVNLPGDAPRSSPPAATTNPSAGALVVDVKPFV

SEQ ID NO: 17994 - DNA, 912 bp, Zea mays subsp. mays
  misc_feature (1)..(912): Ceres Seq. ID no. 12360805
  misc_feature: MA Experiment ID: 108535 Result: Down-regulated in Transcription
  misc_feature: MA Experiment 108535 PARAMETER Experiment Name: Zm_Meristem_P Parameter: Age (day) Value: 8
  misc_feature: MA Experiment 108535 PARAMETER Experiment Name: Zm_Meristem_P Parameter: Organism Value: Zea mays
  misc_feature: MA Experiment 108535 PARAMETER Experiment Name: Zm_Meristem_P Parameter: Plant Line Value: 35A19
  misc_feature: MA Experiment 108535 PARAMETER Experiment Name: Zm_Meristem_P Parameter: Tissue Value: Root Meristem vs. Above Root Meristem
gcacgagaccattacctagaacatcctaatcaaaaatatattttatcagcgtgcggccacgtacacggtacacgcccccagctgcttcgaaaccaactccagaaaactcggcacagcctaggccgattcgcctgtgcctgtgcgtacgtgagctgcgaggtagatagatggctgcggtggtggaggcggcgccggctgcggagacggcggcaaaggccgtggcagaggaggaggccggcgtcaccgcgcctgggcctccggttggtggctccaactccaaggccctgatcgtcgttgacaaggtggatgataaacctttttctttgaataatatgccaaggaactccaatgatagagacattgctcttgcaacagtggaaatagagaagataaactctttgattaaagcttgggaagagaatgagaaggcaaaagcagataacaagactgctaagaaacaatctattattctttcatgggagaacacaaagaaggcaatcatagaagctgagttgaaaaagaagaaagaagaactagagaagaaaatggctgaatatgctgagaagatgaaaaacaagaaggcaatcatccataagaaggccgaggaaaagagagcgatggttatggcccagcatggtgaagaaattctcaagactgaggagatggcagctaagtaccgtgccactagggtagctccaaaaatttcttaggtgctttagagcataaggaaggtttgatttttatgctttcttatttgtgcattaaaatgccatggtgcaactttatcaacttatgtaattgttacccttcttaattgtttgtatagactactatttatggtgcacaaatgatactattggtgtataattagaccatcattgaccaaaatgaaaagcatataaatgtgaatgt

SEQ ID NO: 17995 - protein, 180 aa, Zea mays subsp. mays
  peptide (1)..(180): Ceres Seq. ID no. 12360806
  misc_feature (73)..(178): Pfam Name: Remorin, C-terminal region Pfam Description: Remorin, C-terminal region
  misc_feature (16)..(177): Homolog of NCBI NO: 15229057 NR Description: remorin -like protein; protein id: At3g48940.1
  misc_feature (9)..(178): Homolog of NCBI NO: 21555669 NR Description: remorin [Arabidopsis thaliana]
  misc_feature (9)..(178): Homolog of NCBI NO: 15237822 NR Description: putative protein
  misc_feature (8)..(178): Homolog of NCBI NO: 601843 NR Description: DNA-binding protein
  misc_feature (8)..(178): Homolog of NCBI NO: 15225899 NR Description: remorin
  misc_feature (8)..(178): Homolog of NCBI NO: 15233068 NR Description: putative DNA-binding protein
  misc_feature (11)..(178): Homolog of NCBI NO: 4883530 NR Description: remorin 2 [Lycopersicon esculentum]
  misc_feature (4)..(178): Homolog of NCBI NO: 4731573 NR Description: remorin 1 [Lycopersicon esculentum]
  misc_feature (8)..(178): Homolog of NCBI NO: 34925093 NR Description: Remorin (pp34)
  misc_feature (7)..(178): Homolog of NCBI NO: 32489830 NR Description: OSJNBb0039L24.13 [Oryza sativa (japonica
MAAVVEAAPAAETAAKAVAEEEAGVTAPGPPVGGSNSKALIVVDKVDDKPFSLNNMPRNSNDRDIALATVEIEKINSLIKAWEENEKAKADNKTAKKQSIILSWENTKKAIIEAELKKKKEELEKKMAEYAEKMKNKKAIIHKKAEEKRAMVMAQHGEEILKTEEMAAKYRATRVAPKIS

SEQ ID NO: 17996 - protein, 125 aa, Zea mays subsp. mays
  peptide (1)..(125): Ceres Seq. ID no. 12360807
  misc_feature (18)..(123): Pfam Name: Remorin, C-terminal region Pfam Description: Remorin, C-terminal region
  misc_feature (1)..(122): Homolog of NCBI NO: 15229057 NR Description: remorin -like protein; protein id: At3g48940.1
  misc_feature (1)..(123): Homolog of NCBI NO: 21555669 NR Description: remorin [Arabidopsis thaliana]
  misc_feature (1)..(123): Homolog of NCBI NO: 15237822 NR Description: putative protein
  misc_feature (1)..(123): Homolog of NCBI NO: 601843 NR Description: DNA-binding protein
  misc_feature (1)..(123): Homolog of NCBI NO: 15225899 NR Description: remorin
  misc_feature (1)..(123): Homolog of NCBI NO: 15233068 NR Description: putative DNA-binding protein
  misc_feature (1)..(123): Homolog of NCBI NO: 4883530 NR Description: remorin 2 [Lycopersicon esculentum]
  misc_feature (1)..(123): Homolog of NCBI NO: 4731573 NR Description: remorin 1 [Lycopersicon esculentum]
  misc_feature (1)..(123): Homolog of NCBI NO: 34925093 NR Description: Remorin (pp34)
  misc_feature (1)..(123): Homolog of NCBI NO: 32489830 NR Description: OSJNBb0039L24.13 [Oryza sativa (japonica
MPRNSNDRDIALATVEIEKINSLIKAWEENEKAKADNKTAKKQSIILSWENTKKAIIEAELKKKKEELEKKMAEYAEKMKNKKAIIHKKAEEKRAMVMAQHGEEILKTEEMAAKYRATRVAPKIS

SEQ ID NO: 17997 - protein, 95 aa, Zea mays subsp. mays
  peptide (1)..(95): Ceres Seq. ID no. 12360808
ARDHYLEHPNQKYILSACGHVHGTRPQLLRNQLQKTRHSLGRFACACAYVSCEVDRWLRWWRRRRLRRRRQRPWQRRRPASPRLGLRLVAPTPRP

SEQ ID NO: 17998 - DNA, 484 bp, Zea mays subsp. mays
  misc_feature (1)..(484): Ceres Seq. ID no. 1679849
  misc_feature: MA Experiment ID: 108529 Result: Up-regulated in Transcription
  misc_feature: MA Experiment 108529 PARAMETER Experiment Name: Zm_Imbibed_Seeds_P Parameter: Age (day) Value: 5 vs. 2
  misc_feature: MA Experiment 108529 PARAMETER Experiment Name: Zm_Imbibed_Seeds_P Parameter: Organism Value: Zea mays
  misc_feature: MA Experiment 108529 PARAMETER Experiment Name: Zm_Imbibed_Seeds_P Parameter: Plant Line Value: 35A19
  misc_feature: MA Experiment 108529 PARAMETER Experiment Name: Zm_Imbibed_Seeds_P Parameter: Tissue Value: Roots vs. Embryo
  misc_feature: MA Experiment ID: 108546 Result: Up-regulated in Transcription
  misc_feature: MA Experiment 108546 PARAMETER Experiment Name: Zm_Imbibed_Seeds_P Parameter: Age (day) Value: 3 vs. 2
  misc_feature: MA Experiment 108546 PARAMETER Experiment Name: Zm_Imbibed_Seeds_P Parameter: Organism Value: Zea mays
  misc_feature: MA Experiment 108546 PARAMETER Experiment Name: Zm_Imbibed_Seeds_P Parameter: Plant Line Value: 35A19
  misc_feature: MA Experiment 108546 PARAMETER Experiment Name: Zm_Imbibed_Seeds_P Parameter: Tissue Value: Roots vs. Embryo
gacgaatcgtccatcatcttccccaactccatagtaggccagtccagaacacgagggcggcggctatgggcggacatggccacccttactcgccggcggagctgcagctgccggggttcgtgccgcagcggctgtcgcaggcccagatcgtcgcgcctttcgcgggcaccgcgtgttggccgtgctcggcgcctggctcgtctccgggagatgcggcggcagsggcggcggcagattatccaggaccgaccgcttgctcatgggctggtggctcttcaccgcgctgacccacctcgtcttcgagccacccttcctcttcaccccggacttcttcagcaaggagaacccaaactacttcgacgacctctttaaagagtacagcaaaggtgactccagatacgccgctagggacaccgccatcgtcgcgcttgaagtgataaccgtcggggctgaaaggcctgcatcgctcctcgcagtctatgcg

SEQ ID NO: 17999 - protein, 123 aa, Zea mays subsp. mays
  peptide (1)..(123): Ceres Seq. ID no. 1679850
  misc_feature (75)..(75): Xaa is any aa, unknown or other
DESSIIFPNSIVGQSRTRGRRLWADMATLTRRRSCSCRGSCRSGCRRPRSSRLSRAPRVGRARRLARLREMRRQXRRQIIQDRPLAHGLVALHRADPPRLRATLPLHPGLLQQGEPKLLRRPL

SEQ ID NO: 18000 - protein, 94 aa, Zea mays subsp. mays
  peptide (1)..(94): Ceres Seq. ID no. 1679851
  misc_feature (27)..(57): Homolog of NCBI NO: 21554213 NR Description: C-8,7 sterol isomerase [Arabidopsis thaliana]
  misc_feature (27)..(57): Homolog of NCBI NO: 15223758 NR Description: C-8,7 sterol isomerase
  misc_feature (27)..(57): Homolog of NCBI NO: 4098989 NR Description: phenylalkylamine binding protein homolog
  misc_feature (25)..(57): Homolog of NCBI NO: 34894044 NR Description: putative C-8,7 sterol isomerase
  misc_feature (74)..(74): Xaa is any aa, unknown or other
RIVHHLPQLHSRPVQNTRAAAMGGHGHPYSPAELQLPGFVPQRLSQAQIVAPFAGTACWPCSAPGSSPGDAAAXAAADYPGPTACSWAGGSSPR

SEQ ID NO: 18001 - protein, 98 aa, Zea mays subsp. mays
  peptide (1)..(98): Ceres Seq. ID no. 1679852
  misc_feature (50)..(50): Xaa is any aa, unknown or other
MATLTRRRSCSCRGSCRSGCRRPRSSRLSRAPRVGRARRLARLREMRRQXRRQIIQDRPLAHGLVALHRADPPRLRATLPLHPGLLQQGEPKLLRRPL

SEQ ID NO: 18002 - DNA, 2141 bp, Zea mays subsp. mays; identical to SEQ ID NO: 17750
  misc_feature (1)..(2141): Ceres Seq. ID no. 12435299
  misc_feature: MA Experiment ID: 108515 Result: Up-regulated in Transcription
  misc_feature: MA Experiment 108515 PARAMETER Experiment Name: Zm_2mM_SA_P Parameter: Age (day) Value: 8
  misc_feature: MA Experiment 108515 PARAMETER Experiment Name: Zm_2mM_SA_P Parameter: Organism Value: Zea mays
  misc_feature: MA Experiment 108515 PARAMETER Experiment Name: Zm_2mM_SA_P Parameter: Plant Line Value: 35A19
  misc_feature: MA Experiment 108515 PARAMETER Experiment Name: Zm_2mM_SA_P Parameter: Timepoint (hr) Value: 12
  misc_feature: MA Experiment 108515 PARAMETER Experiment Name: Zm_2mM_SA_P Parameter: Tissue Value: Aerial
  misc_feature: MA Experiment 108515 PARAMETER Experiment Name: Zm_2mM_SA_P Parameter: Treatment Value: 2mM SA vs. No Treatment
  misc_feature: MA Experiment ID: 108522 Result: Up-regulated in Transcription
  misc_feature: MA Experiment 108522 PARAMETER Experiment Name: Zm_42deg_Heat_P Parameter: Age (day) Value: 8
  misc_feature: MA Experiment 108522 PARAMETER Experiment Name: Zm_42deg_Heat_P Parameter: Organism Value: Zea mays
  misc_feature: MA Experiment 108522 PARAMETER Experiment Name: Zm_42deg_Heat_P Parameter: Plant Line Value: 35A19
  misc_feature: MA Experiment 108522 PARAMETER Experiment Name: Zm_42deg_Heat_P Parameter: Temperature (deg C) Value: 42 vs. 22
  misc_feature: MA Experiment 108522 PARAMETER Experiment Name: Zm_42deg_Heat_P Parameter: Timepoint (hr) Value: 1
  misc_feature: MA Experiment 108522 PARAMETER Experiment Name: Zm_42deg_Heat_P Parameter: Tissue Value: Aerial
  misc_feature: MA Experiment ID: 108527 Result: Up-regulated in Transcription
  misc_feature: MA Experiment 108527 PARAMETER Experiment Name: Zm_5mM_NO_P Parameter: Age (day) Value: 8
  misc_feature: MA Experiment 108527 PARAMETER Experiment Name: Zm_5mM_NO_P Parameter: Organism Value: Zea mays
  misc_feature: MA Experiment 108527 PARAMETER Experiment Name: Zm_5mM_NO_P Parameter: Plant Line Value: 35A19
  misc_feature: MA Experiment 108527 PARAMETER Experiment Name: Zm_5mM_NO_P Parameter: Timepoint (hr) Value: 6
  misc_feature: MA Experiment 108527 PARAMETER Experiment Name: Zm_5mM_NO_P Parameter: Tissue Value: Aerial
  misc_feature: MA Experiment 108527 PARAMETER Experiment Name: Zm_5mM_NO_P Parameter: Treatment Value: 5mM NO vs. No Treatment
  misc_feature: MA Experiment ID: 108532 Result: Down-regulated in Transcription
  misc_feature: MA Experiment 108532 PARAMETER Experiment Name: Zm_20uM_KNO3_H-to-L_P Parameter: Age (day) Value: 11
  misc_feature: MA Experiment 108532 PARAMETER Experiment Name: Zm_20uM_KNO3_H-to-L_P Parameter: Organism Value: Zea mays
  misc_feature: MA Experiment 108532 PARAMETER Experiment Name: Zm_20uM_KNO3_H-to-L_P Parameter: Plant Line Value: 35A19
  misc_feature: MA Experiment 108532 PARAMETER Experiment Name: Zm_20uM_KNO3_H-to-L_P Parameter: Timepoint (hr) Value: 16
  misc_feature: MA Experiment 108532 PARAMETER Experiment Name: Zm_20uM_KNO3_H-to-L_P Parameter: Tissue Value: Roots
  misc_feature: MA Experiment 108532 PARAMETER Experiment Name: Zm_20uM_KNO3_H-to-L_P Parameter: Treatment Value: 20uM KNO3 vs. 60mM KNO3
  misc_feature: MA Experiment ID: 108535 Result: Down-regulated in Transcription
  misc_feature: MA Experiment 108535 PARAMETER Experiment Name: Zm_Meristem_P Parameter: Age (day) Value: 8
  misc_feature: MA Experiment 108535 PARAMETER Experiment Name: Zm_Meristem_P Parameter: Organism Value: Zea mays
  misc_feature: MA Experiment 108535 PARAMETER Experiment Name: Zm_Meristem_P Parameter: Plant Line Value: 35A19
  misc_feature: MA Experiment 108535 PARAMETER Experiment Name: Zm_Meristem_P Parameter: Tissue Value: Root Meristem vs. Above Root Meristem
  misc_feature: MA Experiment ID: 108543 Result: Down-regulated in Transcription
  misc_feature: MA Experiment ID: 108547 Result: Down-regulated in Transcription
  misc_feature: MA Experiment 108547 PARAMETER Experiment Name: Zm_Imbibed_Seeds_P Parameter: Age (day) Value: 4 vs. 2
  misc_feature: MA Experiment 108547 PARAMETER Experiment Name: Zm_Imbibed_Seeds_P Parameter: Organism Value: Zea mays
  misc_feature: MA Experiment 108547 PARAMETER Experiment Name: Zm_Imbibed_Seeds_P Parameter: Plant Line Value: 35A19
  misc_feature: MA Experiment 108547 PARAMETER Experiment Name: Zm_Imbibed_Seeds_P Parameter: Tissue Value: Aerial vs. Embryo
  misc_feature: MA Experiment ID: 108559 Result: Up-regulated in Transcription
  misc_feature: MA Experiment 108559 PARAMETER Experiment Name: Zm_5mM_NO_P Parameter: Age (day) Value: 8
  misc_feature: MA Experiment 108559 PARAMETER Experiment Name: Zm_5mM_NO_P Parameter: Organism Value: Zea mays
  misc_feature: MA Experiment 108559 PARAMETER Experiment Name: Zm_5mM_NO_P Parameter: Plant Line Value: 35A19
  misc_feature: MA Experiment 108559 PARAMETER Experiment Name: Zm_5mM_NO_P Parameter: Timepoint (hr) Value: 12
  misc_feature: MA Experiment 108559 PARAMETER Experiment Name: Zm_5mM_NO_P Parameter: Tissue Value: Aerial
  misc_feature: MA Experiment 108559 PARAMETER Experiment Name: Zm_5mM_NO_P Parameter: Treatment Value: 5mM NO vs. No Treatment
  misc_feature: MA Experiment ID: 108687 Result: Down-regulated in Transcription
  misc_feature: MA Experiment 108687 PARAMETER Experiment Name: Zm_Embryos-Flowers__P Parameter: Tissue Value: Embryo vs. Aerial+
  misc_feature: MA Experiment ID: 20000477 Result: Up-regulated in Transcription
  misc_feature: MA Experiment 20000477 PARAMETER Experiment Name: Zm_5mM_SA_P Parameter: Age (day) Value: 10
  misc_feature: MA Experiment 20000477 PARAMETER Experiment Name: Zm_5mM_SA_P Parameter: Organism Value: Zea mays
  misc_feature: MA Experiment 20000477 PARAMETER Experiment Name: Zm_5mM_SA_P Parameter: Plant Line Value: 35A19
  misc_feature: MA Experiment 20000477 PARAMETER Experiment Name: Zm_5mM_SA_P Parameter: Timepoint (hr) Value: 48
  misc_feature: MA Experiment 20000477 PARAMETER Experiment Name: Zm_5mM_SA_P Parameter: Tissue Value: Aerial
  misc_feature: MA Experiment 20000477 PARAMETER Experiment Name: Zm_5mM_SA_P Parameter: Treatment Value: 5mM SA vs. No Treatment
  misc_feature: MA Experiment ID: 20000487 Result: Up-regulated in Transcription
  misc_feature: MA Experiment 20000487 PARAMETER Experiment Name: Zm_50mM_NH4NO3_L_to_H_P Parameter: Organism Value: Zea mays
  misc_feature: MA Experiment 20000487 PARAMETER Experiment Name: Zm_50mM_NH4NO3_L_to_H_P Parameter: Timepoint (hr) Value: 4
  misc_feature: MA Experiment 20000487 PARAMETER Experiment Name: Zm_50mM_NH4NO3_L_to_H_P Parameter: Tissue Value: Leaves
  misc_feature: MA Experiment 20000487 PARAMETER Experiment Name: Zm_50mM_NH4NO3_L_to_H_P Parameter: Treatment Value: 50mM NH4NO3 vs. 100mM Mannitol
  misc_feature: MA Experiment ID: 20000492 Result: Down-regulated in Transcription
  misc_feature: MA Experiment 20000492 PARAMETER Experiment Name: Zm_Hybrid_Seed_Dev_P Parameter: DAP Value: 12
  misc_feature: MA Experiment 20000492 PARAMETER Experiment Name: Zm_Hybrid_Seed_Dev_P Parameter: Organism Value: Zea mays
  misc_feature: MA Experiment 20000492 PARAMETER Experiment Name: Zm_Hybrid_Seed_Dev_P Parameter: Plant Line Value: 35A19
  misc_feature: MA Experiment 20000492 PARAMETER Experiment Name: Zm_Hybrid_Seed_Dev_P Parameter: Tissue Value: Fert Kernel vs. Unfert Floret
  misc_feature: MA Experiment ID: 20000532 Result: Up-regulated in Transcription
  misc_feature: MA Experiment 20000532 PARAMETER Experiment Name: Zm_0.001percent_MeJA_P Parameter: Age (day) Value: 10
  misc_feature: MA Experiment 20000532 PARAMETER Experiment Name: Zm_0.001percent_MeJA_P Parameter: Organism Value: Zea mays
  misc_feature: MA Experiment 20000532 PARAMETER Experiment Name: Zm_0.001percent_MeJA_P Parameter: Plant Line Value: 35A19
  misc_feature: MA Experiment 20000532 PARAMETER Experiment Name: Zm_0.001percent_MeJA_P Parameter: Timepoint (hr) Value: 48
  misc_feature: MA Experiment 20000532 PARAMETER Experiment Name: Zm_0.001percent_MeJA_P Parameter: Tissue Value: Aerial
  misc_feature: MA Experiment 20000532 PARAMETER Experiment Name: Zm_0.001percent_MeJA_P Parameter: Treatment Value: 0.001percent MeJA vs. No Treatment
  misc_feature: MA Experiment ID: 20000626 Result: Up-regulated in Transcription
  misc_feature: MA Experiment 20000626 PARAMETER Experiment Name: Zm_Herbicide-Treatments_P Parameter: Timepoint (hr) Value: 12
  misc_feature: MA Experiment 20000626 PARAMETER Experiment Name: Zm_Herbicide-Treatments_P Parameter: Tissue Value: Aerial
  misc_feature: MA Experiment 20000626 PARAMETER Experiment Name: Zm_Herbicide-Treatments_P Parameter: Treatment Value: Roundup vs. No Treatment
  misc_feature: MA Experiment ID: 20000629 Result: Up-regulated in Transcription
  misc_feature: MA Experiment 20000629 PARAMETER Experiment Name: Zm_Herbicide-Treatments_P Parameter: Timepoint (hr) Value: 12
  misc_feature: MA Experiment 20000629 PARAMETER Experiment Name: Zm_Herbicide-Treatments_P Parameter: Tissue Value: Aerial
  misc_feature: MA Experiment 20000629 PARAMETER Experiment Name: Zm_Herbicide-Treatments_P Parameter: Treatment Value: Trimec vs. No Treatment
  misc_feature: MA Experiment ID: 20000633 Result: Up-regulated in Transcription
  misc_feature: MA Experiment 20000633 PARAMETER Experiment Name: Zm_Herbicide-Treatments_P Parameter: Timepoint (hr) Value: 4
  misc_feature: MA Experiment 20000633 PARAMETER Experiment Name: Zm_Herbicide-Treatments_P Parameter: Tissue Value: Aerial
  misc_feature: MA Experiment 20000633 PARAMETER Experiment Name: Zm_Herbicide-Treatments_P Parameter: Treatment Value: Trimec vs. No Treatment
  misc_feature: MA Experiment ID: 20001608 Result: Down-regulated in Transcription
  misc_feature: MA Experiment 20001608 PARAMETER Experiment Name: Zm_50ppm_KNO3_L-to-H_P Parameter: Age (day) Value: 21
  misc_feature: MA Experiment 20001608 PARAMETER Experiment Name: Zm_50ppm_KNO3_L-to-H_P Parameter: Organism Value: Zea mays
  misc_feature: MA Experiment 20001608 PARAMETER Experiment Name: Zm_50ppm_KNO3_L-to-H_P Parameter: Plant Line Value: 35A19
  misc_feature: MA Experiment 20001608 PARAMETER Experiment Name: Zm_50ppm_KNO3_L-to-H_P Parameter: Timepoint (hr) Value: 48
  misc_feature: MA Experiment 20001608 PARAMETER Experiment Name: Zm_50ppm_KNO3_L-to-H_P Parameter: Tissue Value: Shoots
  misc_feature: MA Experiment 20001608 PARAMETER Experiment Name: Zm_50ppm_KNO3_L-to-H_P Parameter: Treatment Value: 50ppm KNO3 vs. 50ppm KCl

SEQ ID NO: 18003 - protein, 501 aa, Zea mays subsp. mays; identical to SEQ ID NO: 17751
  peptide (1)..(501): Ceres Seq. ID no. 12435300
  misc_feature (102)..(497): Homolog of NCBI NO: 21555230 NR Description: transporter-like protein [Arabidopsis thaliana]
  misc_feature (102)..(497): Homolog of NCBI NO: 30684567 NR Description: transporter-related protein [Arabidopsis thaliana]
  misc_feature (31)..(493): Homolog of NCBI NO: 15229781 NR Description: transporter-like protein; protein id: At3g43790.1
  misc_feature (102)..(498): Homolog of NCBI NO: 23452819 NR Description: major facilitator superfamily antiporter [Zea
  misc_feature (42)..(469): Homolog of NCBI NO: 10177340 NR Description: transporter-like protein [Arabidopsis thaliana]
  misc_feature (42)..(492): Homolog of NCBI NO: 20260160 NR Description: transporter-like protein [Arabidopsis thaliana]
  misc_feature (29)..(492): Homolog of NCBI NO: 22326785 NR Description: transporter-like protein
  misc_feature (1)..(496): Homolog of NCBI NO: 23452821 NR Description: major facilitator superfamily antiporter
  misc_feature (31)..(497): Homolog of NCBI NO: 30684565 NR Description: transporter-related protein [Arabidopsis
  misc_feature (29)..(498): Homolog of NCBI NO: 23452823 NR Description: major facilitator superfamily antiporter
  misc_feature (102)..(497): Homolog of NCBI NO: 21555230 NR Description: transporter-like protein [Arabidopsis thaliana]
  misc_feature (102)..(497): Homolog of NCBI NO: 30684567 NR Description: transporter-related protein [Arabidopsis thaliana]
  misc_feature (31)..(493): Homolog of NCBI NO: 15229781 NR Description: transporter-like protein; protein id: At3g43790.1
  misc_feature (102)..(498): Homolog of NCBI NO: 23452819 NR Description: major facilitator superfamily antiporter [Zea
  misc_feature (42)..(469): Homolog of NCBI NO: 10177340 NR Description: transporter-like protein [Arabidopsis thaliana]
  misc_feature (42)..(492): Homolog of NCBI NO: 20260160 NR Description: transporter-like protein [Arabidopsis thaliana]
  misc_feature (29)..(492): Homolog of NCBI NO: 22326785 NR Description: transporter-like protein
  misc_feature (1)..(496): Homolog of NCBI NO: 23452821 NR Description: major facilitator superfamily antiporter
  misc_feature (31)..(497): Homolog of NCBI NO: 30684565 NR Description: transporter-related protein [Arabidopsis
  misc_feature (29)..(498): Homolog of NCBI NO: 23452823 NR Description: major facilitator superfamily antiporter

SEQ ID NO: 18004 - protein, 425 aa, Zea mays subsp. mays; identical to SEQ ID NO: 17752
  peptide (1)..(425): Ceres Seq. ID no. 12435301
  misc_feature (26)..(421): Homolog of NCBI NO: 21555230 NR Description: transporter-like protein [Arabidopsis thaliana]
  misc_feature (26)..(421): Homolog of NCBI NO: 30684567 NR Description: transporter-related protein [Arabidopsis thaliana]
  misc_feature (1)..(417): Homolog of NCBI NO: 15229781 NR Description: transporter-like protein; protein id: At3g43790.1
  misc_feature (26)..(422): Homolog of NCBI NO: 23452819 NR Description: major facilitator superfamily antiporter [Zea
  misc_feature (1)..(393): Homolog of NCBI NO: 10177340 NR Description: transporter-like protein [Arabidopsis thaliana]
  misc_feature (1)..(416): Homolog of NCBI NO: 20260160 NR Description: transporter-like protein [Arabidopsis thaliana]
  misc_feature (1)..(416): Homolog of NCBI NO: 22326785 NR Description: transporter-like protein
  misc_feature (1)..(420): Homolog of NCBI NO: 23452821 NR Description: major facilitator superfamily antiporter
  misc_feature (1)..(421): Homolog of NCBI NO: 30684565 NR Description: transporter-related protein [Arabidopsis
  misc_feature (1)..(422): Homolog of NCBI NO: 23452823 NR Description: major facilitator superfamily antiporter
  misc_feature (26)..(421): Homolog of NCBI NO: 21555230 NR Description: transporter-like protein [Arabidopsis thaliana]
  misc_feature (26)..(421): Homolog of NCBI NO: 30684567 NR Description: transporter-related protein [Arabidopsis thaliana]
  misc_feature (1)..(417): Homolog of NCBI NO: 15229781 NR Description: transporter-like protein; protein id: At3g43790.1
  misc_feature (26)..(422): Homolog of NCBI NO: 23452819 NR Description: major facilitator superfamily antiporter [Zea
  misc_feature (1)..(393): Homolog of NCBI NO: 10177340 NR Description: transporter-like protein [Arabidopsis thaliana]
  misc_feature (1)..(416): Homolog of NCBI NO: 20260160 NR Description: transporter-like protein [Arabidopsis thaliana]
  misc_feature (1)..(416): Homolog of NCBI NO: 22326785 NR Description: transporter-like protein
  misc_feature (1)..(420): Homolog of NCBI NO: 23452821 NR Description: major facilitator superfamily antiporter
  misc_feature (1)..(421): Homolog of NCBI NO: 30684565 NR Description: transporter-related protein [Arabidopsis
  misc_feature (1)..(422): Homolog of NCBI NO: 23452823 NR Description: major facilitator superfamily antiporter

SEQ ID NO: 18005 - protein, 400 aa, Zea mays subsp. mays; identical to SEQ ID NO: 17753
  peptide (1)..(400): Ceres Seq. ID no. 12435302
  misc_feature (1)..(396): Homolog of NCBI NO: 21555230 NR Description: transporter-like protein [Arabidopsis thaliana]
  misc_feature (1)..(396): Homolog of NCBI NO: 30684567 NR Description: transporter-related protein [Arabidopsis thaliana]
  misc_feature (1)..(392): Homolog of NCBI NO: 15229781 NR Description: transporter-like protein; protein id: At3g43790.1
  misc_feature (1)..(397): Homolog of NCBI NO: 23452819 NR Description: major facilitator superfamily antiporter [Zea
  misc_feature (1)..(368): Homolog of NCBI NO: 10177340 NR Description: transporter-like protein [Arabidopsis thaliana]
  misc_feature (1)..(391): Homolog of NCBI NO: 20260160 NR Description: transporter-like protein [Arabidopsis thaliana]
  misc_feature (1)..(391): Homolog of NCBI NO: 22326785 NR Description: transporter-like protein
  misc_feature (1)..(395): Homolog of NCBI NO: 23452821 NR Description: major facilitator superfamily antiporter
  misc_feature (1)..(396): Homolog of NCBI NO: 30684565 NR Description: transporter-related protein [Arabidopsis
  misc_feature (1)..(397): Homolog of NCBI NO: 23452823 NR Description: major facilitator superfamily antiporter
  misc_feature (1)..(396): Homolog of NCBI NO: 21555230 NR Description: transporter-like protein [Arabidopsis thaliana]
  misc_feature (1)..(396): Homolog of NCBI NO: 30684567 NR Description: transporter-related protein [Arabidopsis thaliana]
  misc_feature (1)..(392): Homolog of NCBI NO: 15229781 NR Description: transporter-like protein; protein id: At3g43790.1
  misc_feature (1)..(397): Homolog of NCBI NO: 23452819 NR Description: major facilitator superfamily antiporter [Zea
  misc_feature (1)..(368): Homolog of NCBI NO: 10177340 NR Description: transporter-like protein [Arabidopsis thaliana]
  misc_feature (1)..(391): Homolog of NCBI NO: 20260160 NR Description: transporter-like protein [Arabidopsis thaliana]
  misc_feature (1)..(391): Homolog of NCBI NO: 22326785 NR Description: transporter-like protein
  misc_feature (1)..(395): Homolog of NCBI NO: 23452821 NR Description: major facilitator superfamily antiporter
  misc_feature (1)..(396): Homolog of NCBI NO: 30684565 NR Description: transporter-related protein [Arabidopsis
  misc_feature (1)..(397): Homolog of NCBI NO: 23452823 NR Description: major facilitator superfamily antiporter

SEQ ID NO: 18006 - DNA, 740 bp, Zea mays subsp. mays
  misc_feature (1)..(740): Ceres Seq. ID no. 12379716
  misc_feature: MA Experiment ID: 108522 Result: Up-regulated in Transcription
  misc_feature: MA Experiment 108522 PARAMETER Experiment Name: Zm_42deg_Heat_P Parameter: Age (day) Value: 8
  misc_feature: MA Experiment 108522 PARAMETER Experiment Name: Zm_42deg_Heat_P Parameter: Organism Value: Zea mays
  misc_feature: MA Experiment 108522 PARAMETER Experiment Name: Zm_42deg_Heat_P Parameter: Plant Line Value: 35A19
  misc_feature: MA Experiment 108522 PARAMETER Experiment Name: Zm_42deg_Heat_P Parameter: Temperature (deg C) Value: 42 vs. 22
  misc_feature: MA Experiment 108522 PARAMETER Experiment Name: Zm_42deg_Heat_P Parameter: Timepoint (hr) Value: 1
  misc_feature: MA Experiment 108522 PARAMETER Experiment Name: Zm_42deg_Heat_P Parameter: Tissue Value: Aerial
gcacgagaccattacctagaacatcctaatcaaaaaccgatcgagccaccgtacgtcccgccgaggagggaggccggagcgctgcgcagcgaacaacggaacagaggaacgatggcagcagcactgaaagatgcattcgtaaggaagcctgtgctggcaacgatccgcctcgtcctgccagccggcgcagcccgcacgggacctccagtgagcccagcgctgggcccctaccgggtgaacctgatggcgctctgcaaggagatcaacgccaggacgcagaggtacaagcccgacaccccgatacgggtcaccgtgaccgtctacagggacagcaccttccagctcgtggtgaagccgccctcggtgtcgtggctcctcaagaaggccgccgggatccagaccgccagccggttccccggccacgtcaccgccgcgtccctcaccgtccgccacgtgtacgagatcgcaggctgaagctgggtgacgacccctcctgcaagtacgcgtcgcttgaggccatgtgcaagtccgtcgtcgccacggcccgctccatggggatcgccatcgtcagagatctgtgatcgatcgagcagcgcgtttgtctagttggtgctgtaacggctaatagtgttagtgtctcttctttaaaaaaatcagccatggcaggggcaggcgcggtggccttcatagccacagtctggcggcgatgggaaacaattgtttaagatatggtatatact

SEQ ID NO: 18007 - protein, 157 aa, Zea mays subsp. mays
  peptide (1)..(157): Ceres Seq. ID no. 12379717
  misc_feature (54)..(113): Pfam Name: Ribosomal protein L11, N-terminal domain Pfam Description: Ribosomal protein L11, N-terminal domain
  misc_feature (49)..(156): Homolog of NCBI NO: 16330011 NR Description: 50S ribosomal protein L11 [Synechocystis sp. PCC
  misc_feature (49)..(156): Homolog of NCBI NO: 22998193 NR Description: hypothetical protein [Magnetococcus sp. MC-1]
  misc_feature (49)..(156): Homolog of NCBI NO: 22966134 NR Description: hypothetical protein [Rhodospirillum rubrum]
  misc_feature (49)..(156): Homolog of NCBI NO: 27380526 NR Description: 50S ribosomal Protein L11 [Bradyrhizobium
  misc_feature (49)..(156): Homolog of NCBI NO: 22965184 NR Description: hypothetical protein [Rhodopseudomonas palustris]
  misc_feature (49)..(156): Homolog of NCBI NO: 15606945 NR Description: ribosomal protein L11 [Aquifex aeolicus]
  misc_feature (55)..(156): Homolog of NCBI NO: 19115007 NR Description: probable 50S ribosomal protein L11
  misc_feature (40)..(156): Homolog of NCBI NO: 15823668 NR Description: mitochondrial ribosomal protein L11 [Triticum
  misc_feature (38)..(156): Homolog of NCBI NO: 15237029 NR Description: ribosomal protein L11 homolog
  misc_feature (38)..(156): Homolog of NCBI NO: 37535204 NR Description: putative ribosomal protein L11
ARDHYLEHPNQKPIEPPYVPPRREAGALRSEQRNRGTMAAALKDAFVRKPVLATIRLVLPAGAARTGPPVSPALGPYRVNLMALCKEINARTQRYKPDTPIRVTVTVYRDSTFQLVVKPPSVSWLLKKAAGIQTASRFPGHVTAASLTVRHVYEIAG

SEQ ID NO: 18008 - protein, 120 aa, Zea mays subsp. mays
  peptide (1)..(120): Ceres Seq. ID no. 12379718
  misc_feature (17)..(76): Pfam Name: Ribosomal protein L11, N-terminal domain Pfam Description: Ribosomal protein L11, N-terminal domain
  misc_feature (12)..(119): Homolog of NCBI NO: 16330011 NR Description: 50S ribosomal protein L11 [Synechocystis sp. PCC
  misc_feature (12)..(119): Homolog of NCBI NO: 22998193 NR Description: hypothetical protein [Magnetococcus sp. MC-1]
  misc_feature (12)..(119): Homolog of NCBI NO: 22966134 NR Description: hypothetical protein [Rhodospirillum rubrum]
  misc_feature (12)..(119): Homolog of NCBI NO: 27380526 NR Description: 50S ribosomal Protein L11 [Bradyrhizobium
  misc_feature (12)..(119): Homolog of NCBI NO: 22965184 NR Description: hypothetical protein [Rhodopseudomonas palustris]
  misc_feature (12)..(119): Homolog of NCBI NO: 15606945 NR Description: ribosomal protein L11 [Aquifex aeolicus]
  misc_feature (18)..(119): Homolog of NCBI NO: 19115007 NR Description: probable 50S ribosomal protein L11
  misc_feature (3)..(119): Homolog of NCBI NO: 15823668 NR Description: mitochondrial ribosomal protein L11 [Triticum
  misc_feature (1)..(119): Homolog of NCBI NO: 15237029 NR Description: ribosomal protein L11 homolog
  misc_feature (1)..(119): Homolog of NCBI NO: 37535204 NR Description: putative ribosomal protein L11
MAAALKDAFVRKPVLATIRLVLPAGAARTGPPVSPALGPYRVNLMALCKEINARTQRYKPDTPIRVTVTVYRDSTFQLVVKPPSVSWLLKKAAGIQTASRFPGHVTAASLTVRHVYEIAG

SEQ ID NO: 18009 - DNA, 1175 bp, Zea mays subsp. mays; identical to SEQ ID NO: 1897
  misc_feature (1)..(1175): Ceres Seq. ID no. 12566396
  misc_feature: MA Experiment ID: 108527 Result: Down-regulated in Transcription
  misc_feature: MA Experiment 108527 PARAMETER Experiment Name: Zm_5mM_NO_P Parameter: Age (day) Value: 8
  misc_feature: MA Experiment 108527 PARAMETER Experiment Name: Zm_5mM_NO_P Parameter: Organism Value: Zea mays
  misc_feature: MA Experiment 108527 PARAMETER Experiment Name: Zm_5mM_NO_P Parameter: Plant Line Value: 35A19
  misc_feature: MA Experiment 108527 PARAMETER Experiment Name: Zm_5mM_NO_P Parameter: Timepoint (hr) Value: 6
  misc_feature: MA Experiment 108527 PARAMETER Experiment Name: Zm_5mM_NO_P Parameter: Tissue Value: Aerial
  misc_feature: MA Experiment 108527 PARAMETER Experiment Name: Zm_5mM_NO_P Parameter: Treatment Value: 5mM NO vs. No Treatment
  misc_feature: MA Experiment ID: 108535 Result: Up-regulated in Transcription
  misc_feature: MA Experiment 108535 PARAMETER Experiment Name: Zm_Meristem_P Parameter: Age (day) Value: 8
  misc_feature: MA Experiment 108535 PARAMETER Experiment Name: Zm_Meristem_P Parameter: Organism Value: Zea mays
  misc_feature: MA Experiment 108535 PARAMETER Experiment Name: Zm_Meristem_P Parameter: Plant Line Value: 35A19
  misc_feature: MA Experiment 108535 PARAMETER Experiment Name: Zm_Meristem_P Parameter: Tissue Value: Root Meristem vs. Above Root Meristem
  misc_feature: MA Experiment ID: 108544 Result: Down-regulated in Transcription
  misc_feature: MA Experiment ID: 108559 Result: Down-regulated in Transcription
  misc_feature: MA Experiment 108559 PARAMETER Experiment Name: Zm_5mM_NO_P Parameter: Age (day) Value: 8
  misc_feature: MA Experiment 108559 PARAMETER Experiment Name: Zm_5mM_NO_P Parameter: Organism Value: Zea mays
  misc_feature: MA Experiment 108559 PARAMETER Experiment Name: Zm_5mM_NO_P Parameter: Plant Line Value: 35A19
  misc_feature: MA Experiment 108559 PARAMETER Experiment Name: Zm_5mM_NO_P Parameter: Timepoint (hr) Value: 12
  misc_feature: MA Experiment 108559 PARAMETER Experiment Name: Zm_5mM_NO_P Parameter: Tissue Value: Aerial
  misc_feature: MA Experiment 108559 PARAMETER Experiment Name: Zm_5mM_NO_P Parameter: Treatment Value: 5mM NO vs. No Treatment

SEQ ID NO: 18010 - protein, 283 aa, Zea mays subsp. mays; identical to SEQ ID NO: 1898
  peptide (1)..(283): Ceres Seq. ID no. 12566397
  misc_feature (69)..(273): Pfam Name: ER lumen protein retaining receptor Pfam Description: ER lumen protein retaining receptor
  misc_feature (69)..(283): Homolog of NCBI NO: 6685428 NR Description: ER lumen protein retaining receptor (HDEL (PGP169- 12) >gi|4105782|gb|AAD02548.1| PGPS/D6 [Petunia x
  misc_feature (69)..(283): Homolog of NCBI NO: 21592401 NR Description: ER lumen retaining receptor (HDEL receptor),
  misc_feature (69)..(283): Homolog of NCBI NO: 18404390 NR Description: ER lumen retaining receptor (HDEL receptor), protein id: At3g25040.1, supported by cDNA: 23341., supported by gi_17380929 [Arabidopsis thaliana] >gi|17380930|gb|AAL36277.1|
  misc_feature (69)..(283): Homolog of NCBI NO: 9293986 NR Description: ER lumen protein-retaining receptor-like protein
  misc_feature (69)..(283): Homolog of NCBI NO: 18397049 NR Description: ER lumen protein retaining receptor; protein id: supported by cDNA: gi_20260681 [Arabidopsis thaliana]
  misc_feature (69)..(283): Homolog of NCBI NO: 14285310 NR Description: ERD2 protein [Scherffelia dubia]
  misc_feature (69)..(282): Homolog of NCBI NO: 22656361 NR Description: endoplasmic reticulum retention receptor
  misc_feature (69)..(283): Homolog of NCBI NO: 17137442 NR Description: KDEL receptor CG5183-PA [Drosophila melanogaster]
  misc_feature (69)..(283): Homolog of NCBI NO: 17551392 NR Description: Yeast Endoplasmic Reticulum retention Defective
  misc_feature (69)..(270): Homolog of NCBI NO: 34870419 NR Description: similar to KDEL (Lys-Asp-Glu-Leu) endoplasmic

SEQ ID NO: 18011 - protein, 215 aa, Zea mays subsp. mays; identical to SEQ ID NO: 1899
  peptide (1)..(215): Ceres Seq. ID no. 12566398
  misc_feature (1)..(205): Pfam Name: ER lumen protein retaining receptor Pfam Description: ER lumen protein retaining receptor
  misc_feature (1)..(215): Homolog of NCBI NO: 6685428 NR Description: ER lumen protein retaining receptor (HDEL (PGP169- 12) >gi|4105782|gb|AAD02548.1| PGPS/D6 [Petunia x
  misc_feature (1)..(215): Homolog of NCBI NO: 21592401 NR Description: ER lumen retaining receptor (HDEL receptor),
  misc_feature (1)..(215): Homolog of NCBI NO: 18404390 NR Description: ER lumen retaining receptor (HDEL receptor), protein id: At3g25040.1, supported by cDNA: 23341., supported by gi_17380929 [Arabidopsis thaliana] >gi|17380930|gb|AAL36277.1|
  misc_feature (1)..(215): Homolog of NCBI NO: 9293986 NR Description: ER lumen protein-retaining receptor-like protein
  misc_feature (1)..(215): Homolog of NCBI NO: 18397049 NR Description: ER lumen protein retaining receptor; protein id: supported by cDNA: gi_20260681 [Arabidopsis thaliana]
  misc_feature (1)..(215): Homolog of NCBI NO: 14285310 NR Description: ERD2 protein [Scherffelia dubia]
  misc_feature (1)..(214): Homolog of NCBI NO: 22656361 NR Description: endoplasmic reticulum retention receptor
  misc_feature (1)..(215): Homolog of NCBI NO: 17137442 NR Description: KDEL receptor CG5183-PA [Drosophila melanogaster]
  misc_feature (1)..(215): Homolog of NCBI NO: 17551392 NR Description: Yeast Endoplasmic Reticulum retention Defective
  misc_feature (1)..(202): Homolog of NCBI NO: 34870419 NR Description: similar to KDEL (Lys-Asp-Glu-Leu) endoplasmic

SEQ ID NO: 18012 - protein, 206 aa, Zea mays subsp. mays; identical to SEQ ID NO: 1900
  peptide (1)..(206): Ceres Seq. ID no. 12566399
  misc_feature (1)..(196): Pfam Name: ER lumen protein retaining receptor Pfam Description: ER lumen protein retaining receptor
  misc_feature (1)..(206): Homolog of NCBI NO: 6685428 NR Description: ER lumen protein retaining receptor (HDEL (PGP169- 12) >gi|4105782|gb|AAD02548.1| PGPS/D6 [Petunia x
  misc_feature (1)..(206): Homolog of NCBI NO: 21592401 NR Description: ER lumen retaining receptor (HDEL receptor),
  misc_feature (1)..(206): Homolog of NCBI NO: 18404390 NR Description: ER lumen retaining receptor (HDEL receptor), protein id: At3g25040.1, supported by cDNA: 23341., supported by gi_17380929 [Arabidopsis thaliana] >gi|17380930|gb|AAL36277.1|
  misc_feature (1)..(206): Homolog of NCBI NO: 9293986 NR Description: ER lumen protein-retaining receptor-like protein
  misc_feature (1)..(206): Homolog of NCBI NO: 18397049 NR Description: ER lumen protein retaining receptor; protein id: supported by cDNA: gi_20260681 [Arabidopsis thaliana]
  misc_feature (1)..(206): Homolog of NCBI NO: 14285310 NR Description: ERD2 protein [Scherffelia dubia]
  misc_feature (1)..(205): Homolog of NCBI NO: 22656361 NR Description: endoplasmic reticulum retention receptor
  misc_feature (1)..(206): Homolog of NCBI NO: 17137442 NR Description: KDEL receptor CG5183-PA [Drosophila melanogaster]
  misc_feature (1)..(206): Homolog of NCBI NO: 17551392 NR Description: Yeast Endoplasmic Reticulum retention Defective
  misc_feature (1)..(193): Homolog of NCBI NO: 34870419 NR Description: similar to KDEL (Lys-Asp-Glu-Leu) endoplasmic

SEQ ID NO: 18013 - DNA, 477 bp, Zea mays subsp. mays
  misc_feature (1)..(477): Ceres Seq. ID no. 1682393
  misc_feature: MA Experiment ID: 108523 Result: Down-regulated in Transcription
  misc_feature: MA Experiment 108523 PARAMETER Experiment Name: Zm_42deg_Heat_P Parameter: Age (day) Value: 8
  misc_feature: MA Experiment 108523 PARAMETER Experiment Name: Zm_42deg_Heat_P Parameter: Organism Value: Zea mays
  misc_feature: MA Experiment 108523 PARAMETER Experiment Name: Zm_42deg_Heat_P Parameter: Plant Line Value: 35A19
  misc_feature: MA Experiment 108523 PARAMETER Experiment Name: Zm_42deg_Heat_P Parameter: Temperature (deg C) Value: 42 vs. 22
  misc_feature: MA Experiment 108523 PARAMETER Experiment Name: Zm_42deg_Heat_P Parameter: Timepoint (hr) Value: 6
  misc_feature: MA Experiment 108523 PARAMETER Experiment Name: Zm_42deg_Heat_P Parameter: Tissue Value: Aerial
  misc_feature: MA Experiment ID: 108528 Result: Down-regulated in Transcription
  misc_feature: MA Experiment 108528 PARAMETER Experiment Name: Zm_Imbibed_Seeds_P Parameter: Age (day) Value: 5 vs. 2
  misc_feature: MA Experiment 108528 PARAMETER Experiment Name: Zm_Imbibed_Seeds_P Parameter: Organism Value: Zea mays
  misc_feature: MA Experiment 108528 PARAMETER Experiment Name: Zm_Imbibed_Seeds_P Parameter: Plant Line Value: 35A19
  misc_feature: MA Experiment 108528 PARAMETER Experiment Name: Zm_Imbibed_Seeds_P Parameter: Tissue Value: Aerial vs. Embryo
aacgaaagcagcaggaagccggcggtgctagggctgtaggcgacccatggctccacagacgaggagagacaggttggcgggggaggcgcggccgagctcgtcggggctaacaccggcgaagccgggggcggtcgaggtgcagcgccgacgggcgggcagcggttggacgagccgtcggatctccatctacgcctcccgagtctacttcctcctcatcatgctccagatcccgctcttcagggtcccttgtagagctggcacatgcacaactcctattcaagtaacatcatctcagttggtctcaaatgatatattcccagcagctgttgtgaaggccatgctctaccctggagctaccgtgagcagcctaactaaaagcaagacatttccgagttggaatgacctgtttgacatgtacaacctgacagaagcaaaaaatgcttcttgcagtagttgatctccagcgtctagagatac

SEQ ID NO: 18014 - protein, 136 aa, Zea mays subsp. mays
  peptide (1)..(136): Ceres Seq. ID no. 1682394
  misc_feature (87)..(133): Homolog of NCBI NO: 8953390 NR Description: putative protein [Arabidopsis thaliana]
  misc_feature (66)..(125): Homolog of NCBI NO: 15220078 NR Description: hypothetical protein; protein id: At1g80200.1
  misc_feature (39)..(133): Homolog of NCBI NO: 17064978 NR Description: putative protein [Arabidopsis thaliana]
  misc_feature (39)..(133): Homolog of NCBI NO: 18416514 NR Description: putative protein
  misc_feature (1)..(133): Homolog of NCBI NO: 34913974 NR Description: B1110C07.25 [Oryza sativa (japonica
MAPQTRRDRLAGEARPSSSGLTPAKPGAVEVQRRRAGSGWTSRRISIYASRVYFLLIMLQIPLFRVPCRAGTCTTPIQVTSSQLVSNDIFPAAVVKAMLYPGATVSSLTKSKTFPSWNDLFDMYNLTEAKNASCSS

SEQ ID NO: 18015 - protein, 79 aa, Zea mays subsp. mays
  peptide (1)..(79): Ceres Seq. ID no. 1682395
  misc_feature (30)..(76): Homolog of NCBI NO: 8953390 NR Description: putative protein [Arabidopsis thaliana]
  misc_feature (9)..(68): Homolog of NCBI NO: 15220078 NR Description: hypothetical protein; protein id: At1g80200.1
  misc_feature (1)..(76): Homolog of NCBI NO: 17064978 NR Description: putative protein [Arabidopsis thaliana]
  misc_feature (1)..(76): Homolog of NCBI NO: 18416514 NR Description: putative protein
  misc_feature (1)..(76): Homolog of NCBI NO: 34913974 NR Description: B1110C07.25 [Oryza sativa (japonica
MLQIPLFRVPCRAGTCTTPIQVTSSQLVSNDIFPAAVVKAMLYPGATVSSLTKSKTFPSWNDLFDMYNLTEAKNASCSS

SEQ ID NO: 18016 - DNA, 697 bp, Zea mays subsp. mays
  misc_feature (1)..(697): Ceres Seq. ID no. 12359244
  misc_feature: MA Experiment ID: 108528 Result: Up-regulated in Transcription
  misc_feature: MA Experiment 108528 PARAMETER Experiment Name: Zm_Imbibed_Seeds_P Parameter: Age (day) Value: 5 vs. 2
  misc_feature: MA Experiment 108528 PARAMETER Experiment Name: Zm_Imbibed_Seeds_P Parameter: Organism Value: Zea mays
  misc_feature: MA Experiment 108528 PARAMETER Experiment Name: Zm_Imbibed_Seeds_P Parameter: Plant Line Value: 35A19
  misc_feature: MA Experiment 108528 PARAMETER Experiment Name: Zm_Imbibed_Seeds_P Parameter: Tissue Value: Aerial vs. Embryo
  misc_feature: MA Experiment ID: 108545 Result: Up-regulated in Transcription
  misc_feature: MA Experiment 108545 PARAMETER Experiment Name: Zm_Imbibed_Seeds_P Parameter: Age (day) Value: 3 vs. 2
  misc_feature: MA Experiment 108545 PARAMETER Experiment Name: Zm_Imbibed_Seeds_P Parameter: Organism Value: Zea mays
  misc_feature: MA Experiment 108545 PARAMETER Experiment Name: Zm_Imbibed_Seeds_P Parameter: Plant Line Value: 35A19
  misc_feature: MA Experiment 108545 PARAMETER Experiment Name: Zm_Imbibed_Seeds_P Parameter: Tissue Value: Aerial vs. Embryo
  misc_feature: MA Experiment ID: 108547 Result: Up-regulated in Transcription
  misc_feature: MA Experiment 108547 PARAMETER Experiment Name: Zm_Imbibed_Seeds_P Parameter: Age (day) Value: 4 vs. 2
  misc_feature: MA Experiment 108547 PARAMETER Experiment Name: Zm_Imbibed_Seeds_P Parameter: Organism Value: Zea mays
  misc_feature: MA Experiment 108547 PARAMETER Experiment Name: Zm_Imbibed_Seeds_P Parameter: Plant Line Value: 35A19
  misc_feature: MA Experiment 108547 PARAMETER Experiment Name: Zm_Imbibed_Seeds_P Parameter: Tissue Value: Aerial vs. Embryo
  misc_feature: MA Experiment ID: 20000487 Result: Up-regulated in Transcription
  misc_feature: MA Experiment 20000487 PARAMETER Experiment Name: Zm_50mM_NH4NO3_L_to_H_P Parameter: Organism Value: Zea mays
  misc_feature: MA Experiment 20000487 PARAMETER Experiment Name: Zm_50mM_NH4NO3_L_to_H_P Parameter: Timepoint (hr) Value: 4
  misc_feature: MA Experiment 20000487 PARAMETER Experiment Name: Zm_50mM_NH4NO3_L_to_H_P Parameter: Tissue Value: Leaves
  misc_feature: MA Experiment 20000487 PARAMETER Experiment Name: Zm_50mM_NH4NO3_L_to_H_P Parameter: Treatment Value: 50mM NH4NO3 vs. 100mM Mannitol
tttcctaggactctatgctaacttgcgttatcaattgctatgtggagtagaccaatatatggtcaagcgcttcgatgttttgggtgtggcaatcttcttcagcagcagcaagactgatgaatattcagattggtgaggcatcaaggaggacttggcttggcgaggaagctgatccacagtactcagatcgactgttgagagcatacaagagacctgtggaggttgacgcggaccaatcaaggtggtttatatccaaggatgcaattgtatctggccttggtcttctaggtatcaagcagggtggacctgaggcaacattttctaagtctcgtcgaaagagagtcatccgcaaaaaggtcacttcaggttgagtttagtggatttggatagcaatgctggaacaattttgcttctgttccactatgccagagggaggtctacccaaattatggtaaatgagaaaaaggtatcaagtcaaccagcacgtggtctgtcggcgaagggatcaaagggtttgttactgggaagggttagttaaaaggtgccaattactattttataatttaattgcagttatttaaggtaagaaaatatgttgttttcttgtattgctgtgaggcaaatagacacgcttagtggtagttttgtaagattgttaatgtactgactttacatgagaaatggattctgcattttt

SEQ ID NO: 18017 - protein, 98 aa, Zea mays subsp. mays
  peptide (1)..(98): Ceres Seq. ID no. 12359245
  misc_feature (11)..(97): Homolog of NCBI NO: 22327037 NR Description: putative protein
  misc_feature (11)..(97): Homolog of NCBI NO: 9759209 NR Description: gb|AAD25674.1~gene_id:MXC17.8~similar to unknown
MFWVWQSSSAAARLMNIQIGEASRRTWLGEEADPQYSDRLLRAYKRPVEVDADQSRWFISKDAIVSGLGLLGIKQGGPEATFSKSRRKRVIRKKVTSG

SEQ ID NO: 18018 - protein, 84 aa, Zea mays subsp. mays
  peptide (1)..(84): Ceres Seq. ID no. 12359246
  misc_feature (1)..(83): Homolog of NCBI NO: 22327037 NR Description: putative protein
  misc_feature (1)..(83): Homolog of NCBI NO: 9759209 NR Description: gb|AAD25674.1~gene_id:MXC17.8~similar to unknown
MNIQIGEASRRTWLGEEADPQYSDRLLRAYKRPVEVDADQSRWFISKDAIVSGLGLLGIKQGGPEATFSKSRRKRVIRKKVTSG

SEQ ID NO: 18019 - DNA, 466 bp, Zea mays subsp. mays
  misc_feature (1)..(466): Ceres Seq. ID no. 1682458
  misc_feature: MA Experiment ID: 108523 Result: Down-regulated in Transcription
  misc_feature: MA Experiment 108523 PARAMETER Experiment Name: Zm_42deg_Heat_P Parameter: Age (day) Value: 8
  misc_feature: MA Experiment 108523 PARAMETER Experiment Name: Zm_42deg_Heat_P Parameter: Organism Value: Zea mays
  misc_feature: MA Experiment 108523 PARAMETER Experiment Name: Zm_42deg_Heat_P Parameter: Plant Line Value: 35A19
  misc_feature: MA Experiment 108523 PARAMETER Experiment Name: Zm_42deg_Heat_P Parameter: Temperature (deg C) Value: 42 vs. 22
  misc_feature: MA Experiment 108523 PARAMETER Experiment Name: Zm_42deg_Heat_P Parameter: Timepoint (hr) Value: 6
  misc_feature: MA Experiment 108523 PARAMETER Experiment Name: Zm_42deg_Heat_P Parameter: Tissue Value: Aerial
  misc_feature: MA Experiment ID: 108527 Result: Down-regulated in Transcription
  misc_feature: MA Experiment 108527 PARAMETER Experiment Name: Zm_5mM_NO_P Parameter: Age (day) Value: 8
  misc_feature: MA Experiment 108527 PARAMETER Experiment Name: Zm_5mM_NO_P Parameter: Organism Value: Zea mays
  misc_feature: MA Experiment 108527 PARAMETER Experiment Name: Zm_5mM_NO_P Parameter: Plant Line Value: 35A19
  misc_feature: MA Experiment 108527 PARAMETER Experiment Name: Zm_5mM_NO_P Parameter: Timepoint (hr) Value: 6
  misc_feature: MA Experiment 108527 PARAMETER Experiment Name: Zm_5mM_NO_P Parameter: Tissue Value: Aerial
  misc_feature: MA Experiment 108527 PARAMETER Experiment Name: Zm_5mM_NO_P Parameter: Treatment Value: 5mM NO vs. No Treatment
  misc_feature: MA Experiment ID: 108528 Result: Up-regulated in Transcription
  misc_feature: MA Experiment 108528 PARAMETER Experiment Name: Zm_Imbibed_Seeds_P Parameter: Age (day) Value: 5 vs. 2
  misc_feature: MA Experiment 108528 PARAMETER Experiment Name: Zm_Imbibed_Seeds_P Parameter: Organism Value: Zea mays
  misc_feature: MA Experiment 108528 PARAMETER Experiment Name: Zm_Imbibed_Seeds_P Parameter: Plant Line Value: 35A19
  misc_feature: MA Experiment 108528 PARAMETER Experiment Name: Zm_Imbibed_Seeds_P Parameter: Tissue Value: Aerial vs. Embryo
  misc_feature: MA Experiment ID: 108530 Result: Up-regulated in Transcription
  misc_feature: MA Experiment 108530 PARAMETER Experiment Name: Zm_Imbibed_Seeds_P Parameter: Age (day) Value: 6 vs. 2
  misc_feature: MA Experiment 108530 PARAMETER Experiment Name: Zm_Imbibed_Seeds_P Parameter: Organism Value: Zea mays
  misc_feature: MA Experiment 108530 PARAMETER Experiment Name: Zm_Imbibed_Seeds_P Parameter: Plant Line Value: 35A19
  misc_feature: MA Experiment 108530 PARAMETER Experiment Name: Zm_Imbibed_Seeds_P Parameter: Tissue Value: Aerial vs. Embryo
  misc_feature: MA Experiment ID: 108534 Result: Up-regulated in Transcription
  misc_feature: MA Experiment 108534 PARAMETER Experiment Name: Zm_4deg_Cold_P Parameter: Age (hr) Value: 8
  misc_feature: MA Experiment 108534 PARAMETER Experiment Name: Zm_4deg_Cold_P Parameter: Organism Value: Zea mays
  misc_feature: MA Experiment 108534 PARAMETER Experiment Name: Zm_4deg_Cold_P Parameter: Plant Line Value: 35A19
  misc_feature: MA Experiment 108534 PARAMETER Experiment Name: Zm_4deg_Cold_P Parameter: Temperature (deg C) Value: 4 vs. 22
  misc_feature: MA Experiment 108534 PARAMETER Experiment Name: Zm_4deg_Cold_P Parameter: Timepoint (hr) Value: 6
  misc_feature: MA Experiment 108534 PARAMETER Experiment Name: Zm_4deg_Cold_P Parameter: Tissue Value: Aerial
  misc_feature: MA Experiment ID: 108545 Result: Up-regulated in Transcription
  misc_feature: MA Experiment 108545 PARAMETER Experiment Name: Zm_Imbibed_Seeds_P Parameter: Age (day) Value: 3 vs. 2
  misc_feature: MA Experiment 108545 PARAMETER Experiment Name: Zm_Imbibed_Seeds_P Parameter: Organism Value: Zea mays
  misc_feature: MA Experiment 108545 PARAMETER Experiment Name: Zm_Imbibed_Seeds_P Parameter: Plant Line Value: 35A19
  misc_feature: MA Experiment 108545 PARAMETER Experiment Name: Zm_Imbibed_Seeds_P Parameter: Tissue Value: Aerial vs. Embryo
  misc_feature: MA Experiment ID: 108547 Result: Up-regulated in Transcription
  misc_feature: MA Experiment 108547 PARAMETER Experiment Name: Zm_Imbibed_Seeds_P Parameter: Age (day) Value: 4 vs. 2
  misc_feature: MA Experiment 108547 PARAMETER Experiment Name: Zm_Imbibed_Seeds_P Parameter: Organism Value: Zea mays
  misc_feature: MA Experiment 108547 PARAMETER Experiment Name: Zm_Imbibed_Seeds_P Parameter: Plant Line Value: 35A19
  misc_feature: MA Experiment 108547 PARAMETER Experiment Name: Zm_Imbibed_Seeds_P Parameter: Tissue Value: Aerial vs. Embryo
  misc_feature: MA Experiment ID: 108556 Result: Down-regulated in Transcription
  misc_feature: MA Experiment 108556 PARAMETER Experiment Name: Zm_Drought_P Parameter: Age (day) Value: 9
  misc_feature: MA Experiment 108556 PARAMETER Experiment Name: Zm_Drought_P Parameter: Organism Value: Zea mays
  misc_feature: MA Experiment 108556 PARAMETER Experiment Name: Zm_Drought_P Parameter: Plant Line Value: 35A19
  misc_feature: MA Experiment 108556 PARAMETER Experiment Name: Zm_Drought_P Parameter: Timepoint (hr) Value: 24
  misc_feature: MA Experiment 108556 PARAMETER Experiment Name: Zm_Drought_P Parameter: Tissue Value: Aerial
  misc_feature: MA Experiment 108556 PARAMETER Experiment Name: Zm_Drought_P Parameter: Treatment Value: Drought vs. No Drought
  misc_feature: MA Experiment ID: 108559 Result: Down-regulated in Transcription
  misc_feature: MA Experiment 108559 PARAMETER Experiment Name: Zm_5mM_NO_P Parameter: Age (day) Value: 8
  misc_feature: MA Experiment 108559 PARAMETER Experiment Name: Zm_5mM_NO_P Parameter: Organism Value: Zea mays
  misc_feature: MA Experiment 108559 PARAMETER Experiment Name: Zm_5mM_NO_P Parameter: Plant Line Value: 35A19
  misc_feature: MA Experiment 108559 PARAMETER Experiment Name: Zm_5mM_NO_P Parameter: Timepoint (hr) Value: 12
  misc_feature: MA Experiment 108559 PARAMETER Experiment Name: Zm_5mM_NO_P Parameter: Tissue Value: Aerial
  misc_feature: MA Experiment 108559 PARAMETER Experiment Name: Zm_5mM_NO_P Parameter: Treatment Value: 5mM NO vs. No Treatment
  misc_feature: MA Experiment ID: 108687 Result: Down-regulated in Transcription
  misc_feature: MA Experiment 108687 PARAMETER Experiment Name: Zm_Embryos-Flowers__P Parameter: Tissue Value: Embryo vs. Aerial+
  misc_feature: MA Experiment ID: 108688 Result: Down-regulated in Transcription
  misc_feature: MA Experiment 108688 PARAMETER Experiment Name: Zm_Embryos-Flowers__P Parameter: Tissue Value: Immature Flowers vs. Aerial+
  misc_feature: MA Experiment ID: 20000478 Result: Down-regulated in Transcription
  misc_feature: MA Experiment 20000478 PARAMETER Experiment Name: Zm_5mM_SA_P Parameter: Age (day) Value: 11
  misc_feature: MA Experiment 20000478 PARAMETER Experiment Name: Zm_5mM_SA_P Parameter: Organism Value: Zea mays
  misc_feature: MA Experiment 20000478 PARAMETER Experiment Name: Zm_5mM_SA_P Parameter: Plant Line Value: 35A19
  misc_feature: MA Experiment 20000478 PARAMETER Experiment Name: Zm_5mM_SA_P Parameter: Timepoint (hr) Value: 72
  misc_feature: MA Experiment 20000478 PARAMETER Experiment Name: Zm_5mM_SA_P Parameter: Tissue Value: Aerial
  misc_feature: MA Experiment 20000478 PARAMETER Experiment Name: Zm_5mM_SA_P Parameter: Treatment Value: 5mM SA vs. No Treatment
  misc_feature: MA Experiment ID: 20000479 Result: Down-regulated in Transcription
  misc_feature: MA Experiment 20000479 PARAMETER Experiment Name: Zm_Drought_P Parameter: Age (day) Value: 10
  misc_feature: MA Experiment 20000479 PARAMETER Experiment Name: Zm_Drought_P Parameter: Organism Value: Zea mays
  misc_feature: MA Experiment 20000479 PARAMETER Experiment Name: Zm_Drought_P Parameter: Plant Line Value: 35A19
  misc_feature: MA Experiment 20000479 PARAMETER Experiment Name: Zm_Drought_P Parameter: Timepoint (hr) Value: 48
  misc_feature: MA Experiment 20000479 PARAMETER Experiment Name: Zm_Drought_P Parameter: Tissue Value: Aerial
  misc_feature: MA Experiment 20000479 PARAMETER Experiment Name: Zm_Drought_P Parameter: Treatment Value: Drought vs. No Drought
  misc_feature: MA Experiment ID: 20000480 Result: Down-regulated in Transcription
  misc_feature: MA Experiment 20000480 PARAMETER Experiment Name: Zm_Drought_P Parameter: Age (day) Value: 11
  misc_feature: MA Experiment 20000480 PARAMETER Experiment Name: Zm_Drought_P Parameter: Organism Value: Zea mays
  misc_feature: MA Experiment 20000480 PARAMETER Experiment Name: Zm_Drought_P Parameter: Plant Line Value: 35A19
  misc_feature: MA Experiment 20000480 PARAMETER Experiment Name: Zm_Drought_P Parameter: Timepoint (hr) Value: 72
  misc_feature: MA Experiment 20000480 PARAMETER Experiment Name: Zm_Drought_P Parameter: Tissue Value: Aerial
  misc_feature: MA Experiment 20000480 PARAMETER Experiment Name: Zm_Drought_P Parameter: Treatment Value: Drought vs. No Drought
tagatgttccagatgaactccttgttgaaagggtggttggaaggcggcttgatcctgtaacagggaaaatatatcatttgaagtattctccgccagagaatgaagaaatcgcttcaaggcttacacaaagatttgacgatacagaagaaaaggttaagttgaggctggagacttattaccaaaatatcgagtccttgctatcaacatatgagaacattattgtcaaagtgcaaggagatgccacagtggatgctgtctttgctaagatcgacgagctgctgggttctatcctggagaagaaaaatgaaatggtttccagcacatgagcaaggtaaaaatgattgggtgcagtgcagatccgacaagttcatgtaatgcaagtcacctctcatgataggaacttctccaggggaatatatctgaagcacaggacgacacgtacaagtaatgtaagccagtctcacgt

SEQ ID NO: 18020 - protein, 107 aa, Zea mays subsp. mays
  peptide (1)..(107): Ceres Seq. ID no. 1682459
  misc_feature (1)..(94): Homolog of NCBI NO: 34763306 NR Description: Adenylate kinase
  misc_feature (1)..(94): Homolog of NCBI NO: 19704633 NR Description: Adenylate kinase
  misc_feature (1)..(85): Homolog of NCBI NO: 37727511 NR Description: adenylate kinase [Trypanosoma cruzi]
  misc_feature (1)..(100): Homolog of NCBI NO: 23097595 NR Description: adenylate kinase [Oceanobacillus iheyensis
  misc_feature (1)..(93): Homolog of NCBI NO: 7687936 NR Description: possible adenylate kinase [Leishmania major]
  misc_feature (1)..(79): Homolog of NCBI NO: 10176815 NR Description: adenylate kinase-like [Arabidopsis thaliana]
  misc_feature (1)..(100): Homolog of NCBI NO: 22327339 NR Description: adenylate kinase -like protein
  misc_feature (1)..(107): Homolog of NCBI NO: 38175634 NR Description: putative Adenylate kinase, chloroplast
  misc_feature (1)..(106): Homolog of NCBI NO: 15238822 NR Description: putative protein
  misc_feature (1)..(107): Homolog of NCBI NO: 1170606 NR Description: ADENYLATE KINASE, CHLOROPLAST (ATP-AMP
DVPDELLVERVVGRRLDPVTGKIYHLKYSPPENEEIASRLTQRFDDTEEKVKLRLETYYQNIESLLSTYENIIVKVQGDATVDAVFAKIDELLGSILEKKNEMVSST

SEQ ID NO: 18021 - protein, 55 aa, Zea mays subsp. mays
  peptide (1)..(55): Ceres Seq. ID no. 1682460
MRTLLSKCKEMPQWMLSLLRSTSCWVLSWRRKMKWFPAHEQGKNDWVQCRSDKFM

SEQ ID NO: 18022 - DNA, 1448 bp, Zea mays subsp. mays
  misc_feature (1)..(1448): Ceres Seq. ID no. 12390259
  misc_feature: MA Experiment ID: 108528 Result: Down-regulated in Transcription
  misc_feature: MA Experiment 108528 PARAMETER Experiment Name: Zm_Imbibed_Seeds_P Parameter: Age (day) Value: 5 vs. 2
  misc_feature: MA Experiment 108528 PARAMETER Experiment Name: Zm_Imbibed_Seeds_P Parameter: Organism Value: Zea mays
  misc_feature: MA Experiment 108528 PARAMETER Experiment Name: Zm_Imbibed_Seeds_P Parameter: Plant Line Value: 35A19
  misc_feature: MA Experiment 108528 PARAMETER Experiment Name: Zm_Imbibed_Seeds_P Parameter: Tissue Value: Aerial vs. Embryo
  misc_feature: MA Experiment ID: 108535 Result: Down-regulated in Transcription
  misc_feature: MA Experiment 108535 PARAMETER Experiment Name: Zm_Meristem_P Parameter: Age (day) Value: 8
  misc_feature: MA Experiment 108535 PARAMETER Experiment Name: Zm_Meristem_P Parameter: Organism Value: Zea mays
  misc_feature: MA Experiment 108535 PARAMETER Experiment Name: Zm_Meristem_P Parameter: Plant Line Value: 35A19
  misc_feature: MA Experiment 108535 PARAMETER Experiment Name: Zm_Meristem_P Parameter: Tissue Value: Root Meristem vs. Above Root Meristem
cgcaattaaccctcactaaagggaacaaaagctggagctccaccgcggtggcggccgctctagaactagtggatcccccgggctgcaggaattcgcacgagaccattacctagaacatcctaatcgaaaaacatacaggagttaattgttgggggatgccacactagctcctcacacatggacgatgagtggaggccggtgatggccatgctcgtcttcaacctcatctctgctgtgatgacggcgctggtgaagaaggcgctccagcaagggctcaacgccctggtcctcatcactcttcgccagttggtggccactctcttcctagcaccaatagcctacttcaaagaacggaacacaaggcctaagctcacgctagagatctttgtgtaccacttcttcagtgcagcgcttggtgcttccctgtcgcagtacagcttcttctacgggctcaagttgacaactgcgacgttcgccataacatttgccaacatggctcctgtcctcaccttcctcattgccatagctctacgggtggagtcgctcaacatgaagagcaaatcagggtctgcaaagatggtggggacgctcatgtcgctcggtggagtgctgctgctgagcctctacaagggcatggccgtgacacaccacagcagcggcactcctccgccctctcaagtacaactaggcaacgacggcgacaggaaggtctggatgctggggactgtagcgttactggccaactgcctcgtcttctccctgtggttgctgctgcaaagcaggctgacgaacaagtacccggcgctctactccagcaccgccttcatgttcttcatcagcacgctgcagacaggatcgctgacggtgacggtcgagtggcaccacgcgtcggtgtggattgtcacaaagaagctggagatggtcacgatattgtattcgggaatcatggcgtctgcagcaggcttcctgataatgacctggtgcgtccacaagaggggtccagttttcactgcagccttcatccccatcgtccagatcatggtggccatcatcgatttcttcttcctccatgagcagctataccttggcagtgttctgggatccgcgctgatgatatttggactttaccttctgttgtggggaaagaagaaggatgcaatggcggcatgctctgcaggtacgaccaaacatgacgaagaggccagcatcaacaagtagcttagtgaaataatcagcagtcagcatcatcgagtggtggcaaacacagacatgtactagtggcggcatctgcaattgtttgaagaaaagaaaatctacgatcgatccagaccccttttgccatgcatgcatgagatgtgtttccagcaacactaattaacagaactgccgatcgatgatatcacgagtttattgttcataaccacttgtcaataaaaacttttgctttt

SEQ ID NO: 18023 - protein, 346 aa, Zea mays subsp. mays
  peptide (1)..(346): Ceres Seq. ID no. 12390260
  misc_feature (16)..(149): Pfam Name: Integral membrane protein DUF6 Pfam Description: Integral membrane protein DUF6
  misc_feature (3)..(346): Homolog of NCBI NO: 18378792 NR Description: expressed protein
  misc_feature (1)..(325): Homolog of NCBI NO: 15234185 NR Description: unknown protein; protein id: At4g01450.1
  misc_feature (28)..(333): Homolog of NCBI NO: 32489301 NR Description: OSJNBa0028I23.24 [Oryza sativa (japonica
  misc_feature (1)..(331): Homolog of NCBI NO: 15234182 NR Description: hypothetical protein
  misc_feature (5)..(339): Homolog of NCBI NO: 30689857 NR Description: nodulin N21 family protein [Arabidopsis thaliana]
  misc_feature (7)..(304): Homolog of NCBI NO: 34897774 NR Description: ESTs AU030746(E60179) correspond to a region of the predicted
  misc_feature (7)..(341): Homolog of NCBI NO: 6815050 NR Description: ESTs AU030746(E60179) correspond to a region of the predicted
  misc_feature (3)..(329): Homolog of NCBI NO: 34897816 NR Description: P0514G12.28 [Oryza sativa (japonica
  misc_feature (3)..(157): Homolog of NCBI NO: 34897814 NR Description: P0514G12.27 [Oryza sativa (japonica
  misc_feature (180)..(341): Homolog of NCBI NO: 34897814 NR Description: P0514G12.27 [Oryza sativa (japonica
MDDEWRPVMAMLVFNLISAVMTALVKKALQQGLNALVLITLRQLVATLFLAPIAYFKERNTRPKLTLEIFVYHFFSAALGASLSQYSFFYGLKLTTATFAITFANMAPVLTFLIAIALRVESLNMKSKSGSAKMVGTLMSLGGVLLLSLYKGMAVTHHSSGTPPPSQVQLGNDGDRKVWMLGTVALLANCLVFSLWLLLQSRLTNKYPALYSSTAFMFFISTLQTGSLTVTVEWHHASVWIVTKKLEMVTILYSGIMASAAGFLIMTWCVHKRGPVFTAAFIPIVQIMVAIIDFFFLHEQLYLGSVLGSALMIFGLYLLLWGKKKDAMAACSAGTTKHDEEASINK

SEQ ID NO: 18024 - protein, 338 aa, Zea mays subsp. mays
  peptide (1)..(338): Ceres Seq. ID no. 12390261
  misc_feature (8)..(141): Pfam Name: Integral membrane protein DUF6 Pfam Description: Integral membrane protein DUF6
  misc_feature (1)..(338): Homolog of NCBI NO: 18378792 NR Description: expressed protein
  misc_feature (1)..(317): Homolog of NCBI NO: 15234185 NR Description: unknown protein; protein id: At4g01450.1
  misc_feature (20)..(325): Homolog of NCBI NO: 32489301 NR Description: OSJNBa0028I23.24 [Oryza sativa (japonica
  misc_feature (1)..(323): Homolog of NCBI NO: 15234182 NR Description: hypothetical protein
  misc_feature (1)..(331): Homolog of NCBI NO: 30689857 NR Description: nodulin N21 family protein [Arabidopsis thaliana]
  misc_feature (1)..(296): Homolog of NCBI NO: 34897774 NR Description: ESTs AU030746(E60179) correspond to a region of the predicted
  misc_feature (1)..(333): Homolog of NCBI NO: 6815050 NR Description: ESTs AU030746(E60179) correspond to a region of the predicted
  misc_feature (1)..(321): Homolog of NCBI NO: 34897816 NR Description: P0514G12.28 [Oryza sativa (japonica
  misc_feature (1)..(149): Homolog of NCBI NO: 34897814 NR Description: P0514G12.27 [Oryza sativa (japonica
  misc_feature (172)..(333): Homolog of NCBI NO: 34897814 NR Description: P0514G12.27 [Oryza sativa (japonica
MAMLVFNLISAVMTALVKKALQQGLNALVLITLRQLVATLFLAPIAYFKERNTRPKLTLEIFVYHFFSAALGASLSQYSFFYGLKLTTATFAITFANMAPVLTFLIAIALRVESLNMKSKSGSAKMVGTLMSLGGVLLLSLYKGMAVTHHSSGTPPPSQVQLGNDGDRKVWMLGTVALLANCLVFSLWLLLQSRLTNKYPALYSSTAFMFFISTLQTGSLTVTVEWHHASVWIVTKKLEMVTILYSGIMASAAGFLIMTWCVHKRGPVFTAAFIPIVQIMVAIIDFFFLHEQLYLGSVLGSALMIFGLYLLLWGKKKDAMAACSAGTTKHDEEASINK

SEQ ID NO: 18025 - protein, 336 aa, Zea mays subsp. mays
  peptide (1)..(336): Ceres Seq. ID no. 12390262
  misc_feature (6)..(139): Pfam Name: Integral membrane protein DUF6 Pfam Description: Integral membrane protein DUF6
  misc_feature (1)..(321): Homolog of NCBI NO: 15234182 NR Description: hypothetical protein
  misc_feature (1)..(329): Homolog of NCBI NO: 30689857 NR Description: nodulin N21 family protein [Arabidopsis thaliana]
  misc_feature (1)..(294): Homolog of NCBI NO: 34897774 NR Description: ESTs AU030746(E60179) correspond to a region of the predicted
  misc_feature (1)..(331): Homolog of NCBI NO: 6815050 NR Description: ESTs AU030746(E60179) correspond to a region of the predicted
  misc_feature (1)..(315): Homolog of NCBI NO: 15234185 NR Description: unknown protein; protein id: At4g01450.1
  misc_feature (18)..(323): Homolog of NCBI NO: 32489301 NR Description: OSJNBa0028I23.24 [Oryza sativa (japonica
  misc_feature (1)..(336): Homolog of NCBI NO: 18378792 NR Description: expressed protein
  misc_feature (1)..(319): Homolog of NCBI NO: 34897816 NR Description: P0514G12.28 [Oryza sativa (japonica
  misc_feature (1)..(147): Homolog of NCBI NO: 34897814 NR Description: P0514G12.27 [Oryza sativa (japonica
  misc_feature (170)..(331): Homolog of NCBI NO: 34897814 NR Description: P0514G12.27 [Oryza sativa (japonica
MLVFNLISAVMTALVKKALQQGLNALVLITLRQLVATLFLAPIAYFKERNTRPKLTLEIFVYHFFSAALGASLSQYSFFYGLKLTTATFAITFANMAPVLTFLIAIALRVESLNMKSKSGSAKMVGTLMSLGGVLLLSLYKGMAVTHHSSGTPPPSQVQLGNDGDRKVWMLGTVALLANCLVFSLWLLLQSRLTNKYPALYSSTAFMFFISTLQTGSLTVTVEWHHASVWIVTKKLEMVTILYSGIMASAAGFLIMTWCVHKRGPVFTAAFIPIVQIMVAIIDFFFLHEQLYLGSVLGSALMIFGLYLLLWGKKKDAMAACSAGTTKHDEEASINK

SEQ ID NO: 18026 - DNA, 1252 bp, Zea mays subsp. mays
  misc_feature (1)..(1252): Ceres Seq. ID no. 12383283
  misc_feature: MA Experiment ID: 108547 Result: Down-regulated in Transcription
  misc_feature: MA Experiment 108547 PARAMETER Experiment Name: Zm_Imbibed_Seeds_P Parameter: Age (day) Value: 4 vs. 2
  misc_feature: MA Experiment 108547 PARAMETER Experiment Name: Zm_Imbibed_Seeds_P Parameter: Organism Value: Zea mays
  misc_feature: MA Experiment 108547 PARAMETER Experiment Name: Zm_Imbibed_Seeds_P Parameter: Plant Line Value: 35A19
  misc_feature: MA Experiment 108547 PARAMETER Experiment Name: Zm_Imbibed_Seeds_P Parameter: Tissue Value: Aerial vs. Embryo
gcacgagaccattacctagaacatcctaatcaaaaaaatctggttcgggctcctggatcggacccgaaaaactggtgagatttgacctacagcggagatggccaccggcgacctgcgcagcctcgccaccgtcgcggccgcggtgatcgcgtgcatgggctacgcccgcttcgccgcgcggcgactccgcccgggcctgtcccgccttgcagcgttcctcccggtgctcgccgtcttgcctttcctcccgctcgccttccgtgcgctccacccgcgcggcatctccggcttcttcctcgcctgggccgccgaattcaaactcctgctcctcgcatgcggccagcgcccgctcgatccgagcctcccgctgccctccttcaccgccatcgccaccttccccgtcacactacgggatcccaagagctccgcctcgaggccgggcctggggctcgtggagtccgcctccatggccgcgctgctcgcggccatcgtgtcgctgtactggtacgaggagcggatgaacggttacgtcctgctcacgctctactccgtgcacgtgtacctcgcgctcgagctcgtcctggcggcggccgcggtggcgtcgcgcgcgctgatgggcctggaactggagccccagttcgaccggccctacctctcgtcctcgctgcgggacttctggggccggaggtggaacctctccgttccggcgctgctccgccagtgcgtgttccgccccgtgcgcgcgcgcctcggcgccgccgcgggtgtgctagctgcgttcgtcgtctcgggcctcatgcacgaggccatgttctcctacctcacgctgctgcggccgacgggggaggcggccgcgttcttcacgctgcacggggcgtgcgcggtggcggaggggtggtgggccgcgcacgaggggtggccgcggccgccgcgcgccatggccacgccgctgacactggcgttcgtgggcgtgacggccttctggctcttctttcctccgctcacaaggcccggcgcggacaagcaggccatcgcggagtgcgaggccatggtcgcttttctgcgggacaccgcagcttgggcggtcgactccgcctggtcagtcttgtcaagctggtcgtaaattgtggtccgccgtccgcaacaggcgtgcgctgcgcctgcgcctgcgcctgcgcgtgccgtgtgctttgtcgccgtggcatctgtttgcacttttgttttgggatggtgataatttcagaaatattct

SEQ ID NO: 18027 - protein, 341 aa, Zea mays subsp. mays
  peptide (1)..(341): Ceres Seq. ID no. 12383284
  misc_feature (33)..(304): Pfam Name: MBOAT family Pfam Description: MBOAT family
  misc_feature (5)..(323): Homolog of NCBI NO: 15240497 NR Description: wax synthase-like protein; protein id:
  misc_feature (5)..(323): Homolog of NCBI NO: 15240496 NR Description: putative protein
  misc_feature (16)..(321): Homolog of NCBI NO: 15231093 NR Description: wax synthase-like protein; protein id:
  misc_feature (1)..(322): Homolog of NCBI NO: 34911838 NR Description: wax synthase-like protein
  misc_feature (1)..(324): Homolog of NCBI NO: 27728714 NR Description: wax synthase isoform 1 [Vitis vinifera]
  misc_feature (1)..(324): Homolog of NCBI NO: 27728716 NR Description: wax synthase isoform 2 [Vitis vinifera]
  misc_feature (8)..(324): Homolog of NCBI NO: 38347115 NR Description: OSJNBa0009K15.12 [Oryza sativa (japonica
  misc_feature (20)..(339): Homolog of NCBI NO: 28812087 NR Description: putative wax synthase protein
  misc_feature (1)..(341): Homolog of NCBI NO: 38345253 NR Description: OSJNBb0011N17.14 [Oryza sativa (japonica
  misc_feature (1)..(338): Homolog of NCBI NO: 38345254 NR Description: OSJNBb0011N17.15 [Oryza sativa (japonica
MATGDLRSLATVAAAVIACMGYARFAARRLRPGLSRLAAFLPVLAVLPFLPLAFRALHPRGISGFFLAWAAEFKLLLLACGQRPLDPSLPLPSFTAIATFPVTLRDPKSSASRPGLGLVESASMAALLAAIVSLYWYEERMNGYVLLTLYSVHVYLALELVLAAAAVASRALMGLELEPQFDRPYLSSSLRDFWGRRWNLSVPALLRQCVFRPVRARLGAAAGVLAAFVVSGLMHEAMFSYLTLLRPTGEAAAFFTLHGACAVAEGWWAAHEGWPRPPRAMATPLTLAFVGVTAFWLFFPPLTRPGADKQAIAECEAMVAFLRDTAAWAVDSAWSVLSSWS

SEQ ID NO: 18028 - protein, 322 aa, Zea mays subsp. mays
  peptide (1)..(322): Ceres Seq. ID no. 12383285
  misc_feature (14)..(285): Pfam Name: MBOAT family Pfam Description: MBOAT family
  misc_feature (1)..(304): Homolog of NCBI NO: 15240497 NR Description: wax synthase-like protein; protein id:
  misc_feature (1)..(304): Homolog of NCBI NO: 15240496 NR Description: putative protein
  misc_feature (1)..(302): Homolog of NCBI NO: 15231093 NR Description: wax synthase-like protein; protein id:
  misc_feature (1)..(303): Homolog of NCBI NO: 34911838 NR Description: wax synthase-like protein
  misc_feature (1)..(305): Homolog of NCBI NO: 27728714 NR Description: wax synthase isoform 1 [Vitis vinifera]
  misc_feature (1)..(305): Homolog of NCBI NO: 27728716 NR Description: wax synthase isoform 2 [Vitis vinifera]
  misc_feature (1)..(305): Homolog of NCBI NO: 38347115 NR Description: OSJNBa0009K15.12 [Oryza sativa (japonica
  misc_feature (1)..(320): Homolog of NCBI NO: 28812087 NR Description: putative wax synthase protein
  misc_feature (1)..(322): Homolog of NCBI NO: 38345253 NR Description: OSJNBb0011N17.14 [Oryza sativa (japonica
  misc_feature (1)..(319): Homolog of NCBI NO: 38345254 NR Description: OSJNBb0011N17.15 [Oryza sativa (japonica
MGYARFAARRLRPGLSRLAAFLPVLAVLPFLPLAFRALHPRGISGFFLAWAAEFKLLLLACGQRPLDPSLPLPSFTAIATFPVTLRDPKSSASRPGLGLVESASMAALLAAIVSLYWYEERMNGYVLLTLYSVHVYLALELVLAAAAVASRALMGLELEPQFDRPYLSSSLRDFWGRRWNLSVPALLRQCVFRPVRARLGAAAGVLAAFVVSGLMHEAMFSYLTLLRPTGEAAAFFTLHGACAVAEGWWAAHEGWPRPPRAMATPLTLAFVGVTAFWLFFPPLTRPGADKQAIAECEAMVAFLRDTAAWAVDSAWSVLSSWS

SEQ ID NO: 18029 - protein, 306 aa, Zea mays subsp. mays
  peptide (1)..(306): Ceres Seq. ID no. 12383286
MRPAPARSEPPAALLHRHRHLPRHTTGSQELRLEAGPGARGVRLHGRAARGHRVAVLVRGADERLRPAHALLRARVPRARARPGGGRGGVARADGPGTGAPVRPALPLVLAAGLLGPEVEPLRSGAAPPVRVPPRARAPRRRRGCASCVRRLGPHARGHVLLPHAAAADGGGGRVLHAARGVRGGGGVVGRARGVAAAAARHGHAADTGVRGRDGLLALLSSAHKARRGQAGHRGVRGHGRFSAGHRSLGGRLRLVSLVKLVVNCGPPSATGVRCACACACACRVLCRRGICLHFCFGMVIISEIF

SEQ ID NO: 18030 - DNA, 696 bp, Zea mays subsp. mays
  misc_feature (1)..(696): Ceres Seq. ID no. 12377779
  misc_feature: MA Experiment ID: 108529 Result: Up-regulated in Transcription
  misc_feature: MA Experiment 108529 PARAMETER Experiment Name: Zm_Imbibed_Seeds_P Parameter: Age (day) Value: 5 vs. 2
  misc_feature: MA Experiment 108529 PARAMETER Experiment Name: Zm_Imbibed_Seeds_P Parameter: Organism Value: Zea mays
  misc_feature: MA Experiment 108529 PARAMETER Experiment Name: Zm_Imbibed_Seeds_P Parameter: Plant Line Value: 35A19
  misc_feature: MA Experiment 108529 PARAMETER Experiment Name: Zm_Imbibed_Seeds_P Parameter: Tissue Value: Roots vs. Embryo
  misc_feature: MA Experiment ID: 108546 Result: Up-regulated in Transcription
  misc_feature: MA Experiment 108546 PARAMETER Experiment Name: Zm_Imbibed_Seeds_P Parameter: Age (day) Value: 3 vs. 2
  misc_feature: MA Experiment 108546 PARAMETER Experiment Name: Zm_Imbibed_Seeds_P Parameter: Organism Value: Zea mays
  misc_feature: MA Experiment 108546 PARAMETER Experiment Name: Zm_Imbibed_Seeds_P Parameter: Plant Line Value: 35A19
  misc_feature: MA Experiment 108546 PARAMETER Experiment Name: Zm_Imbibed_Seeds_P Parameter: Tissue Value: Roots vs. Embryo
  misc_feature: MA Experiment ID: 20000478 Result: Down-regulated in Transcription
  misc_feature: MA Experiment 20000478 PARAMETER Experiment Name: Zm_5mM_SA_P Parameter: Age (day) Value: 11
  misc_feature: MA Experiment 20000478 PARAMETER Experiment Name: Zm_5mM_SA_P Parameter: Organism Value: Zea mays
  misc_feature: MA Experiment 20000478 PARAMETER Experiment Name: Zm_5mM_SA_P Parameter: Plant Line Value: 35A19
  misc_feature: MA Experiment 20000478 PARAMETER Experiment Name: Zm_5mM_SA_P Parameter: Timepoint (hr) Value: 72
  misc_feature: MA Experiment 20000478 PARAMETER Experiment Name: Zm_5mM_SA_P Parameter: Tissue Value: Aerial
  misc_feature: MA Experiment 20000478 PARAMETER Experiment Name: Zm_5mM_SA_P Parameter: Treatment Value: 5mM SA vs. No Treatment
  misc_feature: MA Experiment ID: 20000479 Result: Down-regulated in Transcription
  misc_feature: MA Experiment 20000479 PARAMETER Experiment Name: Zm_Drought_P Parameter: Age (day) Value: 10
  misc_feature: MA Experiment 20000479 PARAMETER Experiment Name: Zm_Drought_P Parameter: Organism Value: Zea mays
  misc_feature: MA Experiment 20000479 PARAMETER Experiment Name: Zm_Drought_P Parameter: Plant Line Value: 35A19
  misc_feature: MA Experiment 20000479 PARAMETER Experiment Name: Zm_Drought_P Parameter: Timepoint (hr) Value: 48
  misc_feature: MA Experiment 20000479 PARAMETER Experiment Name: Zm_Drought_P Parameter: Tissue Value: Aerial
  misc_feature: MA Experiment 20000479 PARAMETER Experiment Name: Zm_Drought_P Parameter: Treatment Value: Drought vs. No Drought
  misc_feature: MA Experiment ID: 20000535 Result: Down-regulated in Transcription
  misc_feature: MA Experiment 20000535 PARAMETER Experiment Name: Zm_Hybrid_Seed_Dev_P Parameter: DAP Value: 30 vs. 12
  misc_feature: MA Experiment 20000535 PARAMETER Experiment Name: Zm_Hybrid_Seed_Dev_P Parameter: Organism Value: Zea mays
  misc_feature: MA Experiment 20000535 PARAMETER Experiment Name: Zm_Hybrid_Seed_Dev_P Parameter: Plant Line Value: 35A19
  misc_feature: MA Experiment 20000535 PARAMETER Experiment Name: Zm_Hybrid_Seed_Dev_P Parameter: Tissue Value: Embryo vs. Unfert Floret
aaacactgtcgccgtccttctgtcgacgtacagcagatggagaactgcgaggtactcttcccgggaggcagcagcggggccaacgcgttcaccaggccagagcaggagaggaagcgcgggcagccatggacggaggaggagcacaagttgtttctcttgggcctgaagaaatatggccggggggattggaggaacatatcgcgcaattttgttcagaccaggacgcctactcaggtggtcagccatgcgcagaagtacttcatgaggcacaactccggcggcaaggacaagagaagatccagcatccacgacatcaccacagttaagctgagcgacgaccaggaccagcctccgtcctcgccatcccagtcctctctgatcactgaccagttcaacgcattagctctgacatccggcgctgcgtattcgccctccaattaacctttgcggctttgccggactactgggatatgtatatgccaatctttggaacggggtttgcaagatcaacgcctgcagtgtggcccgttcaattggatggaagctagaacattctgttttttttgggtgcaattcagtctgcagcaccatgaatctatcagatttctatctacttgtatagtacagactggagagaccgggagtgttaacaagtttgttgtatcatcttgtgtggtgtaataaacctgnaatttg

SEQ ID NO: 18031 - protein, 146 aa, Zea mays subsp. mays
  peptide (1)..(146): Ceres Seq. ID no. 12377780
  misc_feature (40)..(87): Pfam Name: Myb-like DNA-binding domain Pfam Description: Myb-like DNA-binding domain
  misc_feature (33)..(112): Homolog of NCBI NO: 15240915 NR Description: myb family transcription factor; protein id:
  misc_feature (22)..(136): Homolog of NCBI NO: 34914460 NR Description: putative syringolide-induced protein 1-3-1B
  misc_feature (22)..(115): Homolog of NCBI NO: 30687381 NR Description: MYB family transcription factor -related
  misc_feature (22)..(115): Homolog of NCBI NO: 7446171 NR Description: probable MYB family transcription factor
  misc_feature (33)..(134): Homolog of NCBI NO: 15237776 NR Description: I-box binding factor - like protein; protein id:
  misc_feature (21)..(125): Homolog of NCBI NO: 12005328 NR Description: unknown [Hevea brasiliensis]
  misc_feature (33)..(145): Homolog of NCBI NO: 34908386 NR Description: P0529E05.19 [Oryza sativa (japonica
  misc_feature (31)..(138): Homolog of NCBI NO: 18874265 NR Description: MYB-like transcription factor DVL1 [Antirrhinum
  misc_feature (23)..(124): Homolog of NCBI NO: 18874263 NR Description: MYB-like transcription factor DIVARICATA
  misc_feature (20)..(146): Homolog of NCBI NO: 34895714 NR Description: putative myb-related transcription activator
KHCRRPSVDVQQMENCEVLFPGGSSGANAFTRPEQERKRGQPWTEEEHKLFLLGLKKYGRGDWRNISRNFVQTRTPTQVVSHAQKYFMRHNSGGKDKRRSSIHDITTVKLSDDQDQPPSSPSQSSLITDQFNALALTSGAAYSPSN

SEQ ID NO: 18032 - protein, 134 aa, Zea mays subsp. mays
  peptide (1)..(134): Ceres Seq. ID no. 12377781
  misc_feature (28)..(75): Pfam Name: Myb-like DNA-binding domain Pfam Description: Myb-like DNA-binding domain
  misc_feature (21)..(100): Homolog of NCBI NO: 15240915 NR Description: myb family transcription factor; protein id:
  misc_feature (10)..(124): Homolog of NCBI NO: 34914460 NR Description: putative syringolide-induced protein 1-3-1B
  misc_feature (10)..(103): Homolog of NCBI NO: 30687381 NR Description: MYB family transcription factor -related
  misc_feature (10)..(103): Homolog of NCBI NO: 7446171 NR Description: probable MYB family transcription factor
  misc_feature (21)..(122): Homolog of NCBI NO: 15237776 NR Description: I-box binding factor - like protein; protein id:
  misc_feature (9)..(113): Homolog of NCBI NO: 12005328 NR Description: unknown [Hevea brasiliensis]
  misc_feature (21)..(133): Homolog of NCBI NO: 34908386 NR Description: P0529E05.19 [Oryza sativa (japonica
  misc_feature (19)..(126): Homolog of NCBI NO: 18874265 NR Description: MYB-like transcription factor DVL1 [Antirrhinum
  misc_feature (11)..(112): Homolog of NCBI NO: 18874263 NR Description: MYB-like transcription factor DIVARICATA
  misc_feature (8)..(134): Homolog of NCBI NO: 34895714 NR Description: putative myb-related transcription activator
MENCEVLFPGGSSGANAFTRPEQERKRGQPWTEEEHKLFLLGLKKYGRGDWRNISRNFVQTRTPTQVVSHAQKYFMRHNSGGKDKRRSSIHDITTVKLSDDQDQPPSSPSQSSLITDQFNALALTSGAAYSPSN

SEQ ID NO: 18033 - protein, 107 aa, Zea mays subsp. mays
  peptide (1)..(107): Ceres Seq. ID no. 12377782
TLSPSFCRRTADGELRGTLPGRQQRGQRVHQARAGEEARAAMDGGGAQVVSLGPEEIWPGGLEEHIAQFCSDQDAYSGGQPCAEVLHEAQLRRQGQEKIQHPRHHHS

SEQ ID NO: 18034 - DNA, 1079 bp, Zea mays subsp. mays
  misc_feature (1)..(1079): Ceres Seq. ID no. 14305350
  misc_feature: MA Experiment ID: 20000479 Result: Up-regulated in Transcription
  misc_feature: MA Experiment 20000479 PARAMETER Experiment Name: Zm_Drought_P Parameter: Age (day) Value: 10
  misc_feature: MA Experiment 20000479 PARAMETER Experiment Name: Zm_Drought_P Parameter: Organism Value: Zea mays
  misc_feature: MA Experiment 20000479 PARAMETER Experiment Name: Zm_Drought_P Parameter: Plant Line Value: 35A19
  misc_feature: MA Experiment 20000479 PARAMETER Experiment Name: Zm_Drought_P Parameter: Timepoint (hr) Value: 48
  misc_feature: MA Experiment 20000479 PARAMETER Experiment Name: Zm_Drought_P Parameter: Tissue Value: Aerial
  misc_feature: MA Experiment 20000479 PARAMETER Experiment Name: Zm_Drought_P Parameter: Treatment Value: Drought vs. No Drought
ctatttgcggaaaggaacttctgttagtgctggccaaacatcaagttcatcaaatggaacaactgcaggagaaaggcctctcctacgtgagaaattgtcaaagggaaaggatggctttgttgctgctgatttcacagctacagaagctcattgtgctgtaccctcgactccaatactttggttccagcaggcagatgagtgcatgcacctatgcatttatcagcacaaaagtctcactatcttactgctggttcctgcttcctcagtgataaatggagaagagggcattactcatgtgaagaaggcgatccttgaaaatgcatcacagaagattgtcactgttgagcagaaattgacacggggatggggaggagaaaatgcgtatcatgttagtggatatcgttatttgcttgttgatccggagagaagagtatcaagagcctccccacctgggaaagtcaccaccctagcaaaggattctctacttgccctcaacatgctaagacaagaagtagatctagagaagtcaagatacaagagaggtgacccttgtcgtgataaggatttcgaagtatgtatcagaacaaaaaacaatgcgtgggttattgctaaaatcagtcaaggaagggagctttacatggctctagagaagggtggtgaaacgcttctatatgcatccacagctgtagagaaattcagcaacaggtactgtgagggagtattctctacagattagaagcaccagagggagatcttagcttttccatacattacctattatgtacatcctgttttttccccagctgtatcgttgccccccattgttgagagactcggaccactctttgcgaagggaataaggagttcgtatcagttgtacagctgctctgctaccgtgtgctatctgcaaaagaatagcctagtctgggaataacgcagagcgggatagagtttgtttgttcacgggtcttatgtccttccttaacgcagagcattgtgcgtgttttcattttgctgtaacagccggcgatttacctgcagactgggaaagtaacttagcgtttcatttggtattctgc

SEQ ID NO: 18035 - protein, 244 aa, Zea mays subsp. mays
  peptide (1)..(244): Ceres Seq. ID no. 14305351
  misc_feature (1)..(244): Homolog of NCBI NO: 18266049 NR Description: myrosinase precursor [Brassica oleracea]
  misc_feature (8)..(235): Homolog of NCBI NO: 14517360 NR Description: At1g80910/F23A5_21 [Arabidopsis thaliana]
  misc_feature (16)..(244): Homolog of NCBI NO: 30684673 NR Description: expressed protein [Arabidopsis thaliana]
  misc_feature (16)..(244): Homolog of NCBI NO: 21618002 NR Description: unknown [Arabidopsis thaliana]
  misc_feature (16)..(244): Homolog of NCBI NO: 18394314 NR Description: expressed protein [Arabidopsis thaliana]
  misc_feature (8)..(244): Homolog of NCBI NO: 25372816 NR Description: F23A5.27 [imported] - Arabidopsis thaliana
  misc_feature (8)..(244): Homolog of NCBI NO: 15220866 NR Description: myrosinase precursor -related [Arabidopsis
  misc_feature (1)..(244): Homolog of NCBI NO: 38175489 NR Description: putative myrosinase precursor
YLRKGTSVSAGQTSSSSNGTTAGERPLLREKLSKGKDGFVAADFTATEAHCAVPSTPILWFQQADECMHLCIYQHKSLTILLLVPASSVINGEEGITHVKKAILENASQKIVTVEQKLTRGWGGENAYHVSGYRYLLVDPERRVSRASPPGKVTTLAKDSLLALNMLRQEVDLEKSRYKRGDPCRDKDFEVCIRTKNNAWVIAKISQGRELYMALEKGGETLLYASTAVEKFSNRYCEGVFSTD

SEQ ID NO: 18036 - protein, 177 aa, Zea mays subsp. mays
  peptide (1)..(177): Ceres Seq. ID no. 14305352
  misc_feature (1)..(177): Homolog of NCBI NO: 18266049 NR Description: myrosinase precursor [Brassica oleracea]
  misc_feature (1)..(168): Homolog of NCBI NO: 14517360 NR Description: At1g80910/F23A5_21 [Arabidopsis thaliana]
  misc_feature (1)..(177): Homolog of NCBI NO: 30684673 NR Description: expressed protein [Arabidopsis thaliana]
  misc_feature (1)..(177): Homolog of NCBI NO: 21618002 NR Description: unknown [Arabidopsis thaliana]
  misc_feature (1)..(177): Homolog of NCBI NO: 18394314 NR Description: expressed protein [Arabidopsis thaliana]
  misc_feature (1)..(177): Homolog of NCBI NO: 25372816 NR Description: F23A5.27 [imported] - Arabidopsis thaliana
  misc_feature (1)..(177): Homolog of NCBI NO: 15220866 NR Description: myrosinase precursor -related [Arabidopsis
  misc_feature (1)..(177): Homolog of NCBI NO: 38175489 NR Description: putative myrosinase precursor
MHLCIYQHKSLTILLLVPASSVINGEEGITHVKKAILENASQKIVTVEQKLTRGWGGENAYHVSGYRYLLVDPERRVSRASPPGKVTTLAKDSLLALNMLRQEVDLEKSRYKRGDPCRDKDFEVCIRTKNNAWVIAKISQGRELYMALEKGGETLLYASTAVEKFSNRYCEGVFSTD

SEQ ID NO: 18037 - DNA, 1208 bp, Zea mays subsp. mays
  misc_feature (1)..(1208): Ceres Seq. ID no. 12416178
  misc_feature: MA Experiment ID: 108523 Result: Down-regulated in Transcription
  misc_feature: MA Experiment 108523 PARAMETER Experiment Name: Zm_42deg_Heat_P Parameter: Age (day) Value: 8
  misc_feature: MA Experiment 108523 PARAMETER Experiment Name: Zm_42deg_Heat_P Parameter: Organism Value: Zea mays
  misc_feature: MA Experiment 108523 PARAMETER Experiment Name: Zm_42deg_Heat_P Parameter: Plant Line Value: 35A19
  misc_feature: MA Experiment 108523 PARAMETER Experiment Name: Zm_42deg_Heat_P Parameter: Temperature (deg C) Value: 42 vs. 22
  misc_feature: MA Experiment 108523 PARAMETER Experiment Name: Zm_42deg_Heat_P Parameter: Timepoint (hr) Value: 6
  misc_feature: MA Experiment 108523 PARAMETER Experiment Name: Zm_42deg_Heat_P Parameter: Tissue Value: Aerial
  misc_feature: MA Experiment ID: 108527 Result: Down-regulated in Transcription
  misc_feature: MA Experiment 108527 PARAMETER Experiment Name: Zm_5mM_NO_P Parameter: Age (day) Value: 8
  misc_feature: MA Experiment 108527 PARAMETER Experiment Name: Zm_5mM_NO_P Parameter: Organism Value: Zea mays
  misc_feature: MA Experiment 108527 PARAMETER Experiment Name: Zm_5mM_NO_P Parameter: Plant Line Value: 35A19
  misc_feature: MA Experiment 108527 PARAMETER Experiment Name: Zm_5mM_NO_P Parameter: Timepoint (hr) Value: 6
  misc_feature: MA Experiment 108527 PARAMETER Experiment Name: Zm_5mM_NO_P Parameter: Tissue Value: Aerial
  misc_feature: MA Experiment 108527 PARAMETER Experiment Name: Zm_5mM_NO_P Parameter: Treatment Value: 5mM NO vs. No Treatment
  misc_feature: MA Experiment ID: 108528 Result: Up-regulated in Transcription
  misc_feature: MA Experiment 108528 PARAMETER Experiment Name: Zm_Imbibed_Seeds_P Parameter: Age (day) Value: 5 vs. 2
  misc_feature: MA Experiment 108528 PARAMETER Experiment Name: Zm_Imbibed_Seeds_P Parameter: Organism Value: Zea mays
  misc_feature: MA Experiment 108528 PARAMETER Experiment Name: Zm_Imbibed_Seeds_P Parameter: Plant Line Value: 35A19
  misc_feature: MA Experiment 108528 PARAMETER Experiment Name: Zm_Imbibed_Seeds_P Parameter: Tissue Value: Aerial vs. Embryo
  misc_feature: MA Experiment ID: 108529 Result: Up-regulated in Transcription
  misc_feature: MA Experiment 108529 PARAMETER Experiment Name: Zm_Imbibed_Seeds_P Parameter: Age (day) Value: 5 vs. 2
  misc_feature: MA Experiment 108529 PARAMETER Experiment Name: Zm_Imbibed_Seeds_P Parameter: Organism Value: Zea mays
  misc_feature: MA Experiment 108529 PARAMETER Experiment Name: Zm_Imbibed_Seeds_P Parameter: Plant Line Value: 35A19
  misc_feature: MA Experiment 108529 PARAMETER Experiment Name: Zm_Imbibed_Seeds_P Parameter: Tissue Value: Roots vs. Embryo
  misc_feature: MA Experiment ID: 108530 Result: Up-regulated in Transcription
  misc_feature: MA Experiment 108530 PARAMETER Experiment Name: Zm_Imbibed_Seeds_P Parameter: Age (day) Value: 6 vs. 2
  misc_feature: MA Experiment 108530 PARAMETER Experiment Name: Zm_Imbibed_Seeds_P Parameter: Organism Value: Zea mays
  misc_feature: MA Experiment 108530 PARAMETER Experiment Name: Zm_Imbibed_Seeds_P Parameter: Plant Line Value: 35A19
  misc_feature: MA Experiment 108530 PARAMETER Experiment Name: Zm_Imbibed_Seeds_P Parameter: Tissue Value: Aerial vs. Embryo
  misc_feature: MA Experiment ID: 108535 Result: Down-regulated in Transcription
  misc_feature: MA Experiment 108535 PARAMETER Experiment Name: Zm_Meristem_P Parameter: Age (day) Value: 8
  misc_feature: MA Experiment 108535 PARAMETER Experiment Name: Zm_Meristem_P Parameter: Organism Value: Zea mays
  misc_feature: MA Experiment 108535 PARAMETER Experiment Name: Zm_Meristem_P Parameter: Plant Line Value: 35A19
  misc_feature: MA Experiment 108535 PARAMETER Experiment Name: Zm_Meristem_P Parameter: Tissue Value: Root Meristem vs. Above Root Meristem
  misc_feature: MA Experiment ID: 108543 Result: Down-regulated in Transcription
  misc_feature: MA Experiment ID: 108546 Result: Up-regulated in Transcription
  misc_feature: MA Experiment 108546 PARAMETER Experiment Name: Zm_Imbibed_Seeds_P Parameter: Age (day) Value: 3 vs. 2
  misc_feature: MA Experiment 108546 PARAMETER Experiment Name: Zm_Imbibed_Seeds_P Parameter: Organism Value: Zea mays
  misc_feature: MA Experiment 108546 PARAMETER Experiment Name: Zm_Imbibed_Seeds_P Parameter: Plant Line Value: 35A19
  misc_feature: MA Experiment 108546 PARAMETER Experiment Name: Zm_Imbibed_Seeds_P Parameter: Tissue Value: Roots vs. Embryo
  misc_feature: MA Experiment ID: 108556 Result: Down-regulated in Transcription
  misc_feature: MA Experiment 108556 PARAMETER Experiment Name: Zm_Drought_P Parameter: Age (day) Value: 9
  misc_feature: MA Experiment 108556 PARAMETER Experiment Name: Zm_Drought_P Parameter: Organism Value: Zea mays
  misc_feature: MA Experiment 108556 PARAMETER Experiment Name: Zm_Drought_P Parameter: Plant Line Value: 35A19
  misc_feature: MA Experiment 108556 PARAMETER Experiment Name: Zm_Drought_P Parameter: Timepoint (hr) Value: 24
  misc_feature: MA Experiment 108556 PARAMETER Experiment Name: Zm_Drought_P Parameter: Tissue Value: Aerial
  misc_feature: MA Experiment 108556 PARAMETER Experiment Name: Zm_Drought_P Parameter: Treatment Value: Drought vs. No Drought
  misc_feature: MA Experiment ID: 108597 Result: Down-regulated in Transcription
  misc_feature: MA Experiment 108597 PARAMETER Experiment Name: Zm_100uM_ABA_P Parameter: Age (day) Value: 9
  misc_feature: MA Experiment 108597 PARAMETER Experiment Name: Zm_100uM_ABA_P Parameter: Organism Value: Zea mays
  misc_feature: MA Experiment 108597 PARAMETER Experiment Name: Zm_100uM_ABA_P Parameter: Plant Line Value: 35A19
  misc_feature: MA Experiment 108597 PARAMETER Experiment Name: Zm_100uM_ABA_P Parameter: Timepoint (hr) Value: 24
  misc_feature: MA Experiment 108597 PARAMETER Experiment Name: Zm_100uM_ABA_P Parameter: Tissue Value: Aerial
  misc_feature: MA Experiment 108597 PARAMETER Experiment Name: Zm_100uM_ABA_P Parameter: Treatment Value: 100uM ABA vs. No Treatment
  misc_feature: MA Experiment ID: 20000479 Result: Down-regulated in Transcription
  misc_feature: MA Experiment 20000479 PARAMETER Experiment Name: Zm_Drought_P Parameter: Age (day) Value: 10
  misc_feature: MA Experiment 20000479 PARAMETER Experiment Name: Zm_Drought_P Parameter: Organism Value: Zea mays
  misc_feature: MA Experiment 20000479 PARAMETER Experiment Name: Zm_Drought_P Parameter: Plant Line Value: 35A19
  misc_feature: MA Experiment 20000479 PARAMETER Experiment Name: Zm_Drought_P Parameter: Timepoint (hr) Value: 48
  misc_feature: MA Experiment 20000479 PARAMETER Experiment Name: Zm_Drought_P Parameter: Tissue Value: Aerial
  misc_feature: MA Experiment 20000479 PARAMETER Experiment Name: Zm_Drought_P Parameter: Treatment Value: Drought vs. No Drought
  misc_feature: MA Experiment ID: 20000480 Result: Down-regulated in Transcription
  misc_feature: MA Experiment 20000480 PARAMETER Experiment Name: Zm_Drought_P Parameter: Age (day) Value: 11
  misc_feature: MA Experiment 20000480 PARAMETER Experiment Name: Zm_Drought_P Parameter: Organism Value: Zea mays
  misc_feature: MA Experiment 20000480 PARAMETER Experiment Name: Zm_Drought_P Parameter: Plant Line Value: 35A19
  misc_feature: MA Experiment 20000480 PARAMETER Experiment Name: Zm_Drought_P Parameter: Timepoint (hr) Value: 72
  misc_feature: MA Experiment 20000480 PARAMETER Experiment Name: Zm_Drought_P Parameter: Tissue Value: Aerial
  misc_feature: MA Experiment 20000480 PARAMETER Experiment Name: Zm_Drought_P Parameter: Treatment Value: Drought vs. No Drought
  misc_feature: MA Experiment ID: 20000630 Result: Down-regulated in Transcription
  misc_feature: MA Experiment 20000630 PARAMETER Experiment Name: Zm_Herbicide-Treatments_P Parameter: Timepoint (hr) Value: 4
  misc_feature: MA Experiment 20000630 PARAMETER Experiment Name: Zm_Herbicide-Treatments_P Parameter: Tissue Value: Aerial
  misc_feature: MA Experiment 20000630 PARAMETER Experiment Name: Zm_Herbicide-Treatments_P Parameter: Treatment Value: Roundup vs. No Treatment
tatgctacgccaagcccgcaattaaccctcactaaagggaacaaaagctggagctccaccgcggtggcggccgctctagaactagtggatcccccgggctgcaggaattcgcacgagaccattacctagaacatcctaatcgaaaagttgcgttccagggcgagctatcgcgcagcaggcacagcgccctacaacgcccggccgtgcaaactaaccttcggatcagatggagacgccggcggcggactcctccggcggcgaccgctacaggtcccacctggctggcgagggcgagaagcacaccgtgtggcggcacggcgcgccgccctcgtacgacgccgtgaacgcgctcttcgaggccgagcgcacgcaggagtggccggcggggtcgctggaggagatcgtgcagaacgcgatcaagacgtgggagatggagctgtcgcacaaggcgcggctgtcggacttcaagtccgtgagccccggcaggttcaggctgtccgtgaacggcggtcgggcccggagcggggaggagacgctggccgtgggcagctacaacgcgctgctggacagcccgctcctggcgcgcgcgggcgcgtacgacgcctccgccgagacgttccggtcctcgcacgacctgttccgcgccgcgttcccgcgcggcttcgcctgggaggtgctcaaggtctactccggcccgccgctgctcgccttcaagttccggcactggggccacaaggaggggccctacaagggccacgccgccaccggcgacaaggtcgagttcttcggcgtcgccgtgcttaaggtggacgatgagctgcgagcggaagacgtggaggtgtactacgacccgggcgagcttttgggaggccttctcaagggacccaaggtggcttcctccgaggaggaccgccgcgaggccgctgccgtgtcggcgtcaggtgctgtcccgccgccgctagcttgcccctttctcaaccccgggaagccacagtgatcaaccagcaccccccatttatgtagcggtttggtgaataagtgaaagcttaaaatgacggtgttcctggtcgtccatggacatcactgagggtacttgtaccccattgattaattgatgtttcatgaccagaagaaattgttcgcgtaataattgtgtgatattccttcacccaaaaataaataaaaataaagcaacgcgtaattgttcc

SEQ ID NO: 18038 - protein, 256 aa, Zea mays subsp. mays
  peptide (1)..(256): Ceres Seq. ID no. 12416179
  misc_feature (25)..(231): Homolog of NCBI NO: 17232111 NR Description: similar to pathogenesis related protein [Nostoc
  misc_feature (28)..(226): Homolog of NCBI NO: 17227713 NR Description: similar to pathogenesis related protein [Nostoc
  misc_feature (69)..(226): Homolog of NCBI NO: 30699354 NR Description: expressed protein [Arabidopsis thaliana]
  misc_feature (5)..(225): Homolog of NCBI NO: 1346809 NR Description: Pathogen-related protein
  misc_feature (5)..(227): Homolog of NCBI NO: 34904656 NR Description: putative pathogenesis related protein
  misc_feature (8)..(226): Homolog of NCBI NO: 34904652 NR Description: putative pathogenesis related protein
  misc_feature (21)..(226): Homolog of NCBI NO: 25372796 NR Description: hypothetical protein F9K20.18 [imported] -
  misc_feature (12)..(226): Homolog of NCBI NO: 18412106 NR Description: expressed protein
  misc_feature (5)..(254): Homolog of NCBI NO: 34910864 NR Description: putative pathogenesis related protein
  misc_feature (1)..(254): Homolog of NCBI NO: 34910862 NR Description: putative pathogenesis related protein
METPAADSSGGDRYRSHLAGEGEKHTVWRHGAPPSYDAVNALFEAERTQEWPAGSLEEIVQNAIKTWEMELSHKARLSDFKSVSPGRFRLSVNGGRARSGEETLAVGSYNALLDSPLLARAGAYDASAETFRSSHDLFRAAFPRGFAWEVLKVYSGPPLLAFKFRHWGHKEGPYKGHAATGDKVEFFGVAVLKVDDELRAEDVEVYYDPGELLGGLLKGPKVASSEEDRREAAAVSASGAVPPPLACPFLNPGKPQ

SEQ ID NO: 18039 - protein, 188 aa, Zea mays subsp. mays
  peptide (1)..(188): Ceres Seq. ID no. 12416180
  misc_feature (1)..(163): Homolog of NCBI NO: 17232111 NR Description: similar to pathogenesis related protein [Nostoc
  misc_feature (1)..(158): Homolog of NCBI NO: 17227713 NR Description: similar to pathogenesis related protein [Nostoc
  misc_feature (1)..(158): Homolog of NCBI NO: 30699354 NR Description: expressed protein [Arabidopsis thaliana]
  misc_feature (1)..(157): Homolog of NCBI NO: 1346809 NR Description: Pathogen-related protein
  misc_feature (1)..(159): Homolog of NCBI NO: 34904656 NR Description: putative pathogenesis related protein
  misc_feature (1)..(158): Homolog of NCBI NO: 34904652 NR Description: putative pathogenesis related protein
  misc_feature (1)..(158): Homolog of NCBI NO: 25372796 NR Description: hypothetical protein F9K20.18 [imported] -
  misc_feature (1)..(158): Homolog of NCBI NO: 18412106 NR Description: expressed protein
  misc_feature (1)..(186): Homolog of NCBI NO: 34910864 NR Description: putative pathogenesis related protein
  misc_feature (1)..(186): Homolog of NCBI NO: 34910862 NR Description: putative pathogenesis related protein
MELSHKARLSDFKSVSPGRFRLSVNGGRARSGEETLAVGSYNALLDSPLLARAGAYDASAETFRSSHDLFRAAFPRGFAWEVLKVYSGPPLLAFKFRHWGHKEGPYKGHAATGDKVEFFGVAVLKVDDELRAEDVEVYYDPGELLGGLLKGPKVASSEEDRREAAAVSASGAVPPPLACPFLNPGKPQ

SEQ ID NO: 18040 - DNA, 738 bp, Zea mays subsp. mays
  misc_feature (1)..(738): Ceres Seq. ID no. 12369342
  misc_feature: MA Experiment ID: 108504 Result: Up-regulated in Transcription
  misc_feature: MA Experiment 108504 PARAMETER Experiment Name: Zm_Drought_P Parameter: Age (day) Value: 8
  misc_feature: MA Experiment 108504 PARAMETER Experiment Name: Zm_Drought_P Parameter: Organism Value: Zea mays
  misc_feature: MA Experiment 108504 PARAMETER Experiment Name: Zm_Drought_P Parameter: Plant Line Value: 35A19
  misc_feature: MA Experiment 108504 PARAMETER Experiment Name: Zm_Drought_P Parameter: Timepoint (hr) Value: 12
  misc_feature: MA Experiment 108504 PARAMETER Experiment Name: Zm_Drought_P Parameter: Tissue Value: Aerial
  misc_feature: MA Experiment 108504 PARAMETER Experiment Name: Zm_Drought_P Parameter: Treatment Value: Drought vs. No Drought
  misc_feature: MA Experiment ID: 108527 Result: Up-regulated in Transcription
  misc_feature: MA Experiment 108527 PARAMETER Experiment Name: Zm_5mM_NO_P Parameter: Age (day) Value: 8
  misc_feature: MA Experiment 108527 PARAMETER Experiment Name: Zm_5mM_NO_P Parameter: Organism Value: Zea mays
  misc_feature: MA Experiment 108527 PARAMETER Experiment Name: Zm_5mM_NO_P Parameter: Plant Line Value: 35A19
  misc_feature: MA Experiment 108527 PARAMETER Experiment Name: Zm_5mM_NO_P Parameter: Timepoint (hr) Value: 6
  misc_feature: MA Experiment 108527 PARAMETER Experiment Name: Zm_5mM_NO_P Parameter: Tissue Value: Aerial
  misc_feature: MA Experiment 108527 PARAMETER Experiment Name: Zm_5mM_NO_P Parameter: Treatment Value: 5mM NO vs. No Treatment
  misc_feature: MA Experiment ID: 108528 Result: Up-regulated in Transcription
  misc_feature: MA Experiment 108528 PARAMETER Experiment Name: Zm_Imbibed_Seeds_P Parameter: Age (day) Value: 5 vs. 2
  misc_feature: MA Experiment 108528 PARAMETER Experiment Name: Zm_Imbibed_Seeds_P Parameter: Organism Value: Zea mays
  misc_feature: MA Experiment 108528 PARAMETER Experiment Name: Zm_Imbibed_Seeds_P Parameter: Plant Line Value: 35A19
  misc_feature: MA Experiment 108528 PARAMETER Experiment Name: Zm_Imbibed_Seeds_P Parameter: Tissue Value: Aerial vs. Embryo
  misc_feature: MA Experiment ID: 108530 Result: Up-regulated in Transcription
  misc_feature: MA Experiment 108530 PARAMETER Experiment Name: Zm_Imbibed_Seeds_P Parameter: Age (day) Value: 6 vs. 2
  misc_feature: MA Experiment 108530 PARAMETER Experiment Name: Zm_Imbibed_Seeds_P Parameter: Organism Value: Zea mays
  misc_feature: MA Experiment 108530 PARAMETER Experiment Name: Zm_Imbibed_Seeds_P Parameter: Plant Line Value: 35A19
  misc_feature: MA Experiment 108530 PARAMETER Experiment Name: Zm_Imbibed_Seeds_P Parameter: Tissue Value: Aerial vs. Embryo
  misc_feature: MA Experiment ID: 108533 Result: Up-regulated in Transcription
  misc_feature: MA Experiment 108533 PARAMETER Experiment Name: Zm_4deg_Cold_P Parameter: Age (hr) Value: 8
  misc_feature: MA Experiment 108533 PARAMETER Experiment Name: Zm_4deg_Cold_P Parameter: Organism Value: Zea mays
  misc_feature: MA Experiment 108533 PARAMETER Experiment Name: Zm_4deg_Cold_P Parameter: Plant Line Value: 35A19
  misc_feature: MA Experiment 108533 PARAMETER Experiment Name: Zm_4deg_Cold_P Parameter: Temperature (deg C) Value: 4 vs. 22
  misc_feature: MA Experiment 108533 PARAMETER Experiment Name: Zm_4deg_Cold_P Parameter: Timepoint (hr) Value: 1
  misc_feature: MA Experiment 108533 PARAMETER Experiment Name: Zm_4deg_Cold_P Parameter: Tissue Value: Aerial
  misc_feature: MA Experiment ID: 108535 Result: Down-regulated in Transcription
  misc_feature: MA Experiment 108535 PARAMETER Experiment Name: Zm_Meristem_P Parameter: Age (day) Value: 8
  misc_feature: MA Experiment 108535 PARAMETER Experiment Name: Zm_Meristem_P Parameter: Organism Value: Zea mays
  misc_feature: MA Experiment 108535 PARAMETER Experiment Name: Zm_Meristem_P Parameter: Plant Line Value: 35A19
  misc_feature: MA Experiment 108535 PARAMETER Experiment Name: Zm_Meristem_P Parameter: Tissue Value: Root Meristem vs. Above Root Meristem
  misc_feature: MA Experiment ID: 108547 Result: Up-regulated in Transcription
  misc_feature: MA Experiment 108547 PARAMETER Experiment Name: Zm_Imbibed_Seeds_P Parameter: Age (day) Value: 4 vs. 2
  misc_feature: MA Experiment 108547 PARAMETER Experiment Name: Zm_Imbibed_Seeds_P Parameter: Organism Value: Zea mays
  misc_feature: MA Experiment 108547 PARAMETER Experiment Name: Zm_Imbibed_Seeds_P Parameter: Plant Line Value: 35A19
  misc_feature: MA Experiment 108547 PARAMETER Experiment Name: Zm_Imbibed_Seeds_P Parameter: Tissue Value: Aerial vs. Embryo
  misc_feature: MA Experiment ID: 108556 Result: Up-regulated in Transcription
  misc_feature: MA Experiment 108556 PARAMETER Experiment Name: Zm_Drought_P Parameter: Age (day) Value: 9
  misc_feature: MA Experiment 108556 PARAMETER Experiment Name: Zm_Drought_P Parameter: Organism Value: Zea mays
  misc_feature: MA Experiment 108556 PARAMETER Experiment Name: Zm_Drought_P Parameter: Plant Line Value: 35A19
  misc_feature: MA Experiment 108556 PARAMETER Experiment Name: Zm_Drought_P Parameter: Timepoint (hr) Value: 24
  misc_feature: MA Experiment 108556 PARAMETER Experiment Name: Zm_Drought_P Parameter: Tissue Value: Aerial
  misc_feature: MA Experiment 108556 PARAMETER Experiment Name: Zm_Drought_P Parameter: Treatment Value: Drought vs. No Drought
  misc_feature: MA Experiment ID: 20000535 Result: Down-regulated in Transcription
  misc_feature: MA Experiment 20000535 PARAMETER Experiment Name: Zm_Hybrid_Seed_Dev_P Parameter: DAP Value: 30 vs. 12
  misc_feature: MA Experiment 20000535 PARAMETER Experiment Name: Zm_Hybrid_Seed_Dev_P Parameter: Organism Value: Zea mays
  misc_feature: MA Experiment 20000535 PARAMETER Experiment Name: Zm_Hybrid_Seed_Dev_P Parameter: Plant Line Value: 35A19
  misc_feature: MA Experiment 20000535 PARAMETER Experiment Name: Zm_Hybrid_Seed_Dev_P Parameter: Tissue Value: Embryo vs. Unfert Floret
  misc_feature: MA Experiment ID: 20000630 Result: Up-regulated in Transcription
  misc_feature: MA Experiment 20000630 PARAMETER Experiment Name: Zm_Herbicide-Treatments_P Parameter: Timepoint (hr) Value: 4
  misc_feature: MA Experiment 20000630 PARAMETER Experiment Name: Zm_Herbicide-Treatments_P Parameter: Tissue Value: Aerial
  misc_feature: MA Experiment 20000630 PARAMETER Experiment Name: Zm_Herbicide-Treatments_P Parameter: Treatment Value: Roundup vs. No Treatment
catggaagttgtcgattcctccgtcgccatctggcgctccgacgagtccgggatctggagcgtcctatacgtgctcgatgtcctctggagcctgctgaccggccgcctggtgcgagagaaggtggacccggccgtgcaaagcgccgtcgacagtcagatgaacgccgcggactcgcaggacatggcgccgacactggcggacatgttcgagacgggcgccgccgacgccaagggcatgccggccgccgccgtcgcggcgctccccatcatggccttcaccgagcacaccgtcgccgacggctccggggagcccatcggctgctccgtctgccttcaggacttcgaggcaggcgagacggcgcggagcttgccggagtgcgggcacacgttccacctgccgtgcatcgacgtctggctgctccggccacgcctcgtgcccactgtgtcgtcgcgcggtctaagccggttcgcacacttttcgttaggatgtctttgggcaaccgtgagccgatgcgcgtgcacacgtgtcccagaccaggagcacagtatagtagggtagtaggagtgcaggacacctggttctttcttgcataccttgattatttttttccttcttttttctacgtcttgagcacgcatgtacagatacagtacgtggctcacattgtctcacacacactgtggatgtaaatatgtatagggtaaatgttgtaaacaatgtaatatacttgtacattg

SEQ ID NO: 18041 - protein, 229 aa, Zea mays subsp. mays
  peptide (1)..(229): Ceres Seq. ID no. 12369343
HGSCRFLRRHLALRRVRDLERPIRARCPLEPADRPPGAREGGPGRAKRRRQSDERRGLAGHGADTGGHVRDGRRRRQGHAGRRRRGAPHHGLHRAHRRRRLRGAHRLLRLPSGLRGRRDGAELAGVRAHVPPAVHRRLAAPATPRAHCVVARSKPVRTLFVRMSLGNREPMRVHTCPRPGAQYSRVVGVQDTWFFLAYLDYFFPSFFYVLSTHVQIQYVAHIVSHTLWM

SEQ ID NO: 18042 - protein, 185 aa, Zea mays subsp. mays
  peptide (1)..(185): Ceres Seq. ID no. 12369344
  misc_feature (107)..(141): Pfam Name: Zinc finger, C3HC4 type (RING finger) Pfam Description: Zinc finger, C3HC4 type (RING finger)
  misc_feature (1)..(141): Homolog of NCBI NO: 37536572 NR Description: hypothetical protein [Oryza sativa (japonica
  misc_feature (1)..(185): Homolog of NCBI NO: 25411815 NR Description: hypothetical protein At2g17730 [imported] -
  misc_feature (1)..(146): Homolog of NCBI NO: 33146606 NR Description: putative NEP1-interacting protein 2
  misc_feature (1)..(141): Homolog of NCBI NO: 26451101 NR Description: unknown protein [Arabidopsis thaliana]
  misc_feature (1)..(141): Homolog of NCBI NO: 30680091 NR Description: expressed protein [Arabidopsis thaliana]
  misc_feature (1)..(141): Homolog of NCBI NO: 26452210 NR Description: unknown protein [Arabidopsis thaliana]
  misc_feature (1)..(146): Homolog of NCBI NO: 15239242 NR Description: putative protein; protein id: At5g66070.1
  misc_feature (1)..(141): Homolog of NCBI NO: 27524902 NR Description: NEP1-interacting protein [Arabidopsis thaliana]
  misc_feature (1)..(185): Homolog of NCBI NO: 7485279 NR Description: hypothetical protein A_TM017A05.9 - Arabidopsis
  misc_feature (1)..(141): Homolog of NCBI NO: 18855037 NR Description: putative zinc finger protein [Oryza sativa]
MEVVDSSVAIWRSDESGIWSVLYVLDVLWSLLTGRLVREKVDPAVQSAVDSQMNAADSQDMAPTLADMFETGAADAKGMPAAAVAALPIMAFTEHTVADGSGEPIGCSVCLQDFEAGETARSLPECGHTFHLPCIDVWLLRPRLVPTVSSRGLSRFAHFSLGCLWATVSRCACTRVPDQEHSIVG

SEQ ID NO: 18043 - protein, 133 aa, Zea mays subsp. mays
  peptide (1)..(133): Ceres Seq. ID no. 12369345
  misc_feature (55)..(89): Pfam Name: Zinc finger, C3HC4 type (RING finger) Pfam Description: Zinc finger, C3HC4 type (RING finger)
  misc_feature (1)..(94): Homolog of NCBI NO: 33146606 NR Description: putative NEP1-interacting protein 2
  misc_feature (1)..(89): Homolog of NCBI NO: 27524902 NR Description: NEP1-interacting protein [Arabidopsis thaliana]
  misc_feature (1)..(89): Homolog of NCBI NO: 26451101 NR Description: unknown protein [Arabidopsis thaliana]
  misc_feature (1)..(94): Homolog of NCBI NO: 15239242 NR Description: putative protein; protein id: At5g66070.1
  misc_feature (1)..(89): Homolog of NCBI NO: 30680091 NR Description: expressed protein [Arabidopsis thaliana]
  misc_feature (1)..(89): Homolog of NCBI NO: 26452210 NR Description: unknown protein [Arabidopsis thaliana]
  misc_feature (1)..(133): Homolog of NCBI NO: 25411815 NR Description: hypothetical protein At2g17730 [imported] -
  misc_feature (1)..(133): Homolog of NCBI NO: 7485279 NR Description: hypothetical protein A_TM017A05.9 - Arabidopsis
  misc_feature (1)..(89): Homolog of NCBI NO: 37536572 NR Description: hypothetical protein [Oryza sativa (japonica
  misc_feature (1)..(89): Homolog of NCBI NO: 18855037 NR Description: putative zinc finger protein [Oryza sativa]
MNAADSQDMAPTLADMFETGAADAKGMPAAAVAALPIMAFTEHTVADGSGEPIGCSVCLQDFEAGETARSLPECGHTFHLPCIDVWLLRPRLVPTVSSRGLSRFAHFSLGCLWATVSRCACTRVPDQEHSIVG

SEQ ID NO: 18044 - DNA, 711 bp, Zea mays subsp. mays
  misc_feature (1)..(711): Ceres Seq. ID no. 12416722
  misc_feature: MA Experiment ID: 108556 Result: Down-regulated in Transcription
  misc_feature: MA Experiment 108556 PARAMETER Experiment Name: Zm_Drought_P Parameter: Age (day) Value: 9
  misc_feature: MA Experiment 108556 PARAMETER Experiment Name: Zm_Drought_P Parameter: Organism Value: Zea mays
  misc_feature: MA Experiment 108556 PARAMETER Experiment Name: Zm_Drought_P Parameter: Plant Line Value: 35A19
  misc_feature: MA Experiment 108556 PARAMETER Experiment Name: Zm_Drought_P Parameter: Timepoint (hr) Value: 24
  misc_feature: MA Experiment 108556 PARAMETER Experiment Name: Zm_Drought_P Parameter: Tissue Value: Aerial
  misc_feature: MA Experiment 108556 PARAMETER Experiment Name: Zm_Drought_P Parameter: Treatment Value: Drought vs. No Drought
gtctggatggcccaggaacggcgcaccgtggagtccctctctgatttttggcgagcagaacatacctgagacgacaggtagaagacgactgactgcctcgagcagcagagatcagggaggccgagggcgggatgacgatccggttcgtgctgttcgtcaacaagcagggccagacgcggctggcgcagtactacgagcacctctccctcgacgagcgacgggccctcgagggcgagatcgtccgcaagtgcctcgcccgcactgaccagcagtgttcgtttgtggagcaccggaactacaaggtcgtttacagacgctacgcctcccttttcttcctcgtcggcgtcgacagcgatgagaatgagttagctatccttgaattcatacatcttctggtggaaactatggatcgccacttcggcaatgtgtgcgagctcgatatcatgttccatctggagaaagtgcacttcatgttggaagagatggtgatgaatggttgcattgtggagacaagtaaacagaacatcttggcaccaatacaacttatggagaaaacttcctaaaatagtgatatccatttgtgtagttttacatccacttcttagcacatttgcctgtctgcccctttccataaaatttccctctgtatgtgagagtgcaaaacaatctctgtaaccatggagtattgaattgacctgattgtgtgctttc

SEQ ID NO: 18045 - protein, 143 aa, Zea mays subsp. mays
  peptide (1)..(143): Ceres Seq. ID no. 12416723
  misc_feature (3)..(143): Pfam Name: Clathrin adaptor complex small chain Pfam Description: Clathrin adaptor complex small chain
  misc_feature (3)..(143): Homolog of NCBI NO: 37544043 NR Description: similar to adaptor-related protein complex 1
  misc_feature (1)..(136): Homolog of NCBI NO: 19114322 NR Description: putative clathrin-associated protein (AP)
  misc_feature (3)..(141): Homolog of NCBI NO: 26788038 NR Description: SI:dZ234G15.5 (novel protein similar to human
  misc_feature (3)..(143): Homolog of NCBI NO: 17998681 NR Description: adaptor-related protein complex AP-4, sigma 1
  misc_feature (3)..(143): Homolog of NCBI NO: 23482798 NR Description: putative clathrin assembly protein [Plasmodium
  misc_feature (3)..(143): Homolog of NCBI NO: 13431288 NR Description: Adapter-related protein complex 4 sigma 1 subunit
  misc_feature (3)..(143): Homolog of NCBI NO: 23510210 NR Description: clathrin assembly protein, putative [Plasmodium
  misc_feature (1)..(141): Homolog of NCBI NO: 15224841 NR Description: putative clathrin assembly protein
  misc_feature (1)..(143): Homolog of NCBI NO: 37533546 NR Description: putative clathrin assembly protein
  misc_feature (1)..(143): Homolog of NCBI NO: 40253273 NR Description: putative clathrin coat assembly protein AP17
MTIRFVLFVNKQGQTRLAQYYEHLSLDERRALEGEIVRKCLARTDQQCSFVEHRNYKVVYRRYASLFFLVGVDSDENELAILEFIHLLVETMDRHFGNVCELDIMFHLEKVHFMLEEMVMNGCIVETSKQNILAPIQLMEKTS

SEQ ID NO: 18046 - protein, 87 aa, Zea mays subsp. mays
  peptide (1)..(87): Ceres Seq. ID no. 12416724
SGWPRNGAPWSPSLIFGEQNIPETTGRRRLTASSSRDQGGRGRDDDPVRAVRQQAGPDAAGAVLRAPLPRRATGPRGRDRPQVPRPH

SEQ ID NO: 18047 - DNA, 758 bp, Zea mays subsp. mays
  misc_feature (1)..(758): Ceres Seq. ID no. 12416542
  misc_feature: MA Experiment ID: 108535 Result: Up-regulated in Transcription
  misc_feature: MA Experiment 108535 PARAMETER Experiment Name: Zm_Meristem_P Parameter: Age (day) Value: 8
  misc_feature: MA Experiment 108535 PARAMETER Experiment Name: Zm_Meristem_P Parameter: Organism Value: Zea mays
  misc_feature: MA Experiment 108535 PARAMETER Experiment Name: Zm_Meristem_P Parameter: Plant Line Value: 35A19
  misc_feature: MA Experiment 108535 PARAMETER Experiment Name: Zm_Meristem_P Parameter: Tissue Value: Root Meristem vs. Above Root Meristem
  misc_feature: MA Experiment ID: 20000108 Result: Up-regulated in Transcription
  misc_feature: MA Experiment 20000108 PARAMETER Experiment Name: Zm_Root-Tips_P Parameter: Age (day) Value: 12
  misc_feature: MA Experiment 20000108 PARAMETER Experiment Name: Zm_Root-Tips_P Parameter: Organism Value: Zea mays
  misc_feature: MA Experiment 20000108 PARAMETER Experiment Name: Zm_Root-Tips_P Parameter: Tissue Value: Root tips vs. Root mid region    35
  misc_feature: MA Experiment 20000108 PARAMETER Experiment Name: Zm_Root-Tips_P Parameter: Tissue Value: Root tips vs. Root mid region   Sequence Listing-Misc Features (4)
atttggtatgaacgtgcttgatctggttgaatggaggaacaagaatgtgacaggcatatatcattattggcaggagcgcaatgctgatcataccctatggaagcttgggtctttaccacctggacttcttgctttctatggcttggttgaagcattggatcccaaatggcatgttttgggacttggctacacaactgttgatcttgctactatcaaggaaggggcagtactgcactacaatggaaatatgaagccatggctcaaaataggaatggagaagtacaagagcttttgggataactatgtggactattcacatcctttgattcagcagtgcttcatgcgttgattgatgtgtatcgacattataaatttttgtaagctctgtggtagatatgttccaagcgcatgctccaactgccacacggaaacattgtaattaaatcagtgggcttcgctctcaagttataatctctgacaaaacatcagtggctgtctatagtatctgtatttgatgaaatacagcaatcacatatctccagagtccagccacaggtaaacaacacatgagctaagaccgcgatgtagtaggctgctacttgaatacatccattacatacattcattacttgtgaccattgatgtaattttccattttttatttattgggtgagacaaccacagaatggagataatgtagaattgattttaaattattgacttgttacaagttttcagttatgtatccatatttattg

SEQ ID NO: 18048 - protein, 115 aa, Zea mays subsp. mays
  peptide (1)..(115): Ceres Seq. ID no. 12416543
  misc_feature (1)..(112): Homolog of NCBI NO: 15227235 NR Description: hypothetical protein; protein id: At2g46480.1
  misc_feature (1)..(112): Homolog of NCBI NO: 15233046 NR Description: putative protein
  misc_feature (1)..(112): Homolog of NCBI NO: 7271113 NR Description: 68 kDa protein [Cicer arietinum]
  misc_feature (1)..(112): Homolog of NCBI NO: 30691875 NR Description: glycosyltransferase family 8 [Arabidopsis
  misc_feature (1)..(114): Homolog of NCBI NO: 37533460 NR Description: hypothetical protein [Oryza sativa (japonica
  misc_feature (1)..(112): Homolog of NCBI NO: 7485958 NR Description: hypothetical protein F22I13.40 - Arabidopsis
  misc_feature (1)..(112): Homolog of NCBI NO: 15293067 NR Description: unknown protein [Arabidopsis thaliana]
  misc_feature (1)..(95): Homolog of NCBI NO: 25411994 NR Description: hypothetical protein At2g20810 [imported] -
  misc_feature (1)..(112): Homolog of NCBI NO: 18399484 NR Description: Expressed protein
  misc_feature (1)..(113): Homolog of NCBI NO: 32492171 NR Description: OSJNBb0034I13.1 [Oryza sativa (japonica
FGMNVLDLVEWRNKNVTGIYHYWQERNADHTLWKLGSLPPGLLAFYGLVEALDPKWHVLGLGYTTVDLATIKEGAVLHYNGNMKPWLKIGMEKYKSFWDNYVDYSHPLIQQCFMR

SEQ ID NO: 18049 - protein, 113 aa, Zea mays subsp. mays
  peptide (1)..(113): Ceres Seq. ID no. 12416544
  misc_feature (1)..(110): Homolog of NCBI NO: 15227235 NR Description: hypothetical protein; protein id: At2g46480.1
  misc_feature (1)..(110): Homolog of NCBI NO: 15233046 NR Description: putative protein
  misc_feature (1)..(110): Homolog of NCBI NO: 7271113 NR Description: 68 kDa protein [Cicer arietinum]
  misc_feature (1)..(110): Homolog of NCBI NO: 30691875 NR Description: glycosyltransferase family 8 [Arabidopsis
  misc_feature (1)..(112): Homolog of NCBI NO: 37533460 NR Description: hypothetical protein [Oryza sativa (japonica
  misc_feature (1)..(110): Homolog of NCBI NO: 7485958 NR Description: hypothetical protein F22I13.40 - Arabidopsis
  misc_feature (1)..(110): Homolog of NCBI NO: 15293067 NR Description: unknown protein [Arabidopsis thaliana]
  misc_feature (1)..(93): Homolog of NCBI NO: 25411994 NR Description: hypothetical protein At2g20810 [imported] -
  misc_feature (1)..(110): Homolog of NCBI NO: 18399484 NR Description: Expressed protein
  misc_feature (1)..(111): Homolog of NCBI NO: 32492171 NR Description: OSJNBb0034I13.1 [Oryza sativa (japonica
MNVLDLVEWRNKNVTGIYHYWQERNADHTLWKLGSLPPGLLAFYGLVEALDPKWHVLGLGYTTVDLATIKEGAVLHYNGNMKPWLKIGMEKYKSFWDNYVDYSHPLIQQCFMR

SEQ ID NO: 18050 - DNA, 475 bp, Zea mays subsp. mays
  misc_feature (1)..(475): Ceres Seq. ID no. 5006193
  misc_feature: MA Experiment ID: 108534 Result: Down-regulated in Transcription
  misc_feature: MA Experiment 108534 PARAMETER Experiment Name: Zm_4deg_Cold_P Parameter: Age (hr) Value: 8
  misc_feature: MA Experiment 108534 PARAMETER Experiment Name: Zm_4deg_Cold_P Parameter: Organism Value: Zea mays
  misc_feature: MA Experiment 108534 PARAMETER Experiment Name: Zm_4deg_Cold_P Parameter: Plant Line Value: 35A19
  misc_feature: MA Experiment 108534 PARAMETER Experiment Name: Zm_4deg_Cold_P Parameter: Temperature (deg C) Value: 4 vs. 22
  misc_feature: MA Experiment 108534 PARAMETER Experiment Name: Zm_4deg_Cold_P Parameter: Timepoint (hr) Value: 6
  misc_feature: MA Experiment 108534 PARAMETER Experiment Name: Zm_4deg_Cold_P Parameter: Tissue Value: Aerial
acccacgcccccaacgccaagaacgtcgacgggcgcgacggcatggcggcggcggacccggacaccgaggtgcaggcggagttcccacccctcgtccgccagtacaaaagcggttcttcaacctggccccgctcccggccggcaccgacccggccacgggcgtcgtgtccaaggacgtcgtcgtcgacccggccaccggcctctgggcgcgcctcttcctccccgccggcagccacgggaagaagctccccgtcgtcgtctactaccatggcggcgcctacgtgatcggctcggcggccgacccgatgacgcacggctacctcaacgcgctcgtcgccaaggccggcgtcctcgcggtcgcgctcgagtaccgcctcgcgccggagcacccgctcccggccgcctacgaggactcatgggagggactcaagtgggtggccacccacgcctccgcctccgccgccgcgggaggagg

SEQ ID NO: 18051 - protein, 158 aa, Zea mays subsp. mays
  peptide (1)..(158): Ceres Seq. ID no. 5006194
  misc_feature (32)..(155): Pfam Name: Aminotransferase class-III Pfam Description: Aminotransferase class-III
PTPPTPRTSTGATAWRRRTRTPRCRRSSHPSSASTKAVLQPGPAPGRHRPGHGRRVQGRRRRPGHRPLGAPLPPRRQPREEAPRRRLLPWRRLRDRLGGRPDDARLPQRARRQGRRPRGRARVPPRAGAPAPGRLRGLMGGTQVGGHPRLRLRRRGRR

SEQ ID NO: 18052 - protein, 157 aa, Zea mays subsp. mays
  peptide (1)..(157): Ceres Seq. ID no. 5006195
  misc_feature (79)..(127): Pfam Name: Carboxylesterase Pfam Description: Carboxylesterase
  misc_feature (36)..(152): Homolog of NCBI NO: 21537287 NR Description: putative esterase [Arabidopsis thaliana]
  misc_feature (45)..(149): Homolog of NCBI NO: 15222791 NR Description: hypothetical protein; protein id: At1g49640.1
  misc_feature (36)..(152): Homolog of NCBI NO: 28393060 NR Description: putative esterase [Arabidopsis thaliana]
  misc_feature (36)..(152): Homolog of NCBI NO: 15227669 NR Description: putative esterase; protein id: At2g03550.1
  misc_feature (36)..(147): Homolog of NCBI NO: 34393904 NR Description: putative cell death associated protein
  misc_feature (36)..(152): Homolog of NCBI NO: 15222795 NR Description: unknown protein; protein id: At1g49660.1
  misc_feature (45)..(145): Homolog of NCBI NO: 21536771 NR Description: unknown [Arabidopsis thaliana]
  misc_feature (43)..(156): Homolog of NCBI NO: 38344841 NR Description: OSJNBa0064H22.22 [Oryza sativa (japonica
  misc_feature (45)..(143): Homolog of NCBI NO: 18401743 NR Description: expressed protein
  misc_feature (46)..(149): Homolog of NCBI NO: 34393323 NR Description: putative cell death associated protein
PRPQRQERRRARRHGGGGPGHRGAGGVPTPRPPVQKRFFNLAPLPAGTDPATGVVSKDVVVDPATGLWARLFLPAGSHGKKLPVVVYYHGGAYVIGSAADPMTHGYLNALVAKAGVLAVALEYRLAPEHPLPAAYEDSWEGLKWVATHASASAAAGG

SEQ ID NO: 18053 - protein, 94 aa, Zea mays subsp. mays
  peptide (1)..(94): Ceres Seq. ID no. 5006196
  misc_feature (37)..(94): Pfam Name: Glycoprotein GG/GX Pfam Description: Glycoprotein GG/GX
  misc_feature (43)..(94): Homolog of NCBI NO: 81286 NR Description: extensin - Volvox carteri (fragment)
  misc_feature (1)..(94): Homolog of NCBI NO: 31559809 NR Description: polycystic kidney disease 1 like 3
  misc_feature (3)..(94): Homolog of NCBI NO: 11359723 NR Description: proteophosphoglycan, membrane-associated
THAPNAKNVDGRDGMAAADPDTEVQAEFPPLVRQYKSGSSTWPRSRPAPTRPRASCPRTSSSTRPPASGRASSSPPAATGRSSPSSSTTMAAPT

SEQ ID NO: 18054 - DNA, 417 bp, Zea mays subsp. mays
  misc_feature (1)..(417): Ceres Seq. ID no. 1682636
  misc_feature: MA Experiment ID: 108535 Result: Down-regulated in Transcription
  misc_feature: MA Experiment 108535 PARAMETER Experiment Name: Zm_Meristem_P Parameter: Age (day) Value: 8
  misc_feature: MA Experiment 108535 PARAMETER Experiment Name: Zm_Meristem_P Parameter: Organism Value: Zea mays
  misc_feature: MA Experiment 108535 PARAMETER Experiment Name: Zm_Meristem_P Parameter: Plant Line Value: 35A19
  misc_feature: MA Experiment 108535 PARAMETER Experiment Name: Zm_Meristem_P Parameter: Tissue Value: Root Meristem vs. Above Root Meristem
agtgaggagggactagggagacagggggagggaacaagccgggcgcagtcacggcatcaaacacgagccgcggcatgggcaacagcctgcggtgctgcctggcgtgcgtgctgccgtgcggcgcgctggacctggtgcggatcgtgcacctcagcggccgcgtcgacgagtacggccgcgccgtgtcggccggggaggtgctggcggcgcaccccaaccacgtgctcagctggccctgctcgtcgccgcagggggtcgtgcgcaggatcctcatcgtgtcgccggactcggagctcgagcgcggggagatctacttcctcatcccggccgcgtccgtgcccgacgccaagaagggcggcggcggggctagcacgccaggccgccacgtgcgcagcaagtccgaaggcagcgtcgtcg

SEQ ID NO: 18055 - protein, 139 aa, Zea mays subsp. mays
  peptide (1)..(139): Ceres Seq. ID no. 1682637
SEEGLGRQGEGTSRAQSRHQTRAAAWATACGAAWRACCRAARWTWCGSCTSAAASTSTAAPCRPGRCWRRTPTTCSAGPARRRRGSCAGSSSCRRTRSSSAGRSTSSSRPRPCPTPRRAAAGLARQAATCAASPKAASS

SEQ ID NO: 18056 - protein, 114 aa, Zea mays subsp. mays
  peptide (1)..(114): Ceres Seq. ID no. 1682638
  misc_feature (1)..(96): Homolog of NCBI NO: 18396990 NR Description: Expressed protein
  misc_feature (3)..(93): Homolog of NCBI NO: 34909702 NR Description: B1131G08.9 [Oryza sativa (japonica
  misc_feature (25)..(102): Homolog of NCBI NO: 34896398 NR Description: hypothetical protein [Oryza sativa (japonica
  misc_feature (1)..(112): Homolog of NCBI NO: 34907910 NR Description: P0439E11.22 [Oryza sativa (japonica
  misc_feature (1)..(93): Homolog of NCBI NO: 15227725 NR Description: hypothetical protein; protein id: At2g30230.1
  misc_feature (1)..(93): Homolog of NCBI NO: 18390706 NR Description: expressed protein
  misc_feature (1)..(113): Homolog of NCBI NO: 34896112 NR Description: P0701D05.10 [Oryza sativa (japonica
MGNSLRCCLACVLPCGALDLVRIVHLSGRVDEYGRAVSAGEVLAAHPNHVLSWPCSSPQGVVRRILIVSPDSELERGEIYFLIPAASVPDAKKGGGGASTPGRHVRSKSEGSVV

SEQ ID NO: 18057 - DNA, 1019 bp, Zea mays subsp. mays
  misc_feature (1)..(1019): Ceres Seq. ID no. 13492109
  misc_feature: MA Experiment ID: 108535 Result: Down-regulated in Transcription
  misc_feature: MA Experiment 108535 PARAMETER Experiment Name: Zm_Meristem_P Parameter: Age (day) Value: 8
  misc_feature: MA Experiment 108535 PARAMETER Experiment Name: Zm_Meristem_P Parameter: Organism Value: Zea mays
  misc_feature: MA Experiment 108535 PARAMETER Experiment Name: Zm_Meristem_P Parameter: Plant Line Value: 35A19
  misc_feature: MA Experiment 108535 PARAMETER Experiment Name: Zm_Meristem_P Parameter: Tissue Value: Root Meristem vs. Above Root Meristem
acttcacaccatttcagcattgtaccctatgttcatgccaccatggaagggcttcgtattggagcaccgattatgcaggtttatcatgagaaatcttttatcttacctgatgtttcaagggtgcttgcttgcctttatgagaaggatgtcaagtttgagactcacacagcctcatacaggagcctactcggattgcaggcatcatctcatgctccagttccattctatgaaggccctacttttctagaagaatccagagaaatctgccgttatatagcagaaaagtatgaaaatcaaggatatccgttcctccttggaaaggatgcccttgagagggcttcaattgaacaatggctccacaacgaggagcatgctttcaaccctccgagccgggccttgttctttcatttggcctttcccctgggtgaaggagaagatgatgatattgatgttcatacaaggaagctagaagaggttctggaagtttatgagcaaaggctcagtgacagcgaattccttgttggaaacaagttcactcttgccgaccttgttcacctgccaaattcccactatatcaaagcatctaacaagtttctttacctttatgattcgaggaaaaatgtaaggaggtggtgggatgctatttctgaccggagttcttggaagaaagtgctgaggtatatgaagagcgtggaggagaagaacaaacaagaagaactcaagaagcagcagcagcagcaggaagaggctcctagaacctccaccgacccaactcgggtagactcgagaaagcagagcagaacagagcctcggacaatattggttcctcctgctgataacgagtcatcagcttcgatagttcctcgaacaaagaagcctcttcctggtgatcacttagtgtctactcaacaaattgatggtgttggtatgccagccacaaattgatggtgatggtcgtcttagtggtgtttgtcttgtcttttattgtttggttctttaacaagagttatatttttacc

SEQ ID NO: 18058 - protein, 314 aa, Zea mays subsp. mays
  peptide (1)..(314): Ceres Seq. ID no. 13492110
  misc_feature (20)..(225): Homolog of NCBI NO: 22758267 NR Description: Putative glutathione S-transferase
  misc_feature (37)..(229): Homolog of NCBI NO: 11385475 NR Description: glutathione S-transferase GST 12 [Zea mays]
  misc_feature (37)..(139): Homolog of NCBI NO: 22758271 NR Description: Putative glutathione S-transferase
  misc_feature (154)..(280): Homolog of NCBI NO: 22758271 NR Description: Putative glutathione S-transferase
  misc_feature (37)..(229): Homolog of NCBI NO: 11385469 NR Description: glutathione S-transferase GST 9 [Zea mays]
  misc_feature (154)..(224): Homolog of NCBI NO: 11385479 NR Description: glutathione S-transferase GST 14 [Zea mays]
  misc_feature (37)..(165): Homolog of NCBI NO: 11385479 NR Description: glutathione S-transferase GST 14 [Zea mays]
  misc_feature (153)..(224): Homolog of NCBI NO: 37536564 NR Description: putative glutathione S-transferase
  misc_feature (37)..(139): Homolog of NCBI NO: 37536564 NR Description: putative glutathione S-transferase
  misc_feature (15)..(314): Homolog of NCBI NO: 11385483 NR Description: glutathione S-transferase GST 16 [Zea mays]
TSHHFSIVPYVHATMEGLRIGAPIMQVYHEKSFILPDVSRVLACLYEKDVKFETHTASYRSLLGLQASSHAPVPFYEGPTFLEESREICRYIAEKYENQGYPFLLGKDALERASIEQWLHNEEHAFNPPSRALFFHLAFPLGEGEDDDIDVHTRKLEEVLEVYEQRLSDSEFLVGNKFTLADLVHLPNSHYIKASNKFLYLYDSRKNVRRWWDAISDRSSWKKVLRYMKSVEEKNKQEELKKQQQQQEEAPRTSTDPTRVDSRKQSRTEPRTILVPPADNESSASIVPRTKKPLPGDHLVSTQQIDGVGMPATN

SEQ ID NO: 18059 - protein, 300 aa, Zea mays subsp. mays; identical to SEQ ID NO: 7800
  peptide (1)..(300): Ceres Seq. ID no. 13492111
  misc_feature (140)..(266): Homolog of NCBI NO: 22758271 NR Description: Putative glutathione S-transferase
  misc_feature (23)..(215): Homolog of NCBI NO: 11385469 NR Description: glutathione S-transferase GST 9 [Zea mays]
  misc_feature (140)..(210): Homolog of NCBI NO: 11385479 NR Description: glutathione S-transferase GST 14 [Zea mays]
  misc_feature (23)..(151): Homolog of NCBI NO: 11385479 NR Description: glutathione S-transferase GST 14 [Zea mays]
  misc_feature (139)..(210): Homolog of NCBI NO: 37536564 NR Description: putative glutathione S-transferase
  misc_feature (23)..(125): Homolog of NCBI NO: 37536564 NR Description: putative glutathione S-transferase
  misc_feature (1)..(300): Homolog of NCBI NO: 11385483 NR Description: glutathione S-transferase GST 16 [Zea mays]
  misc_feature (6)..(211): Homolog of NCBI NO: 22758267 NR Description: Putative glutathione S-transferase
  misc_feature (23)..(215): Homolog of NCBI NO: 11385475 NR Description: glutathione S-transferase GST 12 [Zea mays]
  misc_feature (23)..(125): Homolog of NCBI NO: 22758271 NR Description: Putative glutathione S-transferase

SEQ ID NO: 18060 - protein, 290 aa, Zea mays subsp. mays; identical to SEQ ID NO: 7801
  peptide (1)..(290): Ceres Seq. ID no. 13492112
  misc_feature (1)..(201): Homolog of NCBI NO: 22758267 NR Description: Putative glutathione S-transferase
  misc_feature (13)..(205): Homolog of NCBI NO: 11385475 NR Description: glutathione S-transferase GST 12 [Zea mays]
  misc_feature (13)..(115): Homolog of NCBI NO: 22758271 NR Description: Putative glutathione S-transferase
  misc_feature (130)..(256): Homolog of NCBI NO: 22758271 NR Description: Putative glutathione S-transferase
  misc_feature (13)..(205): Homolog of NCBI NO: 11385469 NR Description: glutathione S-transferase GST 9 [Zea mays]
  misc_feature (130)..(200): Homolog of NCBI NO: 11385479 NR Description: glutathione S-transferase GST 14 [Zea mays]
  misc_feature (13)..(141): Homolog of NCBI NO: 11385479 NR Description: glutathione S-transferase GST 14 [Zea mays]
  misc_feature (129)..(200): Homolog of NCBI NO: 37536564 NR Description: putative glutathione S-transferase
  misc_feature (13)..(115): Homolog of NCBI NO: 37536564 NR Description: putative glutathione S-transferase
  misc_feature (1)..(290): Homolog of NCBI NO: 11385483 NR Description: glutathione S-transferase GST 16 [Zea mays]

SEQ ID NO: 18061 - DNA, 774 bp, Zea mays subsp. mays
  misc_feature (1)..(774): Ceres Seq. ID no. 12363622
  misc_feature: MA Experiment ID: 108529 Result: Down-regulated in Transcription
  misc_feature: MA Experiment 108529 PARAMETER Experiment Name: Zm_Imbibed_Seeds_P Parameter: Age (day) Value: 5 vs. 2
  misc_feature: MA Experiment 108529 PARAMETER Experiment Name: Zm_Imbibed_Seeds_P Parameter: Organism Value: Zea mays
  misc_feature: MA Experiment 108529 PARAMETER Experiment Name: Zm_Imbibed_Seeds_P Parameter: Plant Line Value: 35A19
  misc_feature: MA Experiment 108529 PARAMETER Experiment Name: Zm_Imbibed_Seeds_P Parameter: Tissue Value: Roots vs. Embryo
  misc_feature: MA Experiment ID: 108535 Result: Up-regulated in Transcription
  misc_feature: MA Experiment 108535 PARAMETER Experiment Name: Zm_Meristem_P Parameter: Age (day) Value: 8
  misc_feature: MA Experiment 108535 PARAMETER Experiment Name: Zm_Meristem_P Parameter: Organism Value: Zea mays
  misc_feature: MA Experiment 108535 PARAMETER Experiment Name: Zm_Meristem_P Parameter: Plant Line Value: 35A19
  misc_feature: MA Experiment 108535 PARAMETER Experiment Name: Zm_Meristem_P Parameter: Tissue Value: Root Meristem vs. Above Root Meristem
  misc_feature: MA Experiment ID: 108544 Result: Down-regulated in Transcription
  misc_feature: MA Experiment ID: 108546 Result: Down-regulated in Transcription
  misc_feature: MA Experiment 108546 PARAMETER Experiment Name: Zm_Imbibed_Seeds_P Parameter: Age (day) Value: 3 vs. 2
  misc_feature: MA Experiment 108546 PARAMETER Experiment Name: Zm_Imbibed_Seeds_P Parameter: Organism Value: Zea mays
  misc_feature: MA Experiment 108546 PARAMETER Experiment Name: Zm_Imbibed_Seeds_P Parameter: Plant Line Value: 35A19
  misc_feature: MA Experiment 108546 PARAMETER Experiment Name: Zm_Imbibed_Seeds_P Parameter: Tissue Value: Roots vs. Embryo
gcgagccgaaccggagcgtcaagcaaacatccgtcgatcccgattccgaccactgcgctcgcgccatcgcgccatccacccggcattgtgcgcccgagccgggctcgttggatggcgtccggaggcgccgcccgcggtcgccttgctgaggagcgcaaggcgtggcgcaagagccatcccctcggctttgtggccaagccggcgatgctgccggatggttctgtcaatctcatgctctggaactgcgtcgtccccggcaagtaaggcactgattgggaaggtggatatttcccggtcactctccatttcactgaaaattacccaagtaaccccccaacctgcaagttcccacgaaggtttttccatgtcaatgtctatgattctggggatgtatgcctgtcaatacttggtgatgcatgggcgccttctatcacagtgcggcaaattctaataggcatccaggagctgctggagaacccaaacccagcctctcccgcacaggattttgcttacgatgtttttgcagagaatatgccagaatacaagagacgcgtccgtgagcaagccaagaggtatccgtcgctcgtgtagccgtggacctctgcaacacaattgctgctaaccaagtagtcactcactttggtgtagtggaacttgttcatgacgtgcttaactatggtgtctagttagccgtacgcttgttggaactgctaaagtgcagcttattggaactgctaaaatgcccttgactacgtcttattattatggtttatc

SEQ ID NO: 18062 - protein, 149 aa, Zea mays subsp. mays
  peptide (1)..(149): Ceres Seq. ID no. 12363623
RAEPERQANIRRSRFRPLRSRHRAIHPALCARAGLVGWRPEAPPAVALLRSARRGARAIPSALWPSRRCCRMVLSISCSGTASSPASKALIGKVDISRSLSISLKITQVTPQPASSHEGFSMSMSMILGMYACQYLVMHGRLLSQCGKF

SEQ ID NO: 18063 - protein, 87 aa, Zea mays subsp. mays
  peptide (1)..(87): Ceres Seq. ID no. 12363624
  misc_feature (42)..(87): Homolog of NCBI NO: 20150955 NR Description: Chain A, Structural Basis For E2-Mediated Sumo Revealed By A Complex Between Ubiquitin Conjugating Enzyme Ubc9
  misc_feature (42)..(87): Homolog of NCBI NO: 3212324 NR Description: Human Ubc9
  misc_feature (42)..(87): Homolog of NCBI NO: 2194010 NR Description: Chain A, Human Ubiquitin-Conjugating Enzyme Ubc9
  misc_feature (42)..(87): Homolog of NCBI NO: 30584109 NR Description: Homo sapiens ubiquitin-conjugating enzyme E2I
  misc_feature (42)..(87): Homolog of NCBI NO: 7621708 NR Description: putative E2 enzyme Ubc9 [Dictyostelium discoideum]
  misc_feature (38)..(87): Homolog of NCBI NO: 15230881 NR Description: E2 ubiquitin-conjugating-like enzyme, Ahus5
  misc_feature (40)..(87): Homolog of NCBI NO: 25446690 NR Description: Putative ubiquitin-conjugating enzyme
  misc_feature (40)..(87): Homolog of NCBI NO: 20975734 NR Description: putative ubiquitin-conjugating enzyme [Populus
  misc_feature (40)..(87): Homolog of NCBI NO: 37536440 NR Description: putative ubiquitin-conjugating enzyme
  misc_feature (38)..(87): Homolog of NCBI NO: 38345867 NR Description: OSJNBa0064M23.9 [Oryza sativa (japonica
ASRTGASSKHPSIPIPTTALAPSRHPPGIVRPSRARWMASGGAARGRLAEERKAWRKSHPLGFVAKPAMLPDGSVNLMLWNCVVPGK

SEQ ID NO: 18064 - protein, 78 aa, Zea mays subsp. mays
  peptide (1)..(78): Ceres Seq. ID no. 12363625
MVLSISCSGTASSPASKALIGKVDISRSLSISLKITQVTPQPASSHEGFSMSMSMILGMYACQYLVMHGRLLSQCGKF

SEQ ID NO: 18065 - DNA, 475 bp, Zea mays subsp. mays
  misc_feature (1)..(475): Ceres Seq. ID no. 1680426
  misc_feature: MA Experiment ID: 108547 Result: Up-regulated in Transcription
  misc_feature: MA Experiment 108547 PARAMETER Experiment Name: Zm_Imbibed_Seeds_P Parameter: Age (day) Value: 4 vs. 2
  misc_feature: MA Experiment 108547 PARAMETER Experiment Name: Zm_Imbibed_Seeds_P Parameter: Organism Value: Zea mays
  misc_feature: MA Experiment 108547 PARAMETER Experiment Name: Zm_Imbibed_Seeds_P Parameter: Plant Line Value: 35A19
  misc_feature: MA Experiment 108547 PARAMETER Experiment Name: Zm_Imbibed_Seeds_P Parameter: Tissue Value: Aerial vs. Embryo
  misc_feature: Pfam Name: Mito_carr Pfam Description: Mitochondrial carrier protein
gtattctgtcgtaatcctgccattcatttccatccagacgaccagaggccagagggcgttgctgcgctgcgttccgctctcccttttctgctgcgacgacggctggtcgagcgccgccacactttgcagcttccttggctcttcgcaggtgacgagcgcccaccagtcagacatgggacaaggtggacaagagaagtcgttcaatttccttcaagttttgctagagggcagcatagctggaggaactgctggtgttgtggtggaaacagcactttacccgattgatactataaaaaccaggcttcaggctgctcgaggtggaagccggattgaatggaaaggcttgtattctggattagctggaaatctcactggcgtccttccggcctctgcgatatttgtcggggtgtatgagccaactaaaagamaattactggaaacccttcctgaaaatctgagtgcagttgcncatttt

SEQ ID NO: 18066 - protein, 94 aa, Zea mays subsp. mays
  peptide (1)..(94): Ceres Seq. ID no. 1680427
  misc_feature: Pfam Name: Mito_carr Pfam Description: Mitochondrial carrier protein
VFCRNPAIHFHPDDQRPEGVAALRSALPFLLRRRLVERRHTLQLPWLFAGDERPPVRHGTRWTREVVQFPSSFARGQHSWRNCWCCGGNSTLPD

SEQ ID NO: 18067 - protein, 158 aa, Zea mays subsp. mays
  peptide (1)..(158): Ceres Seq. ID no. 1680428
  misc_feature: Pfam Name: Mito_carr Pfam Description: Mitochondrial carrier protein
  misc_feature (74)..(146): Homolog of NCBI NO: 23509092 NR Description: mitochondrial carrier protein, putative
  misc_feature (78)..(147): Homolog of NCBI NO: 32415055 NR Description: hypothetical protein ( (AL355930) related to PET8
  misc_feature (78)..(147): Homolog of NCBI NO: 34857703 NR Description: similar to RIKEN cDNA 4930433D19 [Rattus
  misc_feature (78)..(157): Homolog of NCBI NO: 27754081 NR Description: RIKEN cDNA 4930433D19; expressed sequence
  misc_feature (78)..(157): Homolog of NCBI NO: 24650120 NR Description: CG4743-PA [Drosophila melanogaster]
  misc_feature (78)..(144): Homolog of NCBI NO: 31208625 NR Description: ENSANGP00000011068 [Anopheles gambiae]
  misc_feature (63)..(157): Homolog of NCBI NO: 18399114 NR Description: allinase, putative; protein id: At1g34065.1
  misc_feature (63)..(157): Homolog of NCBI NO: 18420458 NR Description: mitochondrial carrier protein family
  misc_feature (63)..(157): Homolog of NCBI NO: 7486053 NR Description: hypothetical protein F23K16.90 - Arabidopsis
  misc_feature (58)..(157): Homolog of NCBI NO: 34394981 NR Description: mitochondrial aspartate-glutamate carrier
  misc_feature (143)..(143): Xaa is any aa, unknown or other
  misc_feature (156)..(156): Xaa is any aa, unknown or other
YSVVILPFISIQTTRGQRALLRCVPLSLFCCDDGWSSAATLCSFLGSSQVTSAHQSDMGQGGQEKSFNFLQVLLEGSIAGGTAGVVVETALYPIDTIKTRLQAARGGSRIEWKGLYSGLAGNLTGVLPASAIFVGVYEPTKRXLLETLPENLSAVXHF

SEQ ID NO: 18068 - protein, 101 aa, Zea mays subsp. mays
  peptide (1)..(101): Ceres Seq. ID no. 1680429
  misc_feature: Pfam Name: Mito_carr Pfam Description: Mitochondrial carrier protein
  misc_feature (17)..(89): Homolog of NCBI NO: 23509092 NR Description: mitochondrial carrier protein, putative
  misc_feature (21)..(90): Homolog of NCBI NO: 32415055 NR Description: hypothetical protein ( (AL355930) related to PET8
  misc_feature (21)..(90): Homolog of NCBI NO: 34857703 NR Description: similar to RIKEN cDNA 4930433D19 [Rattus
  misc_feature (21)..(100): Homolog of NCBI NO: 27754081 NR Description: RIKEN cDNA 4930433D19; expressed sequence
  misc_feature (21)..(100): Homolog of NCBI NO: 24650120 NR Description: CG4743-PA [Drosophila melanogaster]
  misc_feature (21)..(87): Homolog of NCBI NO: 31208625 NR Description: ENSANGP00000011068 [Anopheles gambiae]
  misc_feature (6)..(100): Homolog of NCBI NO: 18399114 NR Description: allinase, putative; protein id: At1g34065.1
  misc_feature (6)..(100): Homolog of NCBI NO: 18420458 NR Description: mitochondrial carrier protein family
  misc_feature (6)..(100): Homolog of NCBI NO: 7486053 NR Description: hypothetical protein F23K16.90 - Arabidopsis
  misc_feature (1)..(100): Homolog of NCBI NO: 34394981 NR Description: mitochondrial aspartate-glutamate carrier
  misc_feature (86)..(86): Xaa is any aa, unknown or other
  misc_feature (99)..(99): Xaa is any aa, unknown or other
MGQGGQEKSFNFLQVLLEGSIAGGTAGVVVETALYPIDTIKTRLQAARGGSRIEWKGLYSGLAGNLTGVLPASAIFVGVYEPTKRXLLETLPENLSAVXHF

SEQ ID NO: 18069 - DNA, 738 bp, Zea mays subsp. mays
  misc_feature (1)..(738): Ceres Seq. ID no. 13566549
  misc_feature: MA Experiment ID: 20000534 Result: Down-regulated in Transcription
  misc_feature: MA Experiment 20000534 PARAMETER Experiment Name: Zm_Hybrid_Pollen_P Parameter: Age (day) Value: 8
  misc_feature: MA Experiment 20000534 PARAMETER Experiment Name: Zm_Hybrid_Pollen_P Parameter: Organism Value: Zea mays
  misc_feature: MA Experiment 20000534 PARAMETER Experiment Name: Zm_Hybrid_Pollen_P Parameter: Plant Line Value: 35A19
  misc_feature: MA Experiment 20000534 PARAMETER Experiment Name: Zm_Hybrid_Pollen_P Parameter: Tissue Value: Pollen vs. Aerial
tttcaaaatggtgttggttgtgaggaatgatctgaagatggggaaggggaagattgccgcacagtgcagtcatgcaactcttgggctattcaaaaaactccaacagagagctccaaaatcactaagaaggtgggagcggtgtgggcaagttaaagtggttgtgaaaatagaaagcgaggaagacatgctagttttacaagggagagcaaaagtctttaaatctgccaactcacataaccatagacgctggaagaacacagattgctccaaattcaaggacagtcatggctattctggggccagctgatatggttgatgatgttactggcggtctgaagcttttgtagaaaaccaccttgtcagcattttcaacttgggtcttcatagagcagtgctgggactttgcagggccacagtggtctctgcacttgtactgatgtgcggcagaagaatgaaccttggccccgttggttgacctgagtttcttgtccatgaatttatttggaaggagagcttgcattcttttttcacttgtaccgaccgttatctttggagttgtgatgttagcagttcgaattctggtgttgacaacttatagaccatcatttcttctgtaacatagataagaaaatactatttgactattgtccatttccccttttttattttctttttaataattcgtgcagtagtggacacaatactgagttgctttggagaagtcatcttgattgcggc

SEQ ID NO: 18070 - protein, 101 aa, Zea mays subsp. mays
  peptide (1)..(101): Ceres Seq. ID no. 13566550
  misc_feature (10)..(73): Pfam Name: Domain of unknown function UPF0099 Pfam Description: Domain of unknown function UPF0099
  misc_feature (1)..(70): Homolog of NCBI NO: 29428218 NR Description: Protein CGI-147
  misc_feature (1)..(70): Homolog of NCBI NO: 27674393 NR Description: similar to Protein CGI-147 [Rattus norvegicus]
  misc_feature (1)..(71): Homolog of NCBI NO: 40889414 NR Description: Chain A, Crystal Structure Of Bit1
  misc_feature (1)..(71): Homolog of NCBI NO: 11359891 NR Description: hypothetical protein DKFZp434A1535.1 - human
  misc_feature (1)..(71): Homolog of NCBI NO: 7706351 NR Description: CGI-147 protein [Homo sapiens]
  misc_feature (1)..(70): Homolog of NCBI NO: 38345901 NR Description: OSJNBa0060D06.11 [Oryza sativa (japonica
  misc_feature (1)..(73): Homolog of NCBI NO: 11357729 NR Description: hypothetical protein F2K13_20 - Arabidopsis
  misc_feature (1)..(73): Homolog of NCBI NO: 21592675 NR Description: unknown [Arabidopsis thaliana]
  misc_feature (1)..(73): Homolog of NCBI NO: 18418110 NR Description: expressed protein [Arabidopsis thaliana]
  misc_feature (1)..(73): Homolog of NCBI NO: 15228442 NR Description: expressed protein [Arabidopsis thaliana]
FKMVLVVRNDLKMGKGKIAAQCSHATLGLFKKLQQRAPKSLRRWERCGQVKVVVKIESEEDMLVLQGRAKVFKSANSHNHRRWKNTDCSKFKDSHGYSGAS

SEQ ID NO: 18071 - protein, 99 aa, Zea mays subsp. mays
  peptide (1)..(99): Ceres Seq. ID no. 13566551
  misc_feature (8)..(71): Pfam Name: Domain of unknown function UPF0099 Pfam Description: Domain of unknown function UPF0099
  misc_feature (1)..(68): Homolog of NCBI NO: 29428218 NR Description: Protein CGI-147
  misc_feature (1)..(68): Homolog of NCBI NO: 27674393 NR Description: similar to Protein CGI-147 [Rattus norvegicus]
  misc_feature (1)..(69): Homolog of NCBI NO: 40889414 NR Description: Chain A, Crystal Structure Of Bit1
  misc_feature (1)..(69): Homolog of NCBI NO: 11359891 NR Description: hypothetical protein DKFZp434A1535.1 - human
  misc_feature (1)..(69): Homolog of NCBI NO: 7706351 NR Description: CGI-147 protein [Homo sapiens]
  misc_feature (1)..(68): Homolog of NCBI NO: 38345901 NR Description: OSJNBa0060D06.11 [Oryza sativa (japonica
  misc_feature (1)..(71): Homolog of NCBI NO: 11357729 NR Description: hypothetical protein F2K13_20 - Arabidopsis
  misc_feature (1)..(71): Homolog of NCBI NO: 21592675 NR Description: unknown [Arabidopsis thaliana]
  misc_feature (1)..(71): Homolog of NCBI NO: 18418110 NR Description: expressed protein [Arabidopsis thaliana]
  misc_feature (1)..(71): Homolog of NCBI NO: 15228442 NR Description: expressed protein [Arabidopsis thaliana]
MVLVVRNDLKMGKGKIAAQCSHATLGLFKKLQQRAPKSLRRWERCGQVKVVVKIESEEDMLVLQGRAKVFKSANSHNHRRWKNTDCSKFKDSHGYSGAS

SEQ ID NO: 18072 - protein, 89 aa, Zea mays subsp. mays
  peptide (1)..(89): Ceres Seq. ID no. 13566552
  misc_feature (1)..(61): Pfam Name: Domain of unknown function UPF0099 Pfam Description: Domain of unknown function UPF0099
  misc_feature (1)..(58): Homolog of NCBI NO: 29428218 NR Description: Protein CGI-147
  misc_feature (1)..(58): Homolog of NCBI NO: 27674393 NR Description: similar to Protein CGI-147 [Rattus norvegicus]
  misc_feature (1)..(59): Homolog of NCBI NO: 40889414 NR Description: Chain A, Crystal Structure Of Bit1
  misc_feature (1)..(59): Homolog of NCBI NO: 11359891 NR Description: hypothetical protein DKFZp434A1535.1 - human
  misc_feature (1)..(59): Homolog of NCBI NO: 7706351 NR Description: CGI-147 protein [Homo sapiens]
  misc_feature (1)..(58): Homolog of NCBI NO: 38345901 NR Description: OSJNBa0060D06.11 [Oryza sativa (japonica
  misc_feature (1)..(61): Homolog of NCBI NO: 11357729 NR Description: hypothetical protein F2K13_20 - Arabidopsis
  misc_feature (1)..(61): Homolog of NCBI NO: 21592675 NR Description: unknown [Arabidopsis thaliana]
  misc_feature (1)..(61): Homolog of NCBI NO: 18418110 NR Description: expressed protein [Arabidopsis thaliana]
  misc_feature (1)..(61): Homolog of NCBI NO: 15228442 NR Description: expressed protein [Arabidopsis thaliana]
MGKGKIAAQCSHATLGLFKKLQQRAPKSLRRWERCGQVKVVVKIESEEDMLVLQGRAKVFKSANSHNHRRWKNTDCSKFKDSHGYSGAS

SEQ ID NO: 18073 - DNA, 529 bp, Zea mays subsp. mays
  misc_feature (1)..(529): Ceres Seq. ID no. 12416340
  misc_feature: MA Experiment ID: 108544 Result: Down-regulated in Transcription
  misc_feature: MA Experiment ID: 20000492 Result: Up-regulated in Transcription
  misc_feature: MA Experiment 20000492 PARAMETER Experiment Name: Zm_Hybrid_Seed_Dev_P Parameter: DAP Value: 12
  misc_feature: MA Experiment 20000492 PARAMETER Experiment Name: Zm_Hybrid_Seed_Dev_P Parameter: Organism Value: Zea mays
  misc_feature: MA Experiment 20000492 PARAMETER Experiment Name: Zm_Hybrid_Seed_Dev_P Parameter: Plant Line Value: 35A19
  misc_feature: MA Experiment 20000492 PARAMETER Experiment Name: Zm_Hybrid_Seed_Dev_P Parameter: Tissue Value: Fert Kernel vs. Unfert Floret
  misc_feature: MA Experiment ID: 20001606 Result: Up-regulated in Transcription
  misc_feature: MA Experiment 20001606 PARAMETER Experiment Name: Zm_50ppm_KNO3_L-to-H_P Parameter: Age (day) Value: 19
  misc_feature: MA Experiment 20001606 PARAMETER Experiment Name: Zm_50ppm_KNO3_L-to-H_P Parameter: Organism Value: Zea mays
  misc_feature: MA Experiment 20001606 PARAMETER Experiment Name: Zm_50ppm_KNO3_L-to-H_P Parameter: Plant Line Value: 35A19
  misc_feature: MA Experiment 20001606 PARAMETER Experiment Name: Zm_50ppm_KNO3_L-to-H_P Parameter: Timepoint (hr) Value: 8
  misc_feature: MA Experiment 20001606 PARAMETER Experiment Name: Zm_50ppm_KNO3_L-to-H_P Parameter: Tissue Value: Shoots
  misc_feature: MA Experiment 20001606 PARAMETER Experiment Name: Zm_50ppm_KNO3_L-to-H_P Parameter: Treatment Value: 50ppm KNO3 vs. 50ppm KCl
atcccctcctcagccatcgcctccctctcccctcaacccagcgcccccctcccgccgccgctagggtttctcctccctccccgcccacccccaaatcatttccgaagcttccagtgcgccgcagtcatgagcgacggcaaggactccctcgacctctccgccctcggcgctgccatccccaactcggccgagctcagcgcggaggacaaggctaaccttgtggcgtcgatcaagaacacgctcgagggattggcgtcgcggcataccgacgtgctcgagagcctcgagcccaaggtcaggaagcgcgtcgagaagctcagggagatccagggcgaacacgacgaacttgaggcaaaatttttcgaggagagagctgctctagaagctaagtatcagaagttgtatgaaccactttactcaaagcgttacgaaattgtcaatggtgtggtcgaggttgagggtatcacagtagaaagtgcagctgaaacccctgcggagcaanngagtggagatgagacctctgctgatc

SEQ ID NO: 18074 - protein, 176 aa, Zea mays subsp. mays
  peptide (1)..(176): Ceres Seq. ID no. 12416341
  misc_feature (100)..(175): Pfam Name: Nucleosome assembly protein (NAP) Pfam Description: Nucleosome assembly protein (NAP)
  misc_feature (43)..(175): Homolog of NCBI NO: 15236115 NR Description: nucleosome assembly protein I-like protein
  misc_feature (43)..(175): Homolog of NCBI NO: 549975 NR Description: nucleosome assembly protein I-like protein
  misc_feature (62)..(170): Homolog of NCBI NO: 2129840 NR Description: nucleosome assembly protein 1 - soybean
  misc_feature (43)..(172): Homolog of NCBI NO: 40287518 NR Description: induced stolon tip protein NAP1Ps [Capsicum
  misc_feature (43)..(167): Homolog of NCBI NO: 7488816 NR Description: nucleosome assembly protein 1 - garden pea
  misc_feature (43)..(175): Homolog of NCBI NO: 18423918 NR Description: nucleosome assembly protein
  misc_feature (43)..(175): Homolog of NCBI NO: 8777435 NR Description: nucleosome assembly protein [Arabidopsis thaliana]
  misc_feature (43)..(175): Homolog of NCBI NO: 15224782 NR Description: putative nucleosome assembly protein
  misc_feature (43)..(171): Homolog of NCBI NO: 29569109 NR Description: nucleosome/chromatin assembly factor group A [Zea
  misc_feature (43)..(175): Homolog of NCBI NO: 21898560 NR Description: nucleosome/chromatin assembly factor group A [Zea
  misc_feature (168)..(168): Xaa is any aa, unknown or other
IPSSAIASLSPQPSAPLPPPLGFLLPPRPPPNHFRSFQCAAVMSDGKDSLDLSALGAAIPNSAELSAEDKANLVASIKNTLEGLASRHTDVLESLEPKVRKRVEKLREIQGEHDELEAKFFEERAALEAKYQKLYEPLYSKRYEIVNGVVEVEGITVESAAETPAEQXSGDETSAD

SEQ ID NO: 18075 - protein, 134 aa, Zea mays subsp. mays
  peptide (1)..(134): Ceres Seq. ID no. 12416342
  misc_feature (58)..(133): Pfam Name: Nucleosome assembly protein (NAP) Pfam Description: Nucleosome assembly protein (NAP)
  misc_feature (1)..(133): Homolog of NCBI NO: 15236115 NR Description: nucleosome assembly protein I-like protein
  misc_feature (1)..(133): Homolog of NCBI NO: 549975 NR Description: nucleosome assembly protein I-like protein
  misc_feature (20)..(128): Homolog of NCBI NO: 2129840 NR Description: nucleosome assembly protein 1 - soybean
  misc_feature (1)..(130): Homolog of NCBI NO: 40287518 NR Description: induced stolon tip protein NAP1Ps [Capsicum
  misc_feature (1)..(125): Homolog of NCBI NO: 7488816 NR Description: nucleosome assembly protein 1 - garden pea
  misc_feature (1)..(133): Homolog of NCBI NO: 18423918 NR Description: nucleosome assembly protein
  misc_feature (1)..(133): Homolog of NCBI NO: 8777435 NR Description: nucleosome assembly protein [Arabidopsis thaliana]
  misc_feature (1)..(133): Homolog of NCBI NO: 15224782 NR Description: putative nucleosome assembly protein
  misc_feature (1)..(129): Homolog of NCBI NO: 29569109 NR Description: nucleosome/chromatin assembly factor group A [Zea
  misc_feature (1)..(133): Homolog of NCBI NO: 21898560 NR Description: nucleosome/chromatin assembly factor group A [Zea
  misc_feature (126)..(126): Xaa is any aa, unknown or other
MSDGKDSLDLSALGAAIPNSAELSAEDKANLVASIKNTLEGLASRHTDVLESLEPKVRKRVEKLREIQGEHDELEAKFFEERAALEAKYQKLYEPLYSKRYEIVNGVVEVEGITVESAAETPAEQXSGDETSAD

SEQ ID NO: 18076 - DNA, 1046 bp, Zea mays subsp. mays
  misc_feature (1)..(1046): Ceres Seq. ID no. 13493323
  misc_feature: MA Experiment ID: 108523 Result: Up-regulated in Transcription
  misc_feature: MA Experiment 108523 PARAMETER Experiment Name: Zm_42deg_Heat_P Parameter: Age (day) Value: 8
  misc_feature: MA Experiment 108523 PARAMETER Experiment Name: Zm_42deg_Heat_P Parameter: Organism Value: Zea mays
  misc_feature: MA Experiment 108523 PARAMETER Experiment Name: Zm_42deg_Heat_P Parameter: Plant Line Value: 35A19
  misc_feature: MA Experiment 108523 PARAMETER Experiment Name: Zm_42deg_Heat_P Parameter: Temperature (deg C) Value: 42 vs. 22
  misc_feature: MA Experiment 108523 PARAMETER Experiment Name: Zm_42deg_Heat_P Parameter: Timepoint (hr) Value: 6
  misc_feature: MA Experiment 108523 PARAMETER Experiment Name: Zm_42deg_Heat_P Parameter: Tissue Value: Aerial
  misc_feature: MA Experiment ID: 108543 Result: Down-regulated in Transcription
  misc_feature: MA Experiment ID: 20000478 Result: Down-regulated in Transcription
  misc_feature: MA Experiment 20000478 PARAMETER Experiment Name: Zm_5mM_SA_P Parameter: Age (day) Value: 11
  misc_feature: MA Experiment 20000478 PARAMETER Experiment Name: Zm_5mM_SA_P Parameter: Organism Value: Zea mays
  misc_feature: MA Experiment 20000478 PARAMETER Experiment Name: Zm_5mM_SA_P Parameter: Plant Line Value: 35A19
  misc_feature: MA Experiment 20000478 PARAMETER Experiment Name: Zm_5mM_SA_P Parameter: Timepoint (hr) Value: 72
  misc_feature: MA Experiment 20000478 PARAMETER Experiment Name: Zm_5mM_SA_P Parameter: Tissue Value: Aerial
  misc_feature: MA Experiment 20000478 PARAMETER Experiment Name: Zm_5mM_SA_P Parameter: Treatment Value: 5mM SA vs. No Treatment
  misc_feature: MA Experiment ID: 20000479 Result: Down-regulated in Transcription
  misc_feature: MA Experiment 20000479 PARAMETER Experiment Name: Zm_Drought_P Parameter: Age (day) Value: 10
  misc_feature: MA Experiment 20000479 PARAMETER Experiment Name: Zm_Drought_P Parameter: Organism Value: Zea mays
  misc_feature: MA Experiment 20000479 PARAMETER Experiment Name: Zm_Drought_P Parameter: Plant Line Value: 35A19
  misc_feature: MA Experiment 20000479 PARAMETER Experiment Name: Zm_Drought_P Parameter: Timepoint (hr) Value: 48
  misc_feature: MA Experiment 20000479 PARAMETER Experiment Name: Zm_Drought_P Parameter: Tissue Value: Aerial
  misc_feature: MA Experiment 20000479 PARAMETER Experiment Name: Zm_Drought_P Parameter: Treatment Value: Drought vs. No Drought
  misc_feature: MA Experiment ID: 20000480 Result: Down-regulated in Transcription
  misc_feature: MA Experiment 20000480 PARAMETER Experiment Name: Zm_Drought_P Parameter: Age (day) Value: 11
  misc_feature: MA Experiment 20000480 PARAMETER Experiment Name: Zm_Drought_P Parameter: Organism Value: Zea mays
  misc_feature: MA Experiment 20000480 PARAMETER Experiment Name: Zm_Drought_P Parameter: Plant Line Value: 35A19
  misc_feature: MA Experiment 20000480 PARAMETER Experiment Name: Zm_Drought_P Parameter: Timepoint (hr) Value: 72
  misc_feature: MA Experiment 20000480 PARAMETER Experiment Name: Zm_Drought_P Parameter: Tissue Value: Aerial
  misc_feature: MA Experiment 20000480 PARAMETER Experiment Name: Zm_Drought_P Parameter: Treatment Value: Drought vs. No Drought
  misc_feature: MA Experiment ID: 20000488 Result: Up-regulated in Transcription
  misc_feature: MA Experiment 20000488 PARAMETER Experiment Name: Zm_50mM_NH4NO3_L_to_H_P Parameter: Organism Value: Zea mays
  misc_feature: MA Experiment 20000488 PARAMETER Experiment Name: Zm_50mM_NH4NO3_L_to_H_P Parameter: Timepoint (hr) Value: 8
  misc_feature: MA Experiment 20000488 PARAMETER Experiment Name: Zm_50mM_NH4NO3_L_to_H_P Parameter: Tissue Value: Leaves
  misc_feature: MA Experiment 20000488 PARAMETER Experiment Name: Zm_50mM_NH4NO3_L_to_H_P Parameter: Treatment Value: 50mM NH4NO3 vs. 100mM Mannitol
  misc_feature: MA Experiment ID: 20000492 Result: Up-regulated in Transcription
  misc_feature: MA Experiment 20000492 PARAMETER Experiment Name: Zm_Hybrid_Seed_Dev_P Parameter: DAP Value: 12
  misc_feature: MA Experiment 20000492 PARAMETER Experiment Name: Zm_Hybrid_Seed_Dev_P Parameter: Organism Value: Zea mays
  misc_feature: MA Experiment 20000492 PARAMETER Experiment Name: Zm_Hybrid_Seed_Dev_P Parameter: Plant Line Value: 35A19
  misc_feature: MA Experiment 20000492 PARAMETER Experiment Name: Zm_Hybrid_Seed_Dev_P Parameter: Tissue Value: Fert Kernel vs. Unfert Floret
  misc_feature: MA Experiment ID: 20000535 Result: Up-regulated in Transcription
  misc_feature: MA Experiment 20000535 PARAMETER Experiment Name: Zm_Hybrid_Seed_Dev_P Parameter: DAP Value: 30 vs. 12
  misc_feature: MA Experiment 20000535 PARAMETER Experiment Name: Zm_Hybrid_Seed_Dev_P Parameter: Organism Value: Zea mays
  misc_feature: MA Experiment 20000535 PARAMETER Experiment Name: Zm_Hybrid_Seed_Dev_P Parameter: Plant Line Value: 35A19
  misc_feature: MA Experiment 20000535 PARAMETER Experiment Name: Zm_Hybrid_Seed_Dev_P Parameter: Tissue Value: Embryo vs. Unfert Floret
taatcgaaaaatcgccgccgcatccacccacgggcccaccaaacgacctcgctgcgcccacccgtccgcccccatctagctcagcggtcccgcacaaccgaccactcggcagaatgccgccgcttcggcctccgccgccgcggctcctgctcaacaacgtctcgtgcatgcggaacgcgcagacggtgctccgcgacatcaacctcagcgtccacgacggcacagccctcgtcctgaccggtgcgaacggctccggcaagaccaccctcctccgcatgctggcgggcttttcgcgtccctcggcgggggagatcctctggaatggtcacgacatcacctccccgggcgttttccagcagtacaagctgcagctcaactggatgtcgctcaaggacgccgtcaaagagaagctcacggtgctcgagaacgtccagtggttcgagctcctcgaggggaaggacggcagcaggtcgggcccagccatcgagctcatgggcctcggcaggctcatgaacgagaaggccaggatgctctccatggggcagaggaagcggctgcagctcgccaggctgctcgctatcgaccgacccatctggctgctggacgagccctcagtcgcgctggacgcagagggtaccaggctgcttgaatacattatcgcagagcatcggaagaagggtggcatcgtgtttgtggccacacatctgcccattcagattgaggattctatgtcgcttcggcttccgcagaggtttccccggaggaagacgctggttgatcttgtccgctgatgtcaatgtgagattgtgagcacaggaatttagctgtatctctctaattcctctccagctatctgtctgattgctgttggagcaattactctggtgctgcatttgtcatcctatttttgacaacatggcaacacattgtcgatgttgataatctgtaggggtctttgtgatcaccgattcgatgcattggcccatgtatttggggacactagaaagcatttgccatggctgatatatgtatggctgttctttgtg

SEQ ID NO: 18077 - protein, 262 aa, Zea mays subsp. mays
  peptide (1)..(262): Ceres Seq. ID no. 13493324
  misc_feature (73)..(234): Pfam Name: ABC transporter Pfam Description: ABC transporter
  misc_feature (43)..(252): Homolog of NCBI NO: 22965489 NR Description: hypothetical protein [Rhodospirillum rubrum]
  misc_feature (55)..(247): Homolog of NCBI NO: 26248584 NR Description: Heme exporter protein A [Escherichia coli CFT073]
  misc_feature (55)..(247): Homolog of NCBI NO: 16130138 NR Description: ATP binding protein of heme exporter A
  misc_feature (55)..(247): Homolog of NCBI NO: 9911057 NR Description: HEME EXPORTER PROTEIN A (CYTOCHROME C-TYPE
  misc_feature (55)..(247): Homolog of NCBI NO: 24113587 NR Description: Heme exporter protein A (Cytochrome c-type
  misc_feature (48)..(247): Homolog of NCBI NO: 15802754 NR Description: ATP binding protein of heme exporter A
  misc_feature (47)..(239): Homolog of NCBI NO: 22962200 NR Description: hypothetical protein [Rhodopseudomonas palustris]
  misc_feature (49)..(251): Homolog of NCBI NO: 23016499 NR Description: hypothetical protein [Magnetospirillum
  misc_feature (56)..(260): Homolog of NCBI NO: 39545846 NR Description: OSJNBb0060E08.17 [Oryza sativa (japonica
  misc_feature (42)..(261): Homolog of NCBI NO: 15221728 NR Description: ABC transporter family protein [Arabidopsis
IEKSPPHPPTGPPNDLAAPTRPPPSSSAVPHNRPLGRMPPLRPPPPRLLLNNVSCMRNAQTVLRDINLSVHDGTALVLTGANGSGKTTLLRMLAGFSRPSAGEILWNGHDITSPGVFQQYKLQLNWMSLKDAVKEKLTVLENVQWFELLEGKDGSRSGPAIELMGLGRLMNEKARMLSMGQRKRLQLARLLAIDRPIWLLDEPSVALDAEGTRLLEYIIAEHRKKGGIVFVATHLPIQIEDSMSLRLPQRFPRRKTLVDLVR

SEQ ID NO: 18078 - protein, 225 aa, Zea mays subsp. mays
  peptide (1)..(225): Ceres Seq. ID no. 13493325
  misc_feature (36)..(197): Pfam Name: ABC transporter Pfam Description: ABC transporter
  misc_feature (6)..(215): Homolog of NCBI NO: 22965489 NR Description: hypothetical protein [Rhodospirillum rubrum]
  misc_feature (18)..(210): Homolog of NCBI NO: 26248584 NR Description: Heme exporter protein A [Escherichia coli CFT073]
  misc_feature (18)..(210): Homolog of NCBI NO: 16130138 NR Description: ATP binding protein of heme exporter A
  misc_feature (18)..(210): Homolog of NCBI NO: 9911057 NR Description: HEME EXPORTER PROTEIN A (CYTOCHROME C-TYPE
  misc_feature (18)..(210): Homolog of NCBI NO: 24113587 NR Description: Heme exporter protein A (Cytochrome c-type
  misc_feature (11)..(210): Homolog of NCBI NO: 15802754 NR Description: ATP binding protein of heme exporter A
  misc_feature (10)..(202): Homolog of NCBI NO: 22962200 NR Description: hypothetical protein [Rhodopseudomonas palustris]
  misc_feature (12)..(214): Homolog of NCBI NO: 23016499 NR Description: hypothetical protein [Magnetospirillum
  misc_feature (19)..(223): Homolog of NCBI NO: 39545846 NR Description: OSJNBb0060E08.17 [Oryza sativa (japonica
  misc_feature (5)..(224): Homolog of NCBI NO: 15221728 NR Description: ABC transporter family protein [Arabidopsis
MPPLRPPPPRLLLNNVSCMRNAQTVLRDINLSVHDGTALVLTGANGSGKTTLLRMLAGFSRPSAGEILWNGHDITSPGVFQQYKLQLNWMSLKDAVKEKLTVLENVQWFELLEGKDGSRSGPAIELMGLGRLMNEKARMLSMGQRKRLQLARLLAIDRPIWLLDEPSVALDAEGTRLLEYIIAEHRKKGGIVFVATHLPIQIEDSMSLRLPQRFPRRKTLVDLVR

SEQ ID NO: 18079 - protein, 207 aa, Zea mays subsp. mays
  peptide (1)..(207): Ceres Seq. ID no. 13493326
  misc_feature (18)..(179): Pfam Name: ABC transporter Pfam Description: ABC transporter
  misc_feature (1)..(197): Homolog of NCBI NO: 22965489 NR Description: hypothetical protein [Rhodospirillum rubrum]
  misc_feature (1)..(192): Homolog of NCBI NO: 26248584 NR Description: Heme exporter protein A [Escherichia coli CFT073]
  misc_feature (1)..(192): Homolog of NCBI NO: 16130138 NR Description: ATP binding protein of heme exporter A
  misc_feature (1)..(192): Homolog of NCBI NO: 9911057 NR Description: HEME EXPORTER PROTEIN A (CYTOCHROME C-TYPE
  misc_feature (1)..(192): Homolog of NCBI NO: 24113587 NR Description: Heme exporter protein A (Cytochrome c-type
  misc_feature (1)..(192): Homolog of NCBI NO: 15802754 NR Description: ATP binding protein of heme exporter A
  misc_feature (1)..(184): Homolog of NCBI NO: 22962200 NR Description: hypothetical protein [Rhodopseudomonas palustris]
  misc_feature (1)..(196): Homolog of NCBI NO: 23016499 NR Description: hypothetical protein [Magnetospirillum
  misc_feature (1)..(205): Homolog of NCBI NO: 39545846 NR Description: OSJNBb0060E08.17 [Oryza sativa (japonica
  misc_feature (1)..(206): Homolog of NCBI NO: 15221728 NR Description: ABC transporter family protein [Arabidopsis
MRNAQTVLRDINLSVHDGTALVLTGANGSGKTTLLRMLAGFSRPSAGEILWNGHDITSPGVFQQYKLQLNWMSLKDAVKEKLTVLENVQWFELLEGKDGSRSGPAIELMGLGRLMNEKARMLSMGQRKRLQLARLLAIDRPIWLLDEPSVALDAEGTRLLEYIIAEHRKKGGIVFVATHLPIQIEDSMSLRLPQRFPRRKTLVDLVR

SEQ ID NO: 18080 - DNA, 926 bp, Zea mays subsp. mays
  misc_feature (1)..(926): Ceres Seq. ID no. 12416929
  misc_feature: MA Experiment ID: 108535 Result: Down-regulated in Transcription
  misc_feature: MA Experiment 108535 PARAMETER Experiment Name: Zm_Meristem_P Parameter: Age (day) Value: 8
  misc_feature: MA Experiment 108535 PARAMETER Experiment Name: Zm_Meristem_P Parameter: Organism Value: Zea mays
  misc_feature: MA Experiment 108535 PARAMETER Experiment Name: Zm_Meristem_P Parameter: Plant Line Value: 35A19
  misc_feature: MA Experiment 108535 PARAMETER Experiment Name: Zm_Meristem_P Parameter: Tissue Value: Root Meristem vs. Above Root Meristem
  misc_feature: MA Experiment ID: 108536 Result: Up-regulated in Transcription
  misc_feature: MA Experiment 108536 PARAMETER Experiment Name: Zm_Meristem_P Parameter: Age (day) Value: 8
  misc_feature: MA Experiment 108536 PARAMETER Experiment Name: Zm_Meristem_P Parameter: Organism Value: Zea mays
  misc_feature: MA Experiment 108536 PARAMETER Experiment Name: Zm_Meristem_P Parameter: Plant Line Value: 35A19
  misc_feature: MA Experiment 108536 PARAMETER Experiment Name: Zm_Meristem_P Parameter: Tissue Value: Shoot Meristem vs. Above Shoot Meristem
  misc_feature: MA Experiment ID: 108543 Result: Up-regulated in Transcription
  misc_feature: MA Experiment ID: 108544 Result: Up-regulated in Transcription
  misc_feature: MA Experiment ID: 108545 Result: Down-regulated in Transcription
  misc_feature: MA Experiment 108545 PARAMETER Experiment Name: Zm_Imbibed_Seeds_P Parameter: Age (day) Value: 3 vs. 2
  misc_feature: MA Experiment 108545 PARAMETER Experiment Name: Zm_Imbibed_Seeds_P Parameter: Organism Value: Zea mays
  misc_feature: MA Experiment 108545 PARAMETER Experiment Name: Zm_Imbibed_Seeds_P Parameter: Plant Line Value: 35A19
  misc_feature: MA Experiment 108545 PARAMETER Experiment Name: Zm_Imbibed_Seeds_P Parameter: Tissue Value: Aerial vs. Embryo
  misc_feature: MA Experiment ID: 108559 Result: Down-regulated in Transcription
  misc_feature: MA Experiment 108559 PARAMETER Experiment Name: Zm_5mM_NO_P Parameter: Age (day) Value: 8
  misc_feature: MA Experiment 108559 PARAMETER Experiment Name: Zm_5mM_NO_P Parameter: Organism Value: Zea mays
  misc_feature: MA Experiment 108559 PARAMETER Experiment Name: Zm_5mM_NO_P Parameter: Plant Line Value: 35A19
  misc_feature: MA Experiment 108559 PARAMETER Experiment Name: Zm_5mM_NO_P Parameter: Timepoint (hr) Value: 12
  misc_feature: MA Experiment 108559 PARAMETER Experiment Name: Zm_5mM_NO_P Parameter: Tissue Value: Aerial
  misc_feature: MA Experiment 108559 PARAMETER Experiment Name: Zm_5mM_NO_P Parameter: Treatment Value: 5mM NO vs. No Treatment
  misc_feature: MA Experiment ID: 108687 Result: Down-regulated in Transcription
  misc_feature: MA Experiment 108687 PARAMETER Experiment Name: Zm_Embryos-Flowers__P Parameter: Tissue Value: Embryo vs. Aerial+
  misc_feature: MA Experiment ID: 108689 Result: Up-regulated in Transcription
  misc_feature: MA Experiment 108689 PARAMETER Experiment Name: Zm_Drought_Roots_P Parameter: Age (day) Value: 9
  misc_feature: MA Experiment 108689 PARAMETER Experiment Name: Zm_Drought_Roots_P Parameter: Organism Value: Zea mays
  misc_feature: MA Experiment 108689 PARAMETER Experiment Name: Zm_Drought_Roots_P Parameter: Plant Line Value: 35A19
  misc_feature: MA Experiment 108689 PARAMETER Experiment Name: Zm_Drought_Roots_P Parameter: Timepoint (hr) Value: 24
  misc_feature: MA Experiment 108689 PARAMETER Experiment Name: Zm_Drought_Roots_P Parameter: Tissue Value: Roots
  misc_feature: MA Experiment 108689 PARAMETER Experiment Name: Zm_Drought_Roots_P Parameter: Treatment Value: Drought vs. No Drought
  misc_feature: MA Experiment ID: 20000492 Result: Down-regulated in Transcription
  misc_feature: MA Experiment 20000492 PARAMETER Experiment Name: Zm_Hybrid_Seed_Dev_P Parameter: DAP Value: 12
  misc_feature: MA Experiment 20000492 PARAMETER Experiment Name: Zm_Hybrid_Seed_Dev_P Parameter: Organism Value: Zea mays
  misc_feature: MA Experiment 20000492 PARAMETER Experiment Name: Zm_Hybrid_Seed_Dev_P Parameter: Plant Line Value: 35A19
  misc_feature: MA Experiment 20000492 PARAMETER Experiment Name: Zm_Hybrid_Seed_Dev_P Parameter: Tissue Value: Fert Kernel vs. Unfert Floret
  misc_feature: MA Experiment ID: 20000535 Result: Down-regulated in Transcription
  misc_feature: MA Experiment 20000535 PARAMETER Experiment Name: Zm_Hybrid_Seed_Dev_P Parameter: DAP Value: 30 vs. 12
  misc_feature: MA Experiment 20000535 PARAMETER Experiment Name: Zm_Hybrid_Seed_Dev_P Parameter: Organism Value: Zea mays
  misc_feature: MA Experiment 20000535 PARAMETER Experiment Name: Zm_Hybrid_Seed_Dev_P Parameter: Plant Line Value: 35A19
  misc_feature: MA Experiment 20000535 PARAMETER Experiment Name: Zm_Hybrid_Seed_Dev_P Parameter: Tissue Value: Embryo vs. Unfert Floret
accagcgcagaatcagcaaacgcgccattgacgcgcactcgtagtcttgactcttgcgtgcttccctcgtcttctcggacgttccgttccatcgccatggcggaccagcttagcgaggagcagattgccgagttcaaggaagctttcagcctcttcgacaaggacggcgacggttgcatcacaaccaaggagctcggaaccgtgatgcggtctctcgggcagaaccccaccgaggcggagctgcaggacatgatcgccgaggtggacagcaacggcagcggcaccatcgacgagcaggagttcctgggcctgatggcgcgcaagatgagggacgcggagtcggaggaggagctcagggaggcgttccgcgtgttcgacaaggaccagaacggggtgatctccgcggccgagctccggcacgtgatgaccaacctcggggagaagctgagcgagcaggaggtggccgagatggtccgcgaggccgacgtggaccgcgacggccacatcaactacgacgagttcgtcaaggtcatgncggccaagcgaaggagcaagaggacggaggagaaggcgacgcgcggcaagaagaagccggcggcggcgccgtccgacgccggcaagcgtggccagaaatgcgtgatcctgtgagccggagcttcggtcgtccagtacatgctggtgctgcgtgcgtgtcacccgctcgacctntgcttccggcacaccagctgcgggaagctccacttctgctgttntgcaggtgaatgtagctgtttgtaaacttatcagagcgtgtttgggagcatgattgaatgggaaccccctcagttcctccaatccaagggattttagtcatctcgatctcctctaatctccttgcccccaaacaaaccattaaataagaaaaacggaggaagtaactgtttgcc

SEQ ID NO: 18081 - protein, 215 aa, Zea mays subsp. mays
  peptide (1)..(215): Ceres Seq. ID no. 12416930
  misc_feature (44)..(72): Pfam Name: EF hand Pfam Description: EF hand
  misc_feature (33)..(181): Homolog of NCBI NO: 20186 NR Description: calmodulin [Oryza sativa]
  misc_feature (33)..(181): Homolog of NCBI NO: 2129978 NR Description: calmodulin PCM2/PCM4/PCM5/PCM6/PCM7/PCM8 - potato
  misc_feature (33)..(181): Homolog of NCBI NO: 100665 NR Description: calmodulin 2 (clone lambda DASH) - rice
  misc_feature (33)..(181): Homolog of NCBI NO: 34903330 NR Description: unnamed protein product [Oryza sativa (japonica
  misc_feature (33)..(181): Homolog of NCBI NO: 1754999 NR Description: calmodulin TaCaM2-2
  misc_feature (33)..(181): Homolog of NCBI NO: 1076793 NR Description: calmodulin cam2 - maize
  misc_feature (33)..(215): Homolog of NCBI NO: 115492 NR Description: Calmodulin-related protein
  misc_feature (33)..(215): Homolog of NCBI NO: 30683369 NR Description: calmodulin [Arabidopsis thaliana]
  misc_feature (33)..(215): Homolog of NCBI NO: 34909152 NR Description: putative calmodulin [Oryza sativa (japonica
  misc_feature (33)..(215): Homolog of NCBI NO: 7441481 NR Description: probable calmodulin - rice
  misc_feature (179)..(179): Xaa is any aa, unknown or other
TSAESANAPLTRTRSLDSCVLPSSSRTFRSIAMADQLSEEQIAEFKEAFSLFDKDGDGCITTKELGTVMRSLGQNPTEAELQDMIAEVDSNGSGTIDEQEFLGLMARKMRDAESEEELREAFRVFDKDQNGVISAAELRHVMTNLGEKLSEQEVAEMVREADVDRDGHINYDEFVKVMXAKRRSKRTEEKATRGKKKPAAAPSDAGKRGQKCVIL

SEQ ID NO: 18082 - protein, 183 aa, Zea mays subsp. mays
  peptide (1)..(183): Ceres Seq. ID no. 12416931
  misc_feature (12)..(40): Pfam Name: EF hand Pfam Description: EF hand
  misc_feature (1)..(149): Homolog of NCBI NO: 20186 NR Description: calmodulin [Oryza sativa]
  misc_feature (1)..(149): Homolog of NCBI NO: 2129978 NR Description: calmodulin PCM2/PCM4/PCM5/PCM6/PCM7/PCM8 - potato
  misc_feature (1)..(149): Homolog of NCBI NO: 100665 NR Description: calmodulin 2 (clone lambda DASH) - rice
  misc_feature (1)..(149): Homolog of NCBI NO: 34903330 NR Description: unnamed protein product [Oryza sativa (japonica
  misc_feature (1)..(149): Homolog of NCBI NO: 1754999 NR Description: calmodulin TaCaM2-2
  misc_feature (1)..(149): Homolog of NCBI NO: 1076793 NR Description: calmodulin cam2 - maize
  misc_feature (1)..(183): Homolog of NCBI NO: 115492 NR Description: Calmodulin-related protein
  misc_feature (1)..(183): Homolog of NCBI NO: 30683369 NR Description: calmodulin [Arabidopsis thaliana]
  misc_feature (1)..(183): Homolog of NCBI NO: 34909152 NR Description: putative calmodulin [Oryza sativa (japonica
  misc_feature (1)..(183): Homolog of NCBI NO: 7441481 NR Description: probable calmodulin - rice
  misc_feature (147)..(147): Xaa is any aa, unknown or other
MADQLSEEQIAEFKEAFSLFDKDGDGCITTKELGTVMRSLGQNPTEAELQDMIAEVDSNGSGTIDEQEFLGLMARKMRDAESEEELREAFRVFDKDQNGVISAAELRHVMTNLGEKLSEQEVAEMVREADVDRDGHINYDEFVKVMXAKRRSKRTEEKATRGKKKPAAAPSDAGKRGQKCVIL

SEQ ID NO: 18083 - protein, 147 aa, Zea mays subsp. mays
  peptide (1)..(147): Ceres Seq. ID no. 12416932
  misc_feature (1)..(113): Homolog of NCBI NO: 20186 NR Description: calmodulin [Oryza sativa]
  misc_feature (1)..(113): Homolog of NCBI NO: 2129978 NR Description: calmodulin PCM2/PCM4/PCM5/PCM6/PCM7/PCM8 - potato
  misc_feature (1)..(113): Homolog of NCBI NO: 100665 NR Description: calmodulin 2 (clone lambda DASH) - rice
  misc_feature (1)..(113): Homolog of NCBI NO: 34903330 NR Description: unnamed protein product [Oryza sativa (japonica
  misc_feature (1)..(113): Homolog of NCBI NO: 1754999 NR Description: calmodulin TaCaM2-2
  misc_feature (1)..(113): Homolog of NCBI NO: 1076793 NR Description: calmodulin cam2 - maize
  misc_feature (1)..(147): Homolog of NCBI NO: 115492 NR Description: Calmodulin-related protein
  misc_feature (1)..(147): Homolog of NCBI NO: 30683369 NR Description: calmodulin [Arabidopsis thaliana]
  misc_feature (1)..(147): Homolog of NCBI NO: 34909152 NR Description: putative calmodulin [Oryza sativa (japonica
  misc_feature (1)..(147): Homolog of NCBI NO: 7441481 NR Description: probable calmodulin - rice
  misc_feature (111)..(111): Xaa is any aa, unknown or other
MRSLGQNPTEAELQDMIAEVDSNGSGTIDEQEFLGLMARKMRDAESEEELREAFRVFDKDQNGVISAAELRHVMTNLGEKLSEQEVAEMVREADVDRDGHINYDEFVKVMXAKRRSKRTEEKATRGKKKPAAAPSDAGKRGQKCVIL

SEQ ID NO: 18084 - DNA, 891 bp, Zea mays subsp. mays
  misc_feature (1)..(891): Ceres Seq. ID no. 12416118
  misc_feature: MA Experiment ID: 108527 Result: Down-regulated in Transcription
  misc_feature: MA Experiment 108527 PARAMETER Experiment Name: Zm_5mM_NO_P Parameter: Age (day) Value: 8
  misc_feature: MA Experiment 108527 PARAMETER Experiment Name: Zm_5mM_NO_P Parameter: Organism Value: Zea mays
  misc_feature: MA Experiment 108527 PARAMETER Experiment Name: Zm_5mM_NO_P Parameter: Plant Line Value: 35A19
  misc_feature: MA Experiment 108527 PARAMETER Experiment Name: Zm_5mM_NO_P Parameter: Timepoint (hr) Value: 6
  misc_feature: MA Experiment 108527 PARAMETER Experiment Name: Zm_5mM_NO_P Parameter: Tissue Value: Aerial
  misc_feature: MA Experiment 108527 PARAMETER Experiment Name: Zm_5mM_NO_P Parameter: Treatment Value: 5mM NO vs. No Treatment
  misc_feature: MA Experiment ID: 108529 Result: Up-regulated in Transcription
  misc_feature: MA Experiment 108529 PARAMETER Experiment Name: Zm_Imbibed_Seeds_P Parameter: Age (day) Value: 5 vs. 2
  misc_feature: MA Experiment 108529 PARAMETER Experiment Name: Zm_Imbibed_Seeds_P Parameter: Organism Value: Zea mays
  misc_feature: MA Experiment 108529 PARAMETER Experiment Name: Zm_Imbibed_Seeds_P Parameter: Plant Line Value: 35A19
  misc_feature: MA Experiment 108529 PARAMETER Experiment Name: Zm_Imbibed_Seeds_P Parameter: Tissue Value: Roots vs. Embryo
  misc_feature: MA Experiment ID: 108535 Result: Down-regulated in Transcription
  misc_feature: MA Experiment 108535 PARAMETER Experiment Name: Zm_Meristem_P Parameter: Age (day) Value: 8
  misc_feature: MA Experiment 108535 PARAMETER Experiment Name: Zm_Meristem_P Parameter: Organism Value: Zea mays
  misc_feature: MA Experiment 108535 PARAMETER Experiment Name: Zm_Meristem_P Parameter: Plant Line Value: 35A19
  misc_feature: MA Experiment 108535 PARAMETER Experiment Name: Zm_Meristem_P Parameter: Tissue Value: Root Meristem vs. Above Root Meristem
  misc_feature: MA Experiment ID: 108543 Result: Up-regulated in Transcription
  misc_feature: MA Experiment ID: 108546 Result: Up-regulated in Transcription
  misc_feature: MA Experiment 108546 PARAMETER Experiment Name: Zm_Imbibed_Seeds_P Parameter: Age (day) Value: 3 vs. 2
  misc_feature: MA Experiment 108546 PARAMETER Experiment Name: Zm_Imbibed_Seeds_P Parameter: Organism Value: Zea mays
  misc_feature: MA Experiment 108546 PARAMETER Experiment Name: Zm_Imbibed_Seeds_P Parameter: Plant Line Value: 35A19
  misc_feature: MA Experiment 108546 PARAMETER Experiment Name: Zm_Imbibed_Seeds_P Parameter: Tissue Value: Roots vs. Embryo
  misc_feature: MA Experiment ID: 108687 Result: Down-regulated in Transcription
  misc_feature: MA Experiment 108687 PARAMETER Experiment Name: Zm_Embryos-Flowers__P Parameter: Tissue Value: Embryo vs. Aerial+
  misc_feature: MA Experiment ID: 20000488 Result: Down-regulated in Transcription
  misc_feature: MA Experiment 20000488 PARAMETER Experiment Name: Zm_50mM_NH4NO3_L_to_H_P Parameter: Organism Value: Zea mays
  misc_feature: MA Experiment 20000488 PARAMETER Experiment Name: Zm_50mM_NH4NO3_L_to_H_P Parameter: Timepoint (hr) Value: 8
  misc_feature: MA Experiment 20000488 PARAMETER Experiment Name: Zm_50mM_NH4NO3_L_to_H_P Parameter: Tissue Value: Leaves
  misc_feature: MA Experiment 20000488 PARAMETER Experiment Name: Zm_50mM_NH4NO3_L_to_H_P Parameter: Treatment Value: 50mM NH4NO3 vs. 100mM Mannitol
  misc_feature: MA Experiment ID: 20000492 Result: Down-regulated in Transcription
  misc_feature: MA Experiment 20000492 PARAMETER Experiment Name: Zm_Hybrid_Seed_Dev_P Parameter: DAP Value: 12
  misc_feature: MA Experiment 20000492 PARAMETER Experiment Name: Zm_Hybrid_Seed_Dev_P Parameter: Organism Value: Zea mays
  misc_feature: MA Experiment 20000492 PARAMETER Experiment Name: Zm_Hybrid_Seed_Dev_P Parameter: Plant Line Value: 35A19
  misc_feature: MA Experiment 20000492 PARAMETER Experiment Name: Zm_Hybrid_Seed_Dev_P Parameter: Tissue Value: Fert Kernel vs. Unfert Floret
  misc_feature: MA Experiment ID: 20000535 Result: Down-regulated in Transcription
  misc_feature: MA Experiment 20000535 PARAMETER Experiment Name: Zm_Hybrid_Seed_Dev_P Parameter: DAP Value: 30 vs. 12
  misc_feature: MA Experiment 20000535 PARAMETER Experiment Name: Zm_Hybrid_Seed_Dev_P Parameter: Organism Value: Zea mays
  misc_feature: MA Experiment 20000535 PARAMETER Experiment Name: Zm_Hybrid_Seed_Dev_P Parameter: Plant Line Value: 35A19
  misc_feature: MA Experiment 20000535 PARAMETER Experiment Name: Zm_Hybrid_Seed_Dev_P Parameter: Tissue Value: Embryo vs. Unfert Floret
taatccgaactatttcttttcgtcaaactaaagtgaagacaacgttttgctccgcaggacatgttcacggcgggtacggacacgtcgtcgatcatcgtggagtgggcgatggcggagatgctcaagaacccgagcgtcatggcgcgcgcgcaggaggagctggaccgcgcggtgggccggggccggcgcctggaggagtcggacctgcccggcctcccctacctgcaggcggtgtgcaaggaggccatgcggctgcacccgtccacgccgctcagcctcccgcacttctccttggacgcctgcgacgacgtcgacggctaccgcgtcccggccaacacccgcctgctcgtcaacgtctgggccatcggccgggacccggaggcctgggagaggcccctcgacttccgccccgagcgcttcctgcccgggggcggcgcggagaaggtcgacccgctggggaactgcttcgagctcatcccgttcggcgccggccggaggatntgcgcggggaagctggcgggcatggtgttcgtgcagtacttcctgggcacgctgctgcacgcgttcgactggcgcctgcctgacggcgaggagaagctggacatgagcgagacgttcggcctcgcgctgcccaaggcagtgccgctccgcgccgtcgccacgccacggctcgtgccggaagcctatgcctgagcctgagttagctgtcagagttnttcacgcgtgctgtcccaacaagcatggtttggcttggatggtttactctgttggtgttgctgccttcctgcatacgtgngcatacactagtattctgtgttgatcctacacttgttgcctggtatagtacacaacatttgaacagatgatggttgatntgaactnnnnggagtt

SEQ ID NO: 18085 - protein, 210 aa, Zea mays subsp. mays
  peptide (1)..(210): Ceres Seq. ID no. 12416119
  misc_feature (1)..(199): Pfam Name: Cytochrome P450 Pfam Description: Cytochrome P450
  misc_feature (1)..(209): Homolog of NCBI NO: 30421433 NR Description: flavonoid 3',5'-hydroxylase [Gossypium hirsutum]
  misc_feature (147)..(147): Xaa is any aa, unknown or other
MFTAGTDTSSIIVEWAMAEMLKNPSVMARAQEELDRAVGRGRRLEESDLPGLPYLQAVCKEAMRLHPSTPLSLPHFSLDACDDVDGYRVPANTRLLVNVWAIGRDPEAWERPLDFRPERFLPGGGAEKVDPLGNCFELIPFGAGRRXCAGKLAGMVFVQYFLGTLLHAFDWRLPDGEEKLDMSETFGLALPKAVPLRAVATPRLVPEAYA

SEQ ID NO: 18086 - protein, 194 aa, Zea mays subsp. mays
  peptide (1)..(194): Ceres Seq. ID no. 12416120
  misc_feature (1)..(183): Pfam Name: Cytochrome P450 Pfam Description: Cytochrome P450
  misc_feature (1)..(193): Homolog of NCBI NO: 30421433 NR Description: flavonoid 3',5'-hydroxylase [Gossypium hirsutum]
  misc_feature (131)..(131): Xaa is any aa, unknown or other
MAEMLKNPSVMARAQEELDRAVGRGRRLEESDLPGLPYLQAVCKEAMRLHPSTPLSLPHFSLDACDDVDGYRVPANTRLLVNVWAIGRDPEAWERPLDFRPERFLPGGGAEKVDPLGNCFELIPFGAGRRXCAGKLAGMVFVQYFLGTLLHAFDWRLPDGEEKLDMSETFGLALPKAVPLRAVATPRLVPEAYA

SEQ ID NO: 18087 - protein, 193 aa, Zea mays subsp. mays
  peptide (1)..(193): Ceres Seq. ID no. 12416121
  misc_feature (167)..(167): Xaa is any aa, unknown or other
IRTISFRQTKVKTTFCSAGHVHGGYGHVVDHRGVGDGGDAQEPERHGARAGGAGPRGGPGPAPGGVGPARPPLPAGGVQGGHAAAPVHAAQPPALLLGRLRRRRRLPRPGQHPPARQRLGHRPGPGGLGEAPRLPPRALPARGRRGEGRPAGELLRAHPVRRRPEDXRGEAGGHGVRAVLPGHAAARVRLAPA

SEQ ID NO: 18088 - DNA, 1254 bp, Zea mays subsp. mays; identical to SEQ ID NO: 6716
  misc_feature (1)..(1254): Ceres Seq. ID no. 13498495
  misc_feature: MA Experiment ID: 108522 Result: Up-regulated in Transcription
  misc_feature: MA Experiment 108522 PARAMETER Experiment Name: Zm_42deg_Heat_P Parameter: Age (day) Value: 8
  misc_feature: MA Experiment 108522 PARAMETER Experiment Name: Zm_42deg_Heat_P Parameter: Organism Value: Zea mays
  misc_feature: MA Experiment 108522 PARAMETER Experiment Name: Zm_42deg_Heat_P Parameter: Plant Line Value: 35A19
  misc_feature: MA Experiment 108522 PARAMETER Experiment Name: Zm_42deg_Heat_P Parameter: Temperature (deg C) Value: 42 vs. 22
  misc_feature: MA Experiment 108522 PARAMETER Experiment Name: Zm_42deg_Heat_P Parameter: Timepoint (hr) Value: 1
  misc_feature: MA Experiment 108522 PARAMETER Experiment Name: Zm_42deg_Heat_P Parameter: Tissue Value: Aerial
  misc_feature: MA Experiment ID: 108523 Result: Up-regulated in Transcription
  misc_feature: MA Experiment 108523 PARAMETER Experiment Name: Zm_42deg_Heat_P Parameter: Age (day) Value: 8
  misc_feature: MA Experiment 108523 PARAMETER Experiment Name: Zm_42deg_Heat_P Parameter: Organism Value: Zea mays
  misc_feature: MA Experiment 108523 PARAMETER Experiment Name: Zm_42deg_Heat_P Parameter: Plant Line Value: 35A19
  misc_feature: MA Experiment 108523 PARAMETER Experiment Name: Zm_42deg_Heat_P Parameter: Temperature (deg C) Value: 42 vs. 22
  misc_feature: MA Experiment 108523 PARAMETER Experiment Name: Zm_42deg_Heat_P Parameter: Timepoint (hr) Value: 6
  misc_feature: MA Experiment 108523 PARAMETER Experiment Name: Zm_42deg_Heat_P Parameter: Tissue Value: Aerial
  misc_feature: MA Experiment ID: 20000108 Result: Up-regulated in Transcription
  misc_feature: MA Experiment 20000108 PARAMETER Experiment Name: Zm_Root-Tips_P Parameter: Age (day) Value: 12
  misc_feature: MA Experiment 20000108 PARAMETER Experiment Name: Zm_Root-Tips_P Parameter: Organism Value: Zea mays
  misc_feature: MA Experiment 20000108 PARAMETER Experiment Name: Zm_Root-Tips_P Parameter: Tissue Value: Root tips vs. Root mid region    35
  misc_feature: MA Experiment 20000108 PARAMETER Experiment Name: Zm_Root-Tips_P Parameter: Tissue Value: Root tips vs. Root mid region   Sequence Listing-Misc Features (4)
  misc_feature: MA Experiment ID: 20000487 Result: Up-regulated in Transcription
  misc_feature: MA Experiment 20000487 PARAMETER Experiment Name: Zm_50mM_NH4NO3_L_to_H_P Parameter: Organism Value: Zea mays
  misc_feature: MA Experiment 20000487 PARAMETER Experiment Name: Zm_50mM_NH4NO3_L_to_H_P Parameter: Timepoint (hr) Value: 4
  misc_feature: MA Experiment 20000487 PARAMETER Experiment Name: Zm_50mM_NH4NO3_L_to_H_P Parameter: Tissue Value: Leaves
  misc_feature: MA Experiment 20000487 PARAMETER Experiment Name: Zm_50mM_NH4NO3_L_to_H_P Parameter: Treatment Value: 50mM NH4NO3 vs. 100mM Mannitol

SEQ ID NO: 18089 - protein, 417 aa, Zea mays subsp. mays; identical to SEQ ID NO: 6717
  peptide (1)..(417): Ceres Seq. ID no. 13498496
  misc_feature (96)..(199): Pfam Name: tRNA synthetases class I (I, L, M and V) Pfam Description: tRNA synthetases class I (I, L, M and V)
  misc_feature (45)..(413): Homolog of NCBI NO: 37535144 NR Description: putative cysteinyl-tRNA synthetase [Oryza sativa
  misc_feature (65)..(408): Homolog of NCBI NO: 25293240 NR Description: probable cysteinyl-tRNA synthetase [imported] -
  misc_feature (73)..(408): Homolog of NCBI NO: 18402580 NR Description: cysteinyl-tRNA synthetase -related [Arabidopsis
  misc_feature (65)..(415): Homolog of NCBI NO: 15241557 NR Description: cysteine-tRNA ligase -related protein
  misc_feature (65)..(384): Homolog of NCBI NO: 9758060 NR Description: cysteine-tRNA ligase [Arabidopsis thaliana]
  misc_feature (66)..(402): Homolog of NCBI NO: 23055378 NR Description: hypothetical protein [Geobacter metallireducens]
  misc_feature (66)..(408): Homolog of NCBI NO: 23001592 NR Description: hypothetical protein [Magnetococcus sp. MC-1]
  misc_feature (64)..(380): Homolog of NCBI NO: 15228880 NR Description: cysteine-tRNA ligase-related protein [Arabidopsis
  misc_feature (66)..(409): Homolog of NCBI NO: 39998454 NR Description: cysteinyl-tRNA synthetase [Geobacter
  misc_feature (66)..(390): Homolog of NCBI NO: 34497201 NR Description: cysteinyl-tRNA synthetase [Chromobacterium

SEQ ID NO: 18090 - protein, 397 aa, Zea mays subsp. mays; identical to SEQ ID NO: 6718
  peptide (1)..(397): Ceres Seq. ID no. 13498497
  misc_feature (76)..(179): Pfam Name: tRNA synthetases class I (I, L, M and V) Pfam Description: tRNA synthetases class I (I, L, M and V)
  misc_feature (25)..(393): Homolog of NCBI NO: 37535144 NR Description: putative cysteinyl-tRNA synthetase [Oryza sativa
  misc_feature (45)..(388): Homolog of NCBI NO: 25293240 NR Description: probable cysteinyl-tRNA synthetase [imported] -
  misc_feature (53)..(388): Homolog of NCBI NO: 18402580 NR Description: cysteinyl-tRNA synthetase -related [Arabidopsis
  misc_feature (45)..(395): Homolog of NCBI NO: 15241557 NR Description: cysteine-tRNA ligase -related protein
  misc_feature (45)..(364): Homolog of NCBI NO: 9758060 NR Description: cysteine-tRNA ligase [Arabidopsis thaliana]
  misc_feature (46)..(382): Homolog of NCBI NO: 23055378 NR Description: hypothetical protein [Geobacter metallireducens]
  misc_feature (46)..(388): Homolog of NCBI NO: 23001592 NR Description: hypothetical protein [Magnetococcus sp. MC-1]
  misc_feature (44)..(360): Homolog of NCBI NO: 15228880 NR Description: cysteine-tRNA ligase-related protein [Arabidopsis
  misc_feature (46)..(389): Homolog of NCBI NO: 39998454 NR Description: cysteinyl-tRNA synthetase [Geobacter
  misc_feature (46)..(370): Homolog of NCBI NO: 34497201 NR Description: cysteinyl-tRNA synthetase [Chromobacterium

SEQ ID NO: 18091 - protein, 385 aa, Zea mays subsp. mays; identical to SEQ ID NO: 6719
  peptide (1)..(385): Ceres Seq. ID no. 13498498
  misc_feature (64)..(167): Pfam Name: tRNA synthetases class I (I, L, M and V) Pfam Description: tRNA synthetases class I (I, L, M and V)
  misc_feature (13)..(381): Homolog of NCBI NO: 37535144 NR Description: putative cysteinyl-tRNA synthetase [Oryza sativa
  misc_feature (33)..(376): Homolog of NCBI NO: 25293240 NR Description: probable cysteinyl-tRNA synthetase [imported] -
  misc_feature (41)..(376): Homolog of NCBI NO: 18402580 NR Description: cysteinyl-tRNA synthetase -related [Arabidopsis
  misc_feature (33)..(383): Homolog of NCBI NO: 15241557 NR Description: cysteine-tRNA ligase -related protein
  misc_feature (33)..(352): Homolog of NCBI NO: 9758060 NR Description: cysteine-tRNA ligase [Arabidopsis thaliana]
  misc_feature (34)..(370): Homolog of NCBI NO: 23055378 NR Description: hypothetical protein [Geobacter metallireducens]
  misc_feature (34)..(376): Homolog of NCBI NO: 23001592 NR Description: hypothetical protein [Magnetococcus sp. MC-1]
  misc_feature (32)..(348): Homolog of NCBI NO: 15228880 NR Description: cysteine-tRNA ligase-related protein [Arabidopsis
  misc_feature (34)..(377): Homolog of NCBI NO: 39998454 NR Description: cysteinyl-tRNA synthetase [Geobacter
  misc_feature (34)..(358): Homolog of NCBI NO: 34497201 NR Description: cysteinyl-tRNA synthetase [Chromobacterium

SEQ ID NO: 18092 - DNA, 1142 bp, Zea mays subsp. mays
  misc_feature (1)..(1142): Ceres Seq. ID no. 13499219
  misc_feature: MA Experiment ID: 108527 Result: Down-regulated in Transcription
  misc_feature: MA Experiment 108527 PARAMETER Experiment Name: Zm_5mM_NO_P Parameter: Age (day) Value: 8
  misc_feature: MA Experiment 108527 PARAMETER Experiment Name: Zm_5mM_NO_P Parameter: Organism Value: Zea mays
  misc_feature: MA Experiment 108527 PARAMETER Experiment Name: Zm_5mM_NO_P Parameter: Plant Line Value: 35A19
  misc_feature: MA Experiment 108527 PARAMETER Experiment Name: Zm_5mM_NO_P Parameter: Timepoint (hr) Value: 6
  misc_feature: MA Experiment 108527 PARAMETER Experiment Name: Zm_5mM_NO_P Parameter: Tissue Value: Aerial
  misc_feature: MA Experiment 108527 PARAMETER Experiment Name: Zm_5mM_NO_P Parameter: Treatment Value: 5mM NO vs. No Treatment
  misc_feature: MA Experiment ID: 108559 Result: Down-regulated in Transcription
  misc_feature: MA Experiment 108559 PARAMETER Experiment Name: Zm_5mM_NO_P Parameter: Age (day) Value: 8
  misc_feature: MA Experiment 108559 PARAMETER Experiment Name: Zm_5mM_NO_P Parameter: Organism Value: Zea mays
  misc_feature: MA Experiment 108559 PARAMETER Experiment Name: Zm_5mM_NO_P Parameter: Plant Line Value: 35A19
  misc_feature: MA Experiment 108559 PARAMETER Experiment Name: Zm_5mM_NO_P Parameter: Timepoint (hr) Value: 12
  misc_feature: MA Experiment 108559 PARAMETER Experiment Name: Zm_5mM_NO_P Parameter: Tissue Value: Aerial
  misc_feature: MA Experiment 108559 PARAMETER Experiment Name: Zm_5mM_NO_P Parameter: Treatment Value: 5mM NO vs. No Treatment
  misc_feature: MA Experiment ID: 108687 Result: Down-regulated in Transcription
  misc_feature: MA Experiment 108687 PARAMETER Experiment Name: Zm_Embryos-Flowers__P Parameter: Tissue Value: Embryo vs. Aerial+
tagaacatcctaatcgaaaaatgacaatacccggcggcgagcaacggatcctccctgtcccggccgtgctcttcatccgccgcccgggcgcgcctttcggcaacgcgatgcacgagcgcttccgcgtgctggagctgccctcgccggcctcgggcgagcaggcagcggctttcctcgccgccgccgcggcagagccggacccgcctcgcgccgcggtcgtcatgggaggcggcgccgtccgcgcggacgcggcgttcctcgacgccgtcccctcggtccgctgcctcgtcagcacggccgcgggcgttgaccacatcgacctcgccgagtgcgcgcgccgcggcgtcgccgtcgccaactctgggacagtctacgccgccgacgtcgcagaccacgccgtccgcatgctcatcgacgtgcttcgccgcgtgtcggcggcggggcggttcgtacggcgcgggctatggccgctgcaggagggcgagtaccctctcggctccaagctagggggcaagcgtgtgggcatcatcggattggggaacattggttcgctggttgcaaagaggctggaagctttcggctgtgtcatctgctacaattccagaagacgcatggactcagtctcctacagatacttctccaacgttcagcgtcttgcttccgaatcagacgtgctcgttgtcgcatgcgcactgaacaaagagacacgccacattgtgaatgaggatgtcctggaggccctggggaaggatggggtcgtcataaacattggccgaggcgcaagcatcgacgaggcggccttagtcagcgcgctgaaagagggaaggatcgctggagctgggctcgaagtctttgagaacgaacccaaggtgcctccggagctcatgtccatggacagtgtggtgctgacgcctcattcagcggttttcacgacggagtcgagggcggacctgtgtcagcacctgatttgcaacctggaagcgttctttgccggtaagccactcatcacgcccgtgctgcgtttgacagagtaggtcgtgttgcaggctagttaagctattgggaggtaactaaattgttatttgtatatatagctgcaaactatagggctgtgttccttataaaatggatccattgattcg

SEQ ID NO: 18093 - protein, 343 aa, Zea mays subsp. mays
  peptide (1)..(343): Ceres Seq. ID no. 13499220
  misc_feature (45)..(330): Homolog of NCBI NO: 22979887 NR Description: hypothetical protein [Ralstonia metallidurans]
  misc_feature (10)..(338): Homolog of NCBI NO: 23011804 NR Description: hypothetical protein [Magnetospirillum
  misc_feature (20)..(338): Homolog of NCBI NO: 23104708 NR Description: hypothetical protein [Azotobacter vinelandii]
  misc_feature (73)..(339): Homolog of NCBI NO: 15220005 NR Description: oxidoreductase family [Arabidopsis thaliana]
  misc_feature (22)..(339): Homolog of NCBI NO: 34904262 NR Description: putative Caulobacter crescentus D-isomer specific
  misc_feature (58)..(338): Homolog of NCBI NO: 38345308 NR Description: OSJNBb0085F13.13 [Oryza sativa (japonica
  misc_feature (20)..(338): Homolog of NCBI NO: 15222015 NR Description: oxidoreductase family [Arabidopsis thaliana]
  misc_feature (19)..(339): Homolog of NCBI NO: 7485630 NR Description: probable glycerate dehydrogenase [imported] -
  misc_feature (39)..(339): Homolog of NCBI NO: 21636166 NR Description: unknown [Aegilops tauschii]
  misc_feature (7)..(339): Homolog of NCBI NO: 38345306 NR Description: OSJNBb0085F13.6 [Oryza sativa (japonica
EHPNRKMTIPGGEQRILPVPAVLFIRRPGAPFGNAMHERFRVLELPSPASGEQAAAFLAAAAAEPDPPRAAVVMGGGAVRADAAFLDAVPSVRCLVSTAAGVDHIDLAECARRGVAVANSGTVYAADVADHAVRMLIDVLRRVSAAGRFVRRGLWPLQEGEYPLGSKLGGKRVGIIGLGNIGSLVAKRLEAFGCVICYNSRRRMDSVSYRYFSNVQRLASESDVLVVACALNKETRHIVNEDVLEALGKDGVVINIGRGASIDEAALVSALKEGRIAGAGLEVFENEPKVPPELMSMDSVVLTPHSAVFTTESRADLCQHLICNLEAFFAGKPLITPVLRLTE

SEQ ID NO: 18094 - protein, 337 aa, Zea mays subsp. mays
  peptide (1)..(337): Ceres Seq. ID no. 13499221
  misc_feature (39)..(324): Homolog of NCBI NO: 22979887 NR Description: hypothetical protein [Ralstonia metallidurans]
  misc_feature (4)..(332): Homolog of NCBI NO: 23011804 NR Description: hypothetical protein [Magnetospirillum
  misc_feature (14)..(332): Homolog of NCBI NO: 23104708 NR Description: hypothetical protein [Azotobacter vinelandii]
  misc_feature (67)..(333): Homolog of NCBI NO: 15220005 NR Description: oxidoreductase family [Arabidopsis thaliana]
  misc_feature (16)..(333): Homolog of NCBI NO: 34904262 NR Description: putative Caulobacter crescentus D-isomer specific
  misc_feature (52)..(332): Homolog of NCBI NO: 38345308 NR Description: OSJNBb0085F13.13 [Oryza sativa (japonica
  misc_feature (14)..(332): Homolog of NCBI NO: 15222015 NR Description: oxidoreductase family [Arabidopsis thaliana]
  misc_feature (13)..(333): Homolog of NCBI NO: 7485630 NR Description: probable glycerate dehydrogenase [imported] -
  misc_feature (33)..(333): Homolog of NCBI NO: 21636166 NR Description: unknown [Aegilops tauschii]
  misc_feature (1)..(333): Homolog of NCBI NO: 38345306 NR Description: OSJNBb0085F13.6 [Oryza sativa (japonica
MTIPGGEQRILPVPAVLFIRRPGAPFGNAMHERFRVLELPSPASGEQAAAFLAAAAAEPDPPRAAVVMGGGAVRADAAFLDAVPSVRCLVSTAAGVDHIDLAECARRGVAVANSGTVYAADVADHAVRMLIDVLRRVSAAGRFVRRGLWPLQEGEYPLGSKLGGKRVGIIGLGNIGSLVAKRLEAFGCVICYNSRRRMDSVSYRYFSNVQRLASESDVLVVACALNKETRHIVNEDVLEALGKDGVVINIGRGASIDEAALVSALKEGRIAGAGLEVFENEPKVPPELMSMDSVVLTPHSAVFTTESRADLCQHLICNLEAFFAGKPLITPVLRLTE

SEQ ID NO: 18095 - protein, 308 aa, Zea mays subsp. mays
  peptide (1)..(308): Ceres Seq. ID no. 13499222
  misc_feature (10)..(295): Homolog of NCBI NO: 22979887 NR Description: hypothetical protein [Ralstonia metallidurans]
  misc_feature (1)..(303): Homolog of NCBI NO: 23011804 NR Description: hypothetical protein [Magnetospirillum
  misc_feature (1)..(303): Homolog of NCBI NO: 23104708 NR Description: hypothetical protein [Azotobacter vinelandii]
  misc_feature (38)..(304): Homolog of NCBI NO: 15220005 NR Description: oxidoreductase family [Arabidopsis thaliana]
  misc_feature (1)..(304): Homolog of NCBI NO: 34904262 NR Description: putative Caulobacter crescentus D-isomer specific
  misc_feature (23)..(303): Homolog of NCBI NO: 38345308 NR Description: OSJNBb0085F13.13 [Oryza sativa (japonica
  misc_feature (1)..(303): Homolog of NCBI NO: 15222015 NR Description: oxidoreductase family [Arabidopsis thaliana]
  misc_feature (1)..(304): Homolog of NCBI NO: 7485630 NR Description: probable glycerate dehydrogenase [imported] -
  misc_feature (4)..(304): Homolog of NCBI NO: 21636166 NR Description: unknown [Aegilops tauschii]
  misc_feature (1)..(304): Homolog of NCBI NO: 38345306 NR Description: OSJNBb0085F13.6 [Oryza sativa (japonica
MHERFRVLELPSPASGEQAAAFLAAAAAEPDPPRAAVVMGGGAVRADAAFLDAVPSVRCLVSTAAGVDHIDLAECARRGVAVANSGTVYAADVADHAVRMLIDVLRRVSAAGRFVRRGLWPLQEGEYPLGSKLGGKRVGIIGLGNIGSLVAKRLEAFGCVICYNSRRRMDSVSYRYFSNVQRLASESDVLVVACALNKETRHIVNEDVLEALGKDGVVINIGRGASIDEAALVSALKEGRIAGAGLEVFENEPKVPPELMSMDSVVLTPHSAVFTTESRADLCQHLICNLEAFFAGKPLITPVLRLTE

SEQ ID NO: 18096 - DNA, 868 bp, Zea mays subsp. mays
  misc_feature (1)..(868): Ceres Seq. ID no. 12358010
  misc_feature: MA Experiment ID: 108522 Result: Down-regulated in Transcription
  misc_feature: MA Experiment 108522 PARAMETER Experiment Name: Zm_42deg_Heat_P Parameter: Age (day) Value: 8
  misc_feature: MA Experiment 108522 PARAMETER Experiment Name: Zm_42deg_Heat_P Parameter: Organism Value: Zea mays
  misc_feature: MA Experiment 108522 PARAMETER Experiment Name: Zm_42deg_Heat_P Parameter: Plant Line Value: 35A19
  misc_feature: MA Experiment 108522 PARAMETER Experiment Name: Zm_42deg_Heat_P Parameter: Temperature (deg C) Value: 42 vs. 22
  misc_feature: MA Experiment 108522 PARAMETER Experiment Name: Zm_42deg_Heat_P Parameter: Timepoint (hr) Value: 1
  misc_feature: MA Experiment 108522 PARAMETER Experiment Name: Zm_42deg_Heat_P Parameter: Tissue Value: Aerial
  misc_feature: MA Experiment ID: 108527 Result: Down-regulated in Transcription
  misc_feature: MA Experiment 108527 PARAMETER Experiment Name: Zm_5mM_NO_P Parameter: Age (day) Value: 8
  misc_feature: MA Experiment 108527 PARAMETER Experiment Name: Zm_5mM_NO_P Parameter: Organism Value: Zea mays
  misc_feature: MA Experiment 108527 PARAMETER Experiment Name: Zm_5mM_NO_P Parameter: Plant Line Value: 35A19
  misc_feature: MA Experiment 108527 PARAMETER Experiment Name: Zm_5mM_NO_P Parameter: Timepoint (hr) Value: 6
  misc_feature: MA Experiment 108527 PARAMETER Experiment Name: Zm_5mM_NO_P Parameter: Tissue Value: Aerial
  misc_feature: MA Experiment 108527 PARAMETER Experiment Name: Zm_5mM_NO_P Parameter: Treatment Value: 5mM NO vs. No Treatment
  misc_feature: MA Experiment ID: 108534 Result: Down-regulated in Transcription
  misc_feature: MA Experiment 108534 PARAMETER Experiment Name: Zm_4deg_Cold_P Parameter: Age (hr) Value: 8
  misc_feature: MA Experiment 108534 PARAMETER Experiment Name: Zm_4deg_Cold_P Parameter: Organism Value: Zea mays
  misc_feature: MA Experiment 108534 PARAMETER Experiment Name: Zm_4deg_Cold_P Parameter: Plant Line Value: 35A19
  misc_feature: MA Experiment 108534 PARAMETER Experiment Name: Zm_4deg_Cold_P Parameter: Temperature (deg C) Value: 4 vs. 22
  misc_feature: MA Experiment 108534 PARAMETER Experiment Name: Zm_4deg_Cold_P Parameter: Timepoint (hr) Value: 6
  misc_feature: MA Experiment 108534 PARAMETER Experiment Name: Zm_4deg_Cold_P Parameter: Tissue Value: Aerial
  misc_feature: MA Experiment ID: 108535 Result: Down-regulated in Transcription
  misc_feature: MA Experiment 108535 PARAMETER Experiment Name: Zm_Meristem_P Parameter: Age (day) Value: 8
  misc_feature: MA Experiment 108535 PARAMETER Experiment Name: Zm_Meristem_P Parameter: Organism Value: Zea mays
  misc_feature: MA Experiment 108535 PARAMETER Experiment Name: Zm_Meristem_P Parameter: Plant Line Value: 35A19
  misc_feature: MA Experiment 108535 PARAMETER Experiment Name: Zm_Meristem_P Parameter: Tissue Value: Root Meristem vs. Above Root Meristem
  misc_feature: MA Experiment ID: 108543 Result: Down-regulated in Transcription
  misc_feature: MA Experiment ID: 108687 Result: Down-regulated in Transcription
  misc_feature: MA Experiment 108687 PARAMETER Experiment Name: Zm_Embryos-Flowers__P Parameter: Tissue Value: Embryo vs. Aerial+
  misc_feature: MA Experiment ID: 20000492 Result: Down-regulated in Transcription
  misc_feature: MA Experiment 20000492 PARAMETER Experiment Name: Zm_Hybrid_Seed_Dev_P Parameter: DAP Value: 12
  misc_feature: MA Experiment 20000492 PARAMETER Experiment Name: Zm_Hybrid_Seed_Dev_P Parameter: Organism Value: Zea mays
  misc_feature: MA Experiment 20000492 PARAMETER Experiment Name: Zm_Hybrid_Seed_Dev_P Parameter: Plant Line Value: 35A19
  misc_feature: MA Experiment 20000492 PARAMETER Experiment Name: Zm_Hybrid_Seed_Dev_P Parameter: Tissue Value: Fert Kernel vs. Unfert Floret
  misc_feature: MA Experiment ID: 20000535 Result: Down-regulated in Transcription
  misc_feature: MA Experiment 20000535 PARAMETER Experiment Name: Zm_Hybrid_Seed_Dev_P Parameter: DAP Value: 30 vs. 12
  misc_feature: MA Experiment 20000535 PARAMETER Experiment Name: Zm_Hybrid_Seed_Dev_P Parameter: Organism Value: Zea mays
  misc_feature: MA Experiment 20000535 PARAMETER Experiment Name: Zm_Hybrid_Seed_Dev_P Parameter: Plant Line Value: 35A19
  misc_feature: MA Experiment 20000535 PARAMETER Experiment Name: Zm_Hybrid_Seed_Dev_P Parameter: Tissue Value: Embryo vs. Unfert Floret
gtattgcgggaactgaaagcaaaccaaaaaagaaagagagggggagagacacagaggcctcactccacacactgtcttgtctctcagtcccagagctttcttggatcgcgaggaatccactggaaattttgcaattgtagtagagaactgtatcgtccgacgaaggtgcatggtgttggccatgggtcacggcagggaacagagacgagcaggtcggcgctctccccccagctcattgatcctgtcctcgctataaggtagtcctgcggtggcctccgaatttcactcaatcgaacacgacatgaagcggccacgcggcgccagtccccctctggctgcgatgaccaatccgaacgatgatggttacggcgtggtcgggatggaggcggacgcagacgcggacgcggacgaggagatgatggcgtgcggcggcggcggggagaagaagcggcgcctgagctccgagcaggtgcgcgcgctggagcggagcttcgaggtggagaacaagctggagccggagcgcaaggcgcggctggcgcgcgacctcggcctgcagccgcgccaggtcgccgtctggttccagaaccgccgcgcccgctggaagaccaagcagctggagcgcgactactccgcgctccgccagtcctacgacgcgctgcggcacgaccacgacgcgctgcgccgcgacaaggacgccctcctcgccgagatcaaggagctcaaggcgaagctcggggacgaggaggcagcggcgagcttcacgtcggtcaaggcggagccggcggcctcggacgggcctccccccgtaggggtggggtcgtccgagagtgactccagcgcggtgctgaacgacgcggacccgcccgtg

SEQ ID NO: 18097 - protein, 189 aa, Zea mays subsp. mays
  peptide (1)..(189): Ceres Seq. ID no. 12358011
  misc_feature (48)..(102): Pfam Name: Homeobox domain Pfam Description: Homeobox domain
  misc_feature (48)..(102): Pfam Name: Homeobox domain Pfam Description: Homeobox domain
  misc_feature (26)..(159): Homolog of NCBI NO: 18399966 NR Description: homeodomain transcription factor (ATHB-6)
  misc_feature (26)..(159): Homolog of NCBI NO: 25386231 NR Description: homeodomain transcription factor (ATHB-6)
  misc_feature (26)..(159): Homolog of NCBI NO: 5305602 NR Description: homeobox protein ATHB6 [Arabidopsis thaliana]
  misc_feature (10)..(188): Homolog of NCBI NO: 8133126 NR Description: hb-6-like protein [Brassica rapa subsp.
  misc_feature (36)..(164): Homolog of NCBI NO: 22651698 NR Description: homeodomain protein Hfi22 [Nicotiana tabacum]
  misc_feature (26)..(159): Homolog of NCBI NO: 18399966 NR Description: homeodomain transcription factor (ATHB-6)
  misc_feature (26)..(159): Homolog of NCBI NO: 5305602 NR Description: homeobox protein ATHB6 [Arabidopsis thaliana]
  misc_feature (36)..(164): Homolog of NCBI NO: 22651698 NR Description: homeodomain protein Hfi22 [Nicotiana tabacum]
  misc_feature (1)..(186): Homolog of NCBI NO: 5006853 NR Description: homeodomain leucine zipper protein [Oryza sativa]
  misc_feature (20)..(188): Homolog of NCBI NO: 33943626 NR Description: homeodomain leucine-zipper protein Hox8
  misc_feature (20)..(188): Homolog of NCBI NO: 37533686 NR Description: putative homeodomain leucine zipper protein
  misc_feature (3)..(184): Homolog of NCBI NO: 18034439 NR Description: homeodomain leucine zipper protein CPHB-4
  misc_feature (41)..(154): Homolog of NCBI NO: 34902432 NR Description: Unknown protein [Oryza sativa (japonica
  misc_feature (10)..(188): Homolog of NCBI NO: 8133126 NR Description: hb-6-like protein [Brassica rapa subsp.
  misc_feature (26)..(159): Homolog of NCBI NO: 25386231 NR Description: homeodomain transcription factor (ATHB-6)
  misc_feature (41)..(154): Homolog of NCBI NO: 34902432 NR Description: Unknown protein [Oryza sativa (japonica
  misc_feature (3)..(184): Homolog of NCBI NO: 18034439 NR Description: homeodomain leucine zipper protein CPHB-4
  misc_feature (20)..(188): Homolog of NCBI NO: 37533686 NR Description: putative homeodomain leucine zipper protein
  misc_feature (20)..(188): Homolog of NCBI NO: 33943626 NR Description: homeodomain leucine-zipper protein Hox8
  misc_feature (1)..(186): Homolog of NCBI NO: 5006853 NR Description: homeodomain leucine zipper protein [Oryza sativa]
MKRPRGASPPLAAMTNPNDDGYGVVGMEADADADADEEMMACGGGGEKKRRLSSEQVRALERSFEVENKLEPERKARLARDLGLQPRQVAVWFQNRRARWKTKQLERDYSALRQSYDALRHDHDALRRDKDALLAEIKELKAKLGDEEAAASFTSVKAEPAASDGPPPVGVGSSESDSSAVLNDADPPV

SEQ ID NO: 18098 - protein, 176 aa, Zea mays subsp. mays
  peptide (1)..(176): Ceres Seq. ID no. 12358012
  misc_feature (35)..(89): Pfam Name: Homeobox domain Pfam Description: Homeobox domain
  misc_feature (35)..(89): Pfam Name: Homeobox domain Pfam Description: Homeobox domain
  misc_feature (13)..(146): Homolog of NCBI NO: 25386231 NR Description: homeodomain transcription factor (ATHB-6)
  misc_feature (13)..(146): Homolog of NCBI NO: 18399966 NR Description: homeodomain transcription factor (ATHB-6)
  misc_feature (13)..(146): Homolog of NCBI NO: 5305602 NR Description: homeobox protein ATHB6 [Arabidopsis thaliana]
  misc_feature (1)..(175): Homolog of NCBI NO: 8133126 NR Description: hb-6-like protein [Brassica rapa subsp.
  misc_feature (23)..(151): Homolog of NCBI NO: 22651698 NR Description: homeodomain protein Hfi22 [Nicotiana tabacum]
  misc_feature (13)..(146): Homolog of NCBI NO: 25386231 NR Description: homeodomain transcription factor (ATHB-6)
  misc_feature (13)..(146): Homolog of NCBI NO: 5305602 NR Description: homeobox protein ATHB6 [Arabidopsis thaliana]
  misc_feature (23)..(151): Homolog of NCBI NO: 22651698 NR Description: homeodomain protein Hfi22 [Nicotiana tabacum]
  misc_feature (1)..(173): Homolog of NCBI NO: 5006853 NR Description: homeodomain leucine zipper protein [Oryza sativa]
  misc_feature (7)..(175): Homolog of NCBI NO: 33943626 NR Description: homeodomain leucine-zipper protein Hox8
  misc_feature (7)..(175): Homolog of NCBI NO: 37533686 NR Description: putative homeodomain leucine zipper protein
  misc_feature (1)..(171): Homolog of NCBI NO: 18034439 NR Description: homeodomain leucine zipper protein CPHB-4
  misc_feature (28)..(141): Homolog of NCBI NO: 34902432 NR Description: Unknown protein [Oryza sativa (japonica
  misc_feature (1)..(175): Homolog of NCBI NO: 8133126 NR Description: hb-6-like protein [Brassica rapa subsp.
  misc_feature (13)..(146): Homolog of NCBI NO: 18399966 NR Description: homeodomain transcription factor (ATHB-6)
  misc_feature (28)..(141): Homolog of NCBI NO: 34902432 NR Description: Unknown protein [Oryza sativa (japonica
  misc_feature (1)..(171): Homolog of NCBI NO: 18034439 NR Description: homeodomain leucine zipper protein CPHB-4
  misc_feature (7)..(175): Homolog of NCBI NO: 37533686 NR Description: putative homeodomain leucine zipper protein
  misc_feature (7)..(175): Homolog of NCBI NO: 33943626 NR Description: homeodomain leucine-zipper protein Hox8
  misc_feature (1)..(173): Homolog of NCBI NO: 5006853 NR Description: homeodomain leucine zipper protein [Oryza sativa]
MTNPNDDGYGVVGMEADADADADEEMMACGGGGEKKRRLSSEQVRALERSFEVENKLEPERKARLARDLGLQPRQVAVWFQNRRARWKTKQLERDYSALRQSYDALRHDHDALRRDKDALLAEIKELKAKLGDEEAAASFTSVKAEPAASDGPPPVGVGSSESDSSAVLNDADPPV

SEQ ID NO: 18099 - protein, 163 aa, Zea mays subsp. mays
  peptide (1)..(163): Ceres Seq. ID no. 12358013
  misc_feature (22)..(76): Pfam Name: Homeobox domain Pfam Description: Homeobox domain
  misc_feature (22)..(76): Pfam Name: Homeobox domain Pfam Description: Homeobox domain
  misc_feature (1)..(133): Homolog of NCBI NO: 25386231 NR Description: homeodomain transcription factor (ATHB-6)
  misc_feature (1)..(133): Homolog of NCBI NO: 18399966 NR Description: homeodomain transcription factor (ATHB-6)
  misc_feature (1)..(133): Homolog of NCBI NO: 5305602 NR Description: homeobox protein ATHB6 [Arabidopsis thaliana]
  misc_feature (1)..(162): Homolog of NCBI NO: 8133126 NR Description: hb-6-like protein [Brassica rapa subsp.
  misc_feature (10)..(138): Homolog of NCBI NO: 22651698 NR Description: homeodomain protein Hfi22 [Nicotiana tabacum]
  misc_feature (1)..(133): Homolog of NCBI NO: 25386231 NR Description: homeodomain transcription factor (ATHB-6)
  misc_feature (1)..(133): Homolog of NCBI NO: 5305602 NR Description: homeobox protein ATHB6 [Arabidopsis thaliana]
  misc_feature (10)..(138): Homolog of NCBI NO: 22651698 NR Description: homeodomain protein Hfi22 [Nicotiana tabacum]
  misc_feature (1)..(160): Homolog of NCBI NO: 5006853 NR Description: homeodomain leucine zipper protein [Oryza sativa]
  misc_feature (1)..(162): Homolog of NCBI NO: 33943626 NR Description: homeodomain leucine-zipper protein Hox8
  misc_feature (1)..(162): Homolog of NCBI NO: 37533686 NR Description: putative homeodomain leucine zipper protein
  misc_feature (1)..(158): Homolog of NCBI NO: 18034439 NR Description: homeodomain leucine zipper protein CPHB-4
  misc_feature (15)..(128): Homolog of NCBI NO: 34902432 NR Description: Unknown protein [Oryza sativa (japonica
  misc_feature (1)..(162): Homolog of NCBI NO: 8133126 NR Description: hb-6-like protein [Brassica rapa subsp.
  misc_feature (1)..(133): Homolog of NCBI NO: 18399966 NR Description: homeodomain transcription factor (ATHB-6)
  misc_feature (15)..(128): Homolog of NCBI NO: 34902432 NR Description: Unknown protein [Oryza sativa (japonica
  misc_feature (1)..(158): Homolog of NCBI NO: 18034439 NR Description: homeodomain leucine zipper protein CPHB-4
  misc_feature (1)..(162): Homolog of NCBI NO: 37533686 NR Description: putative homeodomain leucine zipper protein
  misc_feature (1)..(162): Homolog of NCBI NO: 33943626 NR Description: homeodomain leucine-zipper protein Hox8
  misc_feature (1)..(160): Homolog of NCBI NO: 5006853 NR Description: homeodomain leucine zipper protein [Oryza sativa]
MEADADADADEEMMACGGGGEKKRRLSSEQVRALERSFEVENKLEPERKARLARDLGLQPRQVAVWFQNRRARWKTKQLERDYSALRQSYDALRHDHDALRRDKDALLAEIKELKAKLGDEEAAASFTSVKAEPAASDGPPPVGVGSSESDSSAVLNDADPPV

SEQ ID NO: 18100 - DNA, 1182 bp, Zea mays subsp. mays
  misc_feature (1)..(1182): Ceres Seq. ID no. 12359313
  misc_feature: MA Experiment ID: 108529 Result: Down-regulated in Transcription
  misc_feature: MA Experiment 108529 PARAMETER Experiment Name: Zm_Imbibed_Seeds_P Parameter: Age (day) Value: 5 vs. 2
  misc_feature: MA Experiment 108529 PARAMETER Experiment Name: Zm_Imbibed_Seeds_P Parameter: Organism Value: Zea mays
  misc_feature: MA Experiment 108529 PARAMETER Experiment Name: Zm_Imbibed_Seeds_P Parameter: Plant Line Value: 35A19
  misc_feature: MA Experiment 108529 PARAMETER Experiment Name: Zm_Imbibed_Seeds_P Parameter: Tissue Value: Roots vs. Embryo
  misc_feature: MA Experiment ID: 108530 Result: Down-regulated in Transcription
  misc_feature: MA Experiment 108530 PARAMETER Experiment Name: Zm_Imbibed_Seeds_P Parameter: Age (day) Value: 6 vs. 2
  misc_feature: MA Experiment 108530 PARAMETER Experiment Name: Zm_Imbibed_Seeds_P Parameter: Organism Value: Zea mays
  misc_feature: MA Experiment 108530 PARAMETER Experiment Name: Zm_Imbibed_Seeds_P Parameter: Plant Line Value: 35A19
  misc_feature: MA Experiment 108530 PARAMETER Experiment Name: Zm_Imbibed_Seeds_P Parameter: Tissue Value: Aerial vs. Embryo
  misc_feature: MA Experiment ID: 108536 Result: Up-regulated in Transcription
  misc_feature: MA Experiment 108536 PARAMETER Experiment Name: Zm_Meristem_P Parameter: Age (day) Value: 8
  misc_feature: MA Experiment 108536 PARAMETER Experiment Name: Zm_Meristem_P Parameter: Organism Value: Zea mays
  misc_feature: MA Experiment 108536 PARAMETER Experiment Name: Zm_Meristem_P Parameter: Plant Line Value: 35A19
  misc_feature: MA Experiment 108536 PARAMETER Experiment Name: Zm_Meristem_P Parameter: Tissue Value: Shoot Meristem vs. Above Shoot Meristem
  misc_feature: MA Experiment ID: 108544 Result: Down-regulated in Transcription
  misc_feature: MA Experiment ID: 108546 Result: Down-regulated in Transcription
  misc_feature: MA Experiment 108546 PARAMETER Experiment Name: Zm_Imbibed_Seeds_P Parameter: Age (day) Value: 3 vs. 2
  misc_feature: MA Experiment 108546 PARAMETER Experiment Name: Zm_Imbibed_Seeds_P Parameter: Organism Value: Zea mays
  misc_feature: MA Experiment 108546 PARAMETER Experiment Name: Zm_Imbibed_Seeds_P Parameter: Plant Line Value: 35A19
  misc_feature: MA Experiment 108546 PARAMETER Experiment Name: Zm_Imbibed_Seeds_P Parameter: Tissue Value: Roots vs. Embryo
  misc_feature: MA Experiment ID: 108689 Result: Up-regulated in Transcription
  misc_feature: MA Experiment 108689 PARAMETER Experiment Name: Zm_Drought_Roots_P Parameter: Age (day) Value: 9
  misc_feature: MA Experiment 108689 PARAMETER Experiment Name: Zm_Drought_Roots_P Parameter: Organism Value: Zea mays
  misc_feature: MA Experiment 108689 PARAMETER Experiment Name: Zm_Drought_Roots_P Parameter: Plant Line Value: 35A19
  misc_feature: MA Experiment 108689 PARAMETER Experiment Name: Zm_Drought_Roots_P Parameter: Timepoint (hr) Value: 24
  misc_feature: MA Experiment 108689 PARAMETER Experiment Name: Zm_Drought_Roots_P Parameter: Tissue Value: Roots
  misc_feature: MA Experiment 108689 PARAMETER Experiment Name: Zm_Drought_Roots_P Parameter: Treatment Value: Drought vs. No Drought
  misc_feature: MA Experiment ID: 20000535 Result: Up-regulated in Transcription
  misc_feature: MA Experiment 20000535 PARAMETER Experiment Name: Zm_Hybrid_Seed_Dev_P Parameter: DAP Value: 30 vs. 12
  misc_feature: MA Experiment 20000535 PARAMETER Experiment Name: Zm_Hybrid_Seed_Dev_P Parameter: Organism Value: Zea mays
  misc_feature: MA Experiment 20000535 PARAMETER Experiment Name: Zm_Hybrid_Seed_Dev_P Parameter: Plant Line Value: 35A19
  misc_feature: MA Experiment 20000535 PARAMETER Experiment Name: Zm_Hybrid_Seed_Dev_P Parameter: Tissue Value: Embryo vs. Unfert Floret
acggactggggaccgtctctctcctgtcgagctcccacgtactcgtgcacacaacacagctgctgctcaaagagccacatgcctagtagactagtcttagtagctagcttagagagagggaggggagaggatcagaggaggcgaggggaaggaaggagaggagaagaagcaaccaaccaagaacaagagaaggtaagaaggcgttagctaggctaccggagaggaggagagccggcgcaccatggatcaacagcagcaccaggagcggccgtgggaggtgtaccgggagtgcatgcgcaaccacgcggcgaagctcgggacatacgcctccgacggatgctgcgagtacacccccgacgacggccagcccgcagcgatgctctgcgccgcctgcggctgccaccgcaacttccaccggaaggcgttcctcgccgacgctgcggcgggagcgcacggcggcgcgcacggggcaatgctgccctctcccggcgcgtccccgggctacggcatgcaccacatggcgattgctgcggccggcatgggcggtgacgccggcgcgcacggctcctgctccgggtccgggggcaggcgccggacgcggaccaagttcacggacgagcagaaggagcgcatggcgcggttggcggagcggctcggctggcggatgcccaagcgggagcccggccgcgcgctgggggacgacgaggtgggccgcttctgccgggagatcggggtcaccaggcaggtcttcaaggtatggatgcacaaccacaagtccggtggtggcggcagccagggcgagggcgccagcgctggcgctgccggagccgctcagacgacgtcgtcgtccacgacgcgtggcggcggcggcggcggcgttgttggaggaggcgggagcatgtccacggcgatgatgggcgccgacgtcgaggacgacgaggaggtgaggggcagcgagatgtgcatgtaggctgtagccgcgccccgcgttacgtacgtggcatgcgcggcggcaatggcacggcacggcattgcctcgcccttggctgcgatcgaggattaacatctccttttgctgctaattcctttgggtccttttgcttcgatgtgttgatgattgattgtttatgatgagatattcattgttatcacggctatgctaattaatgctgtgtcagtgtc

SEQ ID NO: 18101 - protein, 242 aa, Zea mays subsp. mays
  peptide (1)..(242): Ceres Seq. ID no. 12359314
  misc_feature (14)..(60): Pfam Name: ZF-HD protein dimerisation region Pfam Description: ZF-HD protein dimerisation region
  misc_feature (14)..(178): Homolog of NCBI NO: 18398714 NR Description: expressed protein
  misc_feature (14)..(208): Homolog of NCBI NO: 15242243 NR Description: putative protein; protein id: At5g15210.1
  misc_feature (6)..(60): Homolog of NCBI NO: 15228530 NR Description: unknown protein
  misc_feature (104)..(228): Homolog of NCBI NO: 15228530 NR Description: unknown protein
  misc_feature (3)..(60): Homolog of NCBI NO: 13277220 NR Description: ZF-HD homeobox protein [Flaveria bidentis]
  misc_feature (111)..(223): Homolog of NCBI NO: 13277220 NR Description: ZF-HD homeobox protein [Flaveria bidentis]
  misc_feature (14)..(182): Homolog of NCBI NO: 15233925 NR Description: putative protein
  misc_feature (14)..(95): Homolog of NCBI NO: 32480091 NR Description: OSJNBb0086G13.8 [Oryza sativa (japonica
  misc_feature (84)..(217): Homolog of NCBI NO: 32480091 NR Description: OSJNBb0086G13.8 [Oryza sativa (japonica
  misc_feature (4)..(242): Homolog of NCBI NO: 28301934 NR Description: putative ZF-HD homeobox protein
MDQQQHQERPWEVYRECMRNHAAKLGTYASDGCCEYTPDDGQPAAMLCAACGCHRNFHRKAFLADAAAGAHGGAHGAMLPSPGASPGYGMHHMAIAAAGMGGDAGAHGSCSGSGGRRRTRTKFTDEQKERMARLAERLGWRMPKREPGRALGDDEVGRFCREIGVTRQVFKVWMHNHKSGGGGSQGEGASAGAAGAAQTTSSSTTRGGGGGGVVGGGGSMSTAMMGADVEDDEEVRGSEMCM

SEQ ID NO: 18102 - protein, 225 aa, Zea mays subsp. mays
  peptide (1)..(225): Ceres Seq. ID no. 12359315
  misc_feature (1)..(43): Pfam Name: ZF-HD protein dimerisation region Pfam Description: ZF-HD protein dimerisation region
  misc_feature (1)..(161): Homolog of NCBI NO: 18398714 NR Description: expressed protein
  misc_feature (1)..(191): Homolog of NCBI NO: 15242243 NR Description: putative protein; protein id: At5g15210.1
  misc_feature (1)..(43): Homolog of NCBI NO: 15228530 NR Description: unknown protein
  misc_feature (87)..(211): Homolog of NCBI NO: 15228530 NR Description: unknown protein
  misc_feature (1)..(43): Homolog of NCBI NO: 13277220 NR Description: ZF-HD homeobox protein [Flaveria bidentis]
  misc_feature (94)..(206): Homolog of NCBI NO: 13277220 NR Description: ZF-HD homeobox protein [Flaveria bidentis]
  misc_feature (1)..(165): Homolog of NCBI NO: 15233925 NR Description: putative protein
  misc_feature (1)..(78): Homolog of NCBI NO: 32480091 NR Description: OSJNBb0086G13.8 [Oryza sativa (japonica
  misc_feature (67)..(200): Homolog of NCBI NO: 32480091 NR Description: OSJNBb0086G13.8 [Oryza sativa (japonica
  misc_feature (1)..(225): Homolog of NCBI NO: 28301934 NR Description: putative ZF-HD homeobox protein
MRNHAAKLGTYASDGCCEYTPDDGQPAAMLCAACGCHRNFHRKAFLADAAAGAHGGAHGAMLPSPGASPGYGMHHMAIAAAGMGGDAGAHGSCSGSGGRRRTRTKFTDEQKERMARLAERLGWRMPKREPGRALGDDEVGRFCREIGVTRQVFKVWMHNHKSGGGGSQGEGASAGAAGAAQTTSSSTTRGGGGGGVVGGGGSMSTAMMGADVEDDEEVRGSEMCM

SEQ ID NO: 18103 - protein, 197 aa, Zea mays subsp. mays
  peptide (1)..(197): Ceres Seq. ID no. 12359316
  misc_feature (39)..(172): Homolog of NCBI NO: 32480091 NR Description: OSJNBb0086G13.8 [Oryza sativa (japonica
  misc_feature (1)..(197): Homolog of NCBI NO: 28301934 NR Description: putative ZF-HD homeobox protein
  misc_feature (1)..(133): Homolog of NCBI NO: 18398714 NR Description: expressed protein
  misc_feature (1)..(163): Homolog of NCBI NO: 15242243 NR Description: putative protein; protein id: At5g15210.1
  misc_feature (1)..(15): Homolog of NCBI NO: 15228530 NR Description: unknown protein
  misc_feature (59)..(183): Homolog of NCBI NO: 15228530 NR Description: unknown protein
  misc_feature (1)..(15): Homolog of NCBI NO: 13277220 NR Description: ZF-HD homeobox protein [Flaveria bidentis]
  misc_feature (66)..(178): Homolog of NCBI NO: 13277220 NR Description: ZF-HD homeobox protein [Flaveria bidentis]
  misc_feature (1)..(137): Homolog of NCBI NO: 15233925 NR Description: putative protein
  misc_feature (1)..(50): Homolog of NCBI NO: 32480091 NR Description: OSJNBb0086G13.8 [Oryza sativa (japonica
MLCAACGCHRNFHRKAFLADAAAGAHGGAHGAMLPSPGASPGYGMHHMAIAAAGMGGDAGAHGSCSGSGGRRRTRTKFTDEQKERMARLAERLGWRMPKREPGRALGDDEVGRFCREIGVTRQVFKVWMHNHKSGGGGSQGEGASAGAAGAAQTTSSSTTRGGGGGGVVGGGGSMSTAMMGADVEDDEEVRGSEMCM

SEQ ID NO: 18104 - DNA, 704 bp, Zea mays subsp. mays
  misc_feature (1)..(704): Ceres Seq. ID no. 12416245
  misc_feature: MA Experiment ID: 20000535 Result: Up-regulated in Transcription
  misc_feature: MA Experiment 20000535 PARAMETER Experiment Name: Zm_Hybrid_Seed_Dev_P Parameter: DAP Value: 30 vs. 12
  misc_feature: MA Experiment 20000535 PARAMETER Experiment Name: Zm_Hybrid_Seed_Dev_P Parameter: Organism Value: Zea mays
  misc_feature: MA Experiment 20000535 PARAMETER Experiment Name: Zm_Hybrid_Seed_Dev_P Parameter: Plant Line Value: 35A19
  misc_feature: MA Experiment 20000535 PARAMETER Experiment Name: Zm_Hybrid_Seed_Dev_P Parameter: Tissue Value: Embryo vs. Unfert Floret
gtgtgcacatgtgtctggcagcgtgccccaaggagctgcaggtggagcgcggtggcacggtggcgtgccggagcgcgtgtgaggcgttcgggcaggaccagtactgctgcagcggcgcgtacgcgacgccggcggcgtgccgcccgacggcctactcgtccatcttcaagtcggcgtgcccgcgcgcgtacagctacgcctacgacgacggctccagcaccttcacctgccacagcgccgccggctacaccatcgccttctgcctccctccgtcgtccgggttgcacggctctgatgtcactcccctcgtttcgccgccggcgtctgggcaaagcaccggcagagttggcggcgatggcgtcggaagcgccgaccagccgcctcatcctgctactggcaacagtgatggagggggctaccatcagctgtggatgacgatgtcgctagccagcacgctccacgatcagctgtggcttctgctgcctctgcctgcagtgctcttgctcctcctctgaccaccctcccggcctcccctcgctcaccatgaagatgaaatgaagctcttgtactgtaaggttcactcattgacggtatagtccccatgcgtagcagcggtagtaaaaccatccatcatgcccagtggggacggaaacatgtacagaatacagatacagactggatccgtttacgtatagattacgacg

SEQ ID NO: 18105 - protein, 170 aa, Zea mays subsp. mays
  peptide (1)..(170): Ceres Seq. ID no. 12416246
  misc_feature (7)..(87): Pfam Name: Thaumatin family Pfam Description: Thaumatin family
  misc_feature (6)..(87): Homolog of NCBI NO: 30686314 NR Description: thaumatin family [Arabidopsis thaliana]
  misc_feature (7)..(97): Homolog of NCBI NO: 30692042 NR Description: thaumatin family [Arabidopsis thaliana]
  misc_feature (7)..(112): Homolog of NCBI NO: 30686652 NR Description: thaumatin family [Arabidopsis thaliana]
  misc_feature (7)..(112): Homolog of NCBI NO: 25296204 NR Description: hypothetical protein T20H2.19 [imported] -
  misc_feature (8)..(158): Homolog of NCBI NO: 21592749 NR Description: putative thaumatin-like protein [Arabidopsis
  misc_feature (8)..(158): Homolog of NCBI NO: 18420282 NR Description: putative thaumatin-like protein
  misc_feature (8)..(158): Homolog of NCBI NO: 7442168 NR Description: pathogenesis-related protein F20M13.220 -
  misc_feature (6)..(108): Homolog of NCBI NO: 37531036 NR Description: putative thaumatin-like protein
  misc_feature (7)..(87): Homolog of NCBI NO: 15238593 NR Description: thaumatin-like protein; protein id: At5g24620.1
  misc_feature (7)..(150): Homolog of NCBI NO: 34905146 NR Description: putative pathogenesis-related protein
VHMCLAACPKELQVERGGTVACRSACEAFGQDQYCCSGAYATPAACRPTAYSSIFKSACPRAYSYAYDDGSSTFTCHSAAGYTIAFCLPPSSGLHGSDVTPLVSPPASGQSTGRVGGDGVGSADQPPHPATGNSDGGGYHQLWMTMSLASTLHDQLWLLLPLPAVLLLLL

SEQ ID NO: 18106 - protein, 168 aa, Zea mays subsp. mays
  peptide (1)..(168): Ceres Seq. ID no. 12416247
  misc_feature (5)..(85): Pfam Name: Thaumatin family Pfam Description: Thaumatin family
  misc_feature (4)..(85): Homolog of NCBI NO: 30686314 NR Description: thaumatin family [Arabidopsis thaliana]
  misc_feature (5)..(95): Homolog of NCBI NO: 30692042 NR Description: thaumatin family [Arabidopsis thaliana]
  misc_feature (5)..(110): Homolog of NCBI NO: 30686652 NR Description: thaumatin family [Arabidopsis thaliana]
  misc_feature (5)..(110): Homolog of NCBI NO: 25296204 NR Description: hypothetical protein T20H2.19 [imported] -
  misc_feature (6)..(156): Homolog of NCBI NO: 18420282 NR Description: putative thaumatin-like protein
  misc_feature (6)..(156): Homolog of NCBI NO: 21592749 NR Description: putative thaumatin-like protein [Arabidopsis
  misc_feature (6)..(156): Homolog of NCBI NO: 7442168 NR Description: pathogenesis-related protein F20M13.220 -
  misc_feature (4)..(106): Homolog of NCBI NO: 37531036 NR Description: putative thaumatin-like protein
  misc_feature (5)..(85): Homolog of NCBI NO: 15238593 NR Description: thaumatin-like protein; protein id: At5g24620.1
  misc_feature (5)..(148): Homolog of NCBI NO: 34905146 NR Description: putative pathogenesis-related protein
MCLAACPKELQVERGGTVACRSACEAFGQDQYCCSGAYATPAACRPTAYSSIFKSACPRAYSYAYDDGSSTFTCHSAAGYTIAFCLPPSSGLHGSDVTPLVSPPASGQSTGRVGGDGVGSADQPPHPATGNSDGGGYHQLWMTMSLASTLHDQLWLLLPLPAVLLLLL

SEQ ID NO: 18107 - protein, 144 aa, Zea mays subsp. mays
  peptide (1)..(144): Ceres Seq. ID no. 12416248
VCTCVWQRAPRSCRWSAVARWRAGARVRRSGRTSTAAAARTRRRRRAARRPTRPSSSRRARARTATPTTTAPAPSPATAPPATPSPSASLRRPGCTALMSLPSFRRRRLGKAPAELAAMASEAPTSRLILLLATVMEGATISCG
